United States Patent Application Publication US 2009/0305900 A1 - sequence listing, part 2

SEQ ID NO: 1370 - protein, 39 aa, Homosapiens
MVSRWSPASQRRRLCNRAWRPSEDLRQGEEDNFTRDKTA

SEQ ID NO: 1371 - DNA, 3601 bp, Homosapiens
cttgctaggaattcacatttcctcataactcacttttattactactttgtaatactatagcagtatgaacggtcctgtagggagcctgaactgtttcactgagcacggcttcttcatcaaagaagattatgtcaacaatattttatgactcctgatactgtaacttgaaaaagtaaatagtgaaagtactccggatatgttggaagttcttttgcaacctggagaatacctgagaagagtcactgccactgtggtacagaaactgtatgccaattcagttggcatgcagggagtaattgaattgacctggatatatggaatcttgggtggagagagtgaatgatgagaaaactatgagaaaatctcttgggcttgcttcagaggctgctgtgtgcagaacagagagagaaggtggtagcttactctggtcctcagggcaacagccattgcatggaggaagaaaagaggggctgtggccagtcctgaatctgggaaggtgttgtccagaattcctgaccaccacagaacatcccttcctgatgtgtgaggtggagctatgtggcctgagttaggggcaatggtttcagaaagctgaagtggaaacaatgctggattggaaaaagtcagaaaactctagagaagactgcatttgtgctctctgtggtcttcctgctgtaatgttccaggccaggattggttcttctgggtataagtcatgaggggattcaacctgcacctggaaagaaggtatcaagctagggatggggagaaattacccagggcaatccagtgctggggattacacaatgaaaagtcccttagacagcagtgtggtggatacttccaccaacattcattcagtaaatatcttctggtgacctggtatggatcttttaattctgaggcaatcacagagatggcaggtcaccagtagtttctaactgaaggtggtagtaactggcaatgcattgctttaggactgtaggcattacagctatttttttcaatatgaactttataatgtagaactaagaccccagaaaaacctcatagatataaaattttcctctctagctattgatgtcattttatttacttatttatttttgtttggtttgatttggttatgggttagcaatctgaaagcagttaccattactaattctaaaaatggattcaaaataggaacacttccaaattagaagcatttttttaaaaggagtctgaattcaaaagtctgactttatctttatcaaatgcttttggcaatgttgaagaaatcttctgggagaaatgtaataaacatttcttggagggacagcatagagtgcaaacatctcaaacgtgattcacttgcattttctgaacaatgcttttgcctactctgagctgttggttccagtatttggagttctcatgacagaaatccaaaaccacttctagattcttctcctccatgaccaccctaatgttattcatgcacttgctttgcacaaacacctctttctgtgataaaacctggaacctgaaatcaatgaatacagacaacacaatagcacttgaacttctgactttattatttttcttcaaatgaacaggtgataaaacactgtgtccaaagcaaaatgcatgactcccttttctcttctttcacagagtaccagaaaatgtaaacaatatttagcttgaacttctgagtcctcatcttttttttaacagcctttagaacaacattaatttgtttgtttatactagcattttacaacataaaaaataaaataagcaaactgtctgaggggtttatataaggttttcagattctgatacaggcttgcatctgcatcgtttttagtctgacaaagagaaacactgctttaggaagtgggtcatgtgggtgtataagtggttcgtggacaggccggataagccgtggttctggtcagagtaccactgaaacacaaagaaaaaagcttgttttattcctgcagtcatcaaatgcatttagcttggacttttttgtgctctcaggacctgataatctttctattatggggaaactgtacctaagaacactcaaataagtaaaatagcttacatgtaaatatttacagcaggaagagctttcgttaacctccactactgtttcacatgctttaaacatattttagatctcagtggctgagatctcgcatcatccagcatcctggaagatcaggatcaggcatcagagttgccagaagtgatgcactgggtctgttaattttgcttctttggagtctggtttcttcatttgaaaaacaaaggggttggagttgattttccctaagattccttgtagctcaaaaattccatgaggctttcagcctgtgaatctaattcctctctgttgcagaaaatccacaatataatgtattcatatatagccataaacaccctttataggagttaaaaatagcatttttaaaaagtgaaagatagtattttaactttaaacttcactcttggagagataccactaagattattgctttcactgaataaaggtatcagtggtcacgatgtaataatatatatttactaagttgaatttactttggggatcacaataaaaaaggtcagaaaaagctcacctccctctttgtatatttttaaaaatttgatatataatagttgtgtatctttttgggggtacagtgatattttgatagctgaatacaatgtgtaatgatcaaatcaagataactgaaatacccatcacctcaaacaaatttccttttatgttgggaaaattataattattctcttccagctattttgaattatacaatcaattatcattgaccataatttccctactgtactttcaaatactagaacttatttttttctgtcttttgtaccccttaaccaacttcttcttataccccctcccccatttctttcccagtcagtacattttttaaaaacaaatgttgaaaagatgggggtctccttttcggggttcttgttcaacttaagcaattgagggagcatttgtgagaggaaaaggtagctaccaagaatgctgccccgcccccaactttggctttcactttattttcttttctggttcaatttctcattcctcaagcaacctggattttacatttagctaattcattcattcactcagtaagaagctgagcatctgtgataagccaggtgtatgccaggggatgagaatacataggtgaaaagttctctaaccacaaatggagccatatgatttcagggagccttggaggtttgtgatgacattctgcaactgcttcttactgaacaaacagaatcttctagctgtttaaggatgctcaggttttgcagggactctaagcatataattgcacttattcacataggatttcagaactactggatgtttgaactagaagatcatttaatcttgtgaactcctttattttacatgactcaactgggaacacgagaggtgatctggtttgcctcgggtccttcagtagttaaagaaagatccaagattcatttgctaatgttctgcctactctatcctgcagcctctttgtcagattttactttaaaagtt

SEQ ID NO: 1372 - protein, 85 aa, Homosapiens
MESWVERVNDEKTMRKSLGLASEAAVCRTEREGGSLLWSSGQQPLHGGRKEGLWPVLNLGRCCPEFLTTTEHPFLMCEVELCGLS

SEQ ID NO: 1373 - DNA, 621 bp, Homosapiens
gaaaaatttggccgcagacatgctgatggttctttctctgatgagatgaacaccattcttgataatcttgccgccagggactttataaactggttgattcagaccaaaatcactgacaggaaataactatatcactattcaagatcatcttcacaacatcacctgctagccacgtgggatgtttgaaatgttaagtcctgtaaatttaagaggtgtattctgaggccacattgctttgcatgccaataaataaattttcttttagtgttgtgtagccaaaaattacaaatggaataaagttttatcaaaatattgctaaaatatcagctttaaaatatgaaagtgctagattctgttattttcttcttattttggatgaagtaccccaacctgtttacatttagcgataaaattatttttctatgatataatttgtaaatgtaaattattccgatctgacatatctgcattataataataggagaatagaagaactggtagccacagtggtgaaattggaaagagaactttcttcctgaaacctttgtcttaaaaatactcagctttcaatgtatcaaagatacaattaaataaaattttcaagcttctttaccattgtct

SEQ ID NO: 1374 - protein, 42 aa, Homosapiens
PKITNGIKFYQNIAKISALKYESARFCYFLLILDEVPQPVYI

SEQ ID NO: 1375 - DNA, 1186 bp, Homosapiens
agaataatggttggtttttaaaacattaataattaaacttataaaaccaatggtaaaatagtttctcactcttgacgatattttgcagtgttttaaagggataccaaaaattctgcaatagtaaaccagtgaaagagaaaaatctaatatagatgaagctttaacctcttaatactgcattttgcaaggctgttcctgcaagctctggttttataggatatgatatatttagttgaattacagactaataatctcaacaatagtttctgtattgtcaatatactaaaatcttcaaaacagcctagaagattgaaaagggcatgaaattatgcaggcttggtattagatcccagctctgctactttctctttccagtagtcactggtccacatgggtttttatcaggtatttcacagtacaccctttaaaaacagaatcctttactgtttcctcaagacacttgtgcatgttaccagtggtagacaatctgtgatcatttattgaaaatatctaatcaaacgctaattttaacacttattttcttagtttcccagaagaggtcgccattgttgaagaacttggccgcagacatgctgatggttctttctctgatgagatgaacaccattcttgataatcttgccgccagggactttataaactggttgattcagaccaaaatcactgacaggaaataactatatcactattcaagatcatcttcacaacatcacctgctagccacgtgggatgtttgaaatgttaagtcctgtaaatttaagaggtgtattctgaggccacattgctttgcatgccaataaataaattttcttttagtgttgtgtagccaaaaattacaaatggaataaagttttatcaaaatattgctaaaatatcagctttaaaatatgaaagtgctagattctgttattttcttcttattttggatgaagtaccccaacctgtttacatttagcgataaaattatttttctatgatataatttgtaaatgtaaattattccgatctgacatatctgcattataataataggagaatagaagaactggtagccacagtggtgaaattggaaagagaactttcttcctgaaacctttgtcttaaaaatactcagctttcaatgtatcaaagatacaattaaataaaattttcaagcttctttacca

SEQ ID NO: 1376 - protein, 37 aa, Homosapiens
MGFYQVFHSTPFKNRILYCFLKTLVHVTSGRQSVIIY

SEQ ID NO: 1377 - DNA, 1048 bp, Homosapiens
ccagaagacagcagaaatgaaaagcatttactttgtggctggattatttgtaatgctggtacaaggcagctggcaacgttcccttcaagacacagaggagaaatccagatcattctcagcttcccaggcagacccactcagtgatcctgatcagatgaacgaggacaagcgccattcacagggcacattcaccagtgactacagcaagtatctggactccaggcgtgcccaagattttgtgcagtggttgatgaataccaagaggaacaggaataacattgccaaacgtcacgatgaatttgagagacatgctgaagggacctttaccagtgatgtaagttcttatttggaaggccaagctgccaaggaattcattgcttggctggtgaaaggccgaggaaggcgagatttcccagaagaggtcgccattgttgaagaacttggccgcagacatgctgatggttctttctctgatgagatgaacaccattcttgataatcttgccgccagggactttataaactggttgattcagaccaaaatcactgacaggaaataactatatcactattcaagatcatcttcacaacatcacctgctagccacgtgggatgtttgaaatgttaagtcctgtaaatttaagaggtgtattctgaggccacattgctttgcatgccaataaataaattttcttttagtgttgtgtagccaaaaattacaaatggaataaagttttatcaaaatattgctaaaatatcagctttaaaatatgaaagtgctagattctgttattttcttcttattttggatgaagtaccccaacctgtttacatttagcgataaaattatttttctatgatataatttgtaaatgtaaattattccgatctgacatatctgcattataataataggagaatagaagaactggtagccacagtggtgaaattggaaagagaactttcttcctgaaacctttgtcttaaaaatactcagctttcaatgtatcaaagatacaattaaataaaattttcaagcttctttacca

SEQ ID NO: 1378 - protein, 180 aa, Homosapiens; identical to SEQ ID NO: 98

SEQ ID NO: 1379 - DNA, 983 bp, Homosapiens
gctctctcttcacctgctctgttctacagcacactaccagaagatcattctcagcttcccaggcagacccactcagtgatcctgatcagatgaacgaggacaagcgccattcacagggcacattcaccagtgactacagcaagtatctggactccaggcgtgcccaagattttgtgcagtggttgatgaataccaagaggaacaggaataacattgccaaacgtcacgatgaatttgagagacatgctgaagggacctttaccagtgatgtaagttcttatttggaaggccaagctgccaaggaattcattgcttggctggtgaaaggccgaggaaggcgagatttcccagaagaggtcgccattgttgaagaacttggccgcagacatgctgatggttctttctctgatgagatgaacaccattcttgataatcttgccgccagggactttataaactggttgattcagaccaaaatcactgacaggaaataactatatcactattcaagatcatcttcacaacatcacctgctagccacgtgggatgtttgaaatgttaagtcctgtaaatttaagaggtgtattctgaggccacattgctttgcatgccaataaataaattttcttttagtgttgtgtagccaaaaattacaaatggaataaagttttatcaaaatattgctaaaatatcagctttaaaatatgaaagtgctagattctgttattttcttcttattttggatgaagtaccccaacctgtttacatttagcgataaaattatttttctatgatataatttgtaaatgtaaattattccgatctgacatatctgcattataataataggagaatagaagaactggtagccacagtggtgaaattggaaagagaactttcttcctgaaacctttgtcttaaaaatactcagctttcaatgtatcaaagatacaattaaataaaattttcaagcttctttacca

SEQ ID NO: 1380 - protein, 134 aa, Homosapiens
MNEDKRHSQGTFTSDYSKYLDSRRAQDFVQWLMNTKRNRNNIAKRHDEFERHAEGTFTSDVSSYLEGQAAKEFIAWLVKGRGRRDFPEEVAIVEELGRRHADGSFSDEMNTILDNLAARDFINWLIQTKITDRK

SEQ ID NO: 1381 - DNA, 1005 bp, Homosapiens
ttcccaaagagggcttgctctctcttcacctgctctgttctacagcacactaccagaagacagcagaaatgaaaagcatttactttgtggctggattatttgtaatgctggtacaaggcagctggcaacgttcccttcaagacacagaggagaaatccagatcattctcagcttcccaggcgtgcccaagattttgtgcagtggttgatgaataccaagaggaacaggaataacattgccaaacgtcacgatgaatttgagagacatgctgaagggacctttaccagtgatgtaagttcttatttggaaggccaagctgccaaggaattcattgcttggctggtgaaaggccgaggaaggcgagatttcccagaagaggtcgccattgttgaagaacttggccgcagacatgctgatggttctttctctgatgagatgaacaccattcttgataatcttgccgccagggactttataaactggttgattcagaccaaaatcactgacaggaaataactatatcactattcaagatcatcttcacaacatcacctgctagccacgtgggatgtttgaaatgttaagtcctgtaaatttaagaggtgtattctgaggccacattgctttgcatgccaataaataaattttcttttagtgttgtgtagccaaaaattacaaatggaataaagttttatcaaaatattgctaaaatatcagctttaaaatatgaaagtgctagattctgttattttcttcttattttggatgaagtaccccaacctgtttacatttagcgataaaattatttttctatgatataatttgtaaatgtaaattattccgatctgacatatctgcattataataataggagaatagaagaactggtagccacagtggtgaaattggaaagagaactttcttcctgaaacctttgtcttaaaaatactcagctttcaatgtatcaaagatacaattaaataaaattttcaagcttctttacca

SEQ ID NO: 1382 - protein, 102 aa, Homosapiens
MNTKRNRNNIAKRHDEFERHAEGTFTSDVSSYLEGQAAKEFIAWLVKGRGRRDFPEEVAIVEELGRRHADGSFSDEMNTILDNLAARDFINWLIQTKITDRK

SEQ ID NO: 1383 - DNA, 1047 bp, Homosapiens
ggacacagagcacatcaaaagttcccaaagagggcttgctctctcttcacctgctctgttctacagcacactaccagaagacagcagaaatgaaaagcatttactttgtggctggattatttgtaatgctggtacaaggcagctggcaacgttcccttcaagacacagaggagaaatccagatcattctcagcttcccaggcagacccactcagtgatcctgatcagatgaacgaggacaagcgccattcacagggcacattcaccagtgactacagcaagtatctggactccaggcgtgcccaagattttgtgcagtggttgatgaataccaagaggaacaggaataacattgccaaacgtcacgatgaatttgagagacatgctgaagggacctttaccagtgattttcccagaagaggtcgccattgttgaagaacttggccgcagacatgctgatggttctttctctgatgagatgaacaccattcttgataatcttgccgccagggactttataaactggttgattcagaccaaaatcactgacaggaaataactatatcactattcaagatcatcttcacaacatcacctgctagccacgtgggatgtttgaaatgttaagtcctgtaaatttaagaggtgtattctgaggccacattgctttgcatgccaataaataaattttcttttagtgttgtgtagccaaaaattacaaatggaataaagttttatcaaaatattgctaaaatatcagctttaaaatatgaaagtgctagattctgttattttcttcttattttggatgaagtaccccaacctgtttacatttagcgataaaattatttttctatgatataatttgtaaatgtaaattattccgatctgacatatctgcattataataataggagaatagaagaactggtagccacagtggtgaaattggaaagagaactttcttcctgaaacctttgtcttaaaaatactcagctttcaatgtatcaaagatacaattaaataaaattttcaagcttctttacca

SEQ ID NO: 1384 - protein, 114 aa, Homosapiens
MKSIYFVAGLFVMLVQGSWQRSLQDTEEKSRSFSASQADPLSDPDQMNEDKRHSQGTFTSDYSKYLDSRRAQDFVQWLMNTKRNRNNIAKRHDEFERHAEGTFTSDFPRRGRHC

SEQ ID NO: 1385 - DNA, 1288 bp, Homosapiens
gcatagaatgcagatgagcaaagtgagtgggagagggaagtcatttgtaacaaaaactcattatttacagatgagaaatttatattgtcagcgtaatatctgtgaggctaaacagagctggagagtatataaaagcagtgcgccttggtgcagaagtacagagcttaggacacagagcacatcaaaagttcccaaagagggcttgctctctcttcacctgctctgttctacagcacactaccagaagacagcagaaatgaaaagcatttactttgtggctggattatttgtaatgctggtacaaggcagctggcaacgttcccttcaagacacagaggagaaatccagatcattctcagcttcccaggcagacccactcagtgatcctgatcagatgaacgaggacaagcgccattcacagggcacattcaccagtgactacagcaagtatctggactccaggcgtgcccaagattttgtgcagtggttgatgaataccaagaggaacaggaataacattgccaaacgtcacgatgaatttgagagacatgctgaagggacctttaccagtgatgtaagttcttatttggaaggccaagctgccaaggaattcattgcttggctggtgaaaggccgaggaaggcgagatttcccagaagaggtcgccattgttgaagaacttggccgcagacatgctgatggttctttctctgatgagatgaacaccattcttgataatcttgccgccagggactttataaactggttgattcagaccaaaatcactgacaggaaataactatatcactattcaagatcatcttcacaacatcacctgctagccacgtgggatgtttgaaatgttaagtcctgtaaatttaagaggtgtattctgaggccacattgctttgcatgccaataaataaattttcttttagtgttgtgtagccaaaaattacaaatggaataaagttttatcaaaatattgctaaaatatcagctttaaaatatgaaagtgctagattctgttattttcttcttattttggatgaagtaccccaacctgtttacatttagcgataaaattatttttctatgatataatttgtaaatgtaaattattccgatctgacatatctgcattataataataggagaatagaagaactggtagccacagtggtgaaattggaaagagaactttcttcctgaaacctttgtcttaaaaatactcagctttcaatgtatcaaagatacaattaaataaaattttcaagcttctttacca

SEQ ID NO: 1386 - protein, 263 aa, Homosapiens
MQMSKVSGRGKSFVTKTHYLQMRNLYCQRNICEAKQSWRVYKSSAPWCRSTELRTQSTSKVPKEGLLSLHLLCSTAHYQKTAEMKSIYFVAGLFVMLVQGSWQRSLQDTEEKSRSFSASQADPLSDPDQMNEDKRHSQGTFTSDYSKYLDSRRAQDFVQWLMNTKRNRNNIAKRHDEFERHAEGTFTSDVSSYLEGQAAKEFIAWLVKGRGRRDFPEEVAIVEELGRRHADGSFSDEMNTILDNLAARDFINWLIQTKITDRK

SEQ ID NO: 1387 - DNA, 772 bp, Homosapiens
ccagaagacagcagaaatgaaaagcatttactttgtggctggattatttgtaatgctggtacaaggcagctggcaacgttcccttcaagacacagaggagaaatccagatcattctcagcttcccaggcagacccactcagtgatcctgatcagatgaacgaggacaagcgccattcacagggcacattcaccagtgactacagcaagtatctggactccaggcgtgcccaagattttgtgcagtggttgatgaataccaagaggaacaggaataacattgccaaacgtcacgatgaatttgagagacatgctgaagggacctttaccagtgatgtaagttcttatttggaaggccaagctgccaaggaattcattgcttggctggtgaaaggccgaggaaggcgagatttcccagaagaggtcgccattgttgaagaacttggccgcagacatgctgatggttctttctctgatgagatgaacaccattcttgataatcttgccgccagggactttataaactggttgattcagaccaaaatcactgacaggaaataactatatcactattcaagatcatcttcacaacatcacctgctagccacgtgggatgtttgaaatgttaagtcctgtaaatttaagaggtgtattctgaggccacattgctttgcatgccaataaataaattttcttttagtgttgtgtagccaaaaattacaaatggaataaagttttatcaaaatattgctaaaatatcagctttaaaatatg

SEQ ID NO: 1388 - protein, 180 aa, Homosapiens; identical to SEQ ID NO: 98

SEQ ID NO: 1389 - DNA, 707 bp, Homosapiens
gctctctcttcacctgctctgttctacagcacactaccagaagatcattctcagcttcccaggcagacccactcagtgatcctgatcagatgaacgaggacaagcgccattcacagggcacattcaccagtgactacagcaagtatctggactccaggcgtgcccaagattttgtgcagtggttgatgaataccaagaggaacaggaataacattgccaaacgtcacgatgaatttgagagacatgctgaagggacctttaccagtgatgtaagttcttatttggaaggccaagctgccaaggaattcattgcttggctggtgaaaggccgaggaaggcgagatttcccagaagaggtcgccattgttgaagaacttggccgcagacatgctgatggttctttctctgatgagatgaacaccattcttgataatcttgccgccagggactttataaactggttgattcagaccaaaatcactgacaggaaataactatatcactattcaagatcatcttcacaacatcacctgctagccacgtgggatgtttgaaatgttaagtcctgtaaatttaagaggtgtattctgaggccacattgctttgcatgccaataaataaattttcttttagtgttgtgtagccaaaaattacaaatggaataaagttttatcaaaatattgctaaaatatcagctttaaaatatg

SEQ ID NO: 1390 - protein, 134 aa, Homosapiens; identical to SEQ ID NO: 1380

SEQ ID NO: 1391 - DNA, 729 bp, Homosapiens
ttcccaaagagggcttgctctctcttcacctgctctgttctacagcacactaccagaagacagcagaaatgaaaagcatttactttgtggctggattatttgtaatgctggtacaaggcagctggcaacgttcccttcaagacacagaggagaaatccagatcattctcagcttcccaggcgtgcccaagattttgtgcagtggttgatgaataccaagaggaacaggaataacattgccaaacgtcacgatgaatttgagagacatgctgaagggacctttaccagtgatgtaagttcttatttggaaggccaagctgccaaggaattcattgcttggctggtgaaaggccgaggaaggcgagatttcccagaagaggtcgccattgttgaagaacttggccgcagacatgctgatggttctttctctgatgagatgaacaccattcttgataatcttgccgccagggactttataaactggttgattcagaccaaaatcactgacaggaaataactatatcactattcaagatcatcttcacaacatcacctgctagccacgtgggatgtttgaaatgttaagtcctgtaaatttaagaggtgtattctgaggccacattgctttgcatgccaataaataaattttcttttagtgttgtgtagccaaaaattacaaatggaataaagttttatcaaaatattgctaaaatatcagctttaaaatatg

SEQ ID NO: 1392 - protein, 102 aa, Homosapiens; identical to SEQ ID NO: 1382

SEQ ID NO: 1393 - DNA, 1012 bp, Homosapiens
gcatagaatgcagatgagcaaagtgagtgggagagggaagtcatttgtaacaaaaactcattatttacagatgagaaatttatattgtcagcgtaatatctgtgaggctaaacagagctggagagtatataaaagcagtgcgccttggtgcagaagtacagagcttaggacacagagcacatcaaaagttcccaaagagggcttgctctctcttcacctgctctgttctacagcacactaccagaagacagcagaaatgaaaagcatttactttgtggctggattatttgtaatgctggtacaaggcagctggcaacgttcccttcaagacacagaggagaaatccagatcattctcagcttcccaggcagacccactcagtgatcctgatcagatgaacgaggacaagcgccattcacagggcacattcaccagtgactacagcaagtatctggactccaggcgtgcccaagattttgtgcagtggttgatgaataccaagaggaacaggaataacattgccaaacgtcacgatgaatttgagagacatgctgaagggacctttaccagtgatgtaagttcttatttggaaggccaagctgccaaggaattcattgcttggctggtgaaaggccgaggaaggcgagatttcccagaagaggtcgccattgttgaagaacttggccgcagacatgctgatggttctttctctgatgagatgaacaccattcttgataatcttgccgccagggactttataaactggttgattcagaccaaaatcactgacaggaaataactatatcactattcaagatcatcttcacaacatcacctgctagccacgtgggatgtttgaaatgttaagtcctgtaaatttaagaggtgtattctgaggccacattgctttgcatgccaataaataaattttcttttagtgttgtgtagccaaaaattacaaatggaataaagttttatcaaaatattgctaaaatatcagctttaaaatatg

SEQ ID NO: 1394 - protein, 263 aa, Homosapiens; identical to SEQ ID NO: 1386

SEQ ID NO: 1395 - DNA, 312 bp, Homosapiens
ttggccgcagacatgctgatggttctttctctgatgagatgaacaccattcttgataatcttgccgccagggactttataaactggttgattcagaccaaaatcactgacaggaaataactatatcactattcaagatcatcttcacaacatcacctgctagccacgtgggatgtttgaaatgttaagtcctgtaaatttaagaggtgtattctgaggccacattgctttgcatgccaataaataaattttcttttagtgttgtgtagccaaaaattacaaatggaataaagttttatcaaaatattgctaa

SEQ ID NO: 1396 - DNA, 890 bp, Homosapiens
agaataatggttggtttttaaaacattaataattaaacttataaaaccaatggtaaaatagtttctcactcttgacgatattttgcagtgttttaaagggataccaaaaattctgcaatagtaaaccagtgaaagagaaaaatctaatatagatgaagctttaacctcttaatactgcattttgcaaggctgttcctgcaagctctggttttataggatatgatatatttagttgaattacagactaataatctcaacaatagtttctgtattgtcaatatactaaaatcttcaaaacagcctagaagattgaaaagggcatgaaattatgcaggcttggtattagatcccagctctgctactttctctttccagtagtcactggtccacatgggtttttatcaggtatttcacagtacaccctttaaaaacagaatcctttactgtttcctcaagacacttgtgcatgttaccagtggtagacaatctgtgatcatttattgaaaatatctaatcaaacgctaattttaacacttattttcttagtttcccagaagaggtcgccattgttgaagaacttggccgcagacatgctgatggttctttctctgatgagatgaacaccattcttgataatcttgccgccagggactttataaactggttgattcagaccaaaatcactgacaggaaataactatatcactattcaagatcatcttcacaacatcacctgctagccacgtgggatgtttgaaatgttaagtcctgtaaatttaagaggtgtattctgaggccacattgctttgcatgccaataaataaattttcttttagtgttgtgtagccaaaaattacaaatggaataaagttttatcaaaatattgctaa

SEQ ID NO: 1397 - protein, 37 aa, Homosapiens; identical to SEQ ID NO: 1376

SEQ ID NO: 1398 - DNA, 751 bp, Homosapiens
ggacacagagcacatcaaaagttcccaaagagggcttgctctctcttcacctgctctgttctacagcacactaccagaagacagcagaaatgaaaagcatttactttgtggctggattatttgtaatgctggtacaaggcagctggcaacgttcccttcaagacacagaggagaaatccagatcattctcagcttcccaggcagacccactcagtgatcctgatcagatgaacgaggacaagcgccattcacagggcacattcaccagtgactacagcaagtatctggactccaggcgtgcccaagattttgtgcagtggttgatgaataccaagaggaacaggaataacattgccaaacgtcacgatgaatttgagagacatgctgaagggacctttaccagtgattttcccagaagaggtcgccattgttgaagaacttggccgcagacatgctgatggttctttctctgatgagatgaacaccattcttgataatcttgccgccagggactttataaactggttgattcagaccaaaatcactgacaggaaataactatatcactattcaagatcatcttcacaacatcacctgctagccacgtgggatgtttgaaatgttaagtcctgtaaatttaagaggtgtattctgaggccacattgctttgcatgccaataaataaattttcttttagtgttgtgtagccaaaaattacaaatggaataaagttttatcaaaatattgctaa

SEQ ID NO: 1399 - protein, 114 aa, Homosapiens; identical to SEQ ID NO: 1384

SEQ ID NO: 1400 - DNA, 1693 bp, Homosapiens
caagattttgtgcagtggttgatgaataccaagaggaacaggaataacattgccaaacgtcacgatgaatttgagagacatgctgaagggacctttaccagtgatgtaagttcttatttggaaggccaagctgccaaggaattcattgcttggctggtgaaaggccgaggaaggcgagagtaagtctgtacattcttatttgacattttttgccttgatgcagaaaatttaagactacagttatctatatatggatctggattacagaagcaattagtagtcttgcaaagtaaggaaataattcctattgatgaaaaacagtatataaaagttaaacccattttgtttttggtactaagtattaataatagagccaaacaggttacatttgtatccccttatagttgcattataattaggtattaaatctttggccaaaccaggccacctctgagagtaaataggatgtttttaataactacgctgagacaaatttaaactaggactgttctaggggagctagagataaggaaaaagaagaaacagtgctgaaaacttcaaatatgtaaagaaaacatataatatttaaagcttaactttaaacatttacatatgtgatcaacatatatttatatattaataaatattcagataaaaatgtgatgaagactgaaagtgaccaaacctaagatgttgataaaatgatattcaaagtacaaataggtaaaaacatccatatatttaactacatatccaattttgtatggggctgtcatatagatatctactaaataatctaagttgaaaaacaaccaagaccatcaattacttgcttagatcttaacacagccaaacagacccctgaaccatctcattttcttccgattttttttggagagatgaaatatgagagacggagaatttatgttcaactctgatttttaaattagatttaaaacaagcttactgaaatttaaagagatctcaagatgaaagagaactagaataatggttggtttttaaaacattaataattaaacttataaaaccaatggtaaaatagtttctcactcttgacgatattttgcagtgttttaaagggataccaaaaattctgcaatagtaaaccagtgaaagagaaaaatctaatatagatgaagctttaacctcttaatactgcattttgcaaggctgttcctgcaagctctggttttataggatatgatatatttagttgaattacagactaataatctcaacaatagtttctgtattgtcaatatactaaaatcttcaaaacagcctagaagattgaaaagggcatgaaattatgcaggcttggtattagatcccagctctgctactttctctttccagtagtcactggtccacatgggtttttatcaggtatttcacagtacaccctttaaaaacagaatcctttactgtttcctcaagacacttgtgcatgttaccagtggtagacaatctgtgatcatttattgaaaatatctaatcaaacgctaattttaacacttattttcttagtttcccagaagaggtcgccattgttgaagaacttggccgcagacatgctgatggttctttctctgatgagatgaacaccattcttgataatcttgccgccagggactttataaactggttgattcagaccaaaatcactgacagg

SEQ ID NO: 1401 - protein, 53 aa, Homosapiens
MNTKRNRNNIAKRHDEFERHAEGTFTSDVSSYLEGQAAKEFIAWLVKGRGRRE

SEQ ID NO: 1402 - DNA, 1238 bp, Homosapiens
ggacacagagcacatcaaaagttcccaaagagggcttgctctctcttcacctgctctgttctacagcacactaccagaagacagcagaaatgaaaagcatttactttgtggctggattatttgtaatgctggtacaaggcagctggcaacgttcccttcaagacacagaggagaaatccagatcattctcagcttcccaggcagacccactcagtgatcctgatcagatgaacgaggacaagcgccattcacagggcacattcaccagtgactacagcaagtatctggactccaggcgtgcccaagattttgtgcagtggttgatgaataccaagaggaacaggaataacattgccaaacgtcacgatgaatttgagagacatgctgaagggacctttaccagtgatgtaagttcttatttggaaggccaagctgccaaggaattcattgcttggctggtgaaaggccgaggaaggcgagagtaagtctgtacattcttatttgacattttttgccttgatgcagaaaatttaagactacagttatctatatatggatctggattacagaagcaattagtagtcttgcaaagtaaggaaataattcctattgatgaaaaacagtatataaaagttaaacccattttgtttttggtactaagtattaataatagagccaaacaggttacatttgtatccccttatagttgcattataattaggtattaaatctttggccaaaccaggccacctctgagagtaaataggatgtttttaataactacgctgagacaaatttaaactaggactgttctaggggagctagagataaggaaaaagaagaaacagtgctgaaaacttcaaatatgtaaagaaaacatataatatttaaagcttaactttaaacatttacatatgtgatcaacatatatttatatattaataaatattcagataaaaatgtgatgaagactgaaagtgaccaaacctaagatgttgataaaatgatattcaaagtacaaataggtaaaaacatccatatatttaactacatatccaattttgtatggggctgtcatatagatatctactaaataatctaagttgaaaaacaaccaagaccatcaattacttgcttagatcttaacacagccaaacagacccctgaaccatctcattttcttccgattttttttggagagatgaaatatgagagacggagaatttatgttcaactct

SEQ ID NO: 1403 - protein, 131 aa, Homosapiens
MKSIYFVAGLFVMLVQGSWQRSLQDTEEKSRSFSASQADPLSDPDQMNEDKRHSQGTFTSDYSKYLDSRRAQDFVQWLMNTKRNRNNIAKRHDEFERHAEGTFTSDVSSYLEGQAAKEFIAWLVKGRGRRE

SEQ ID NO: 1404 - DNA, 323 bp, Homosapiens
agacagcagaaatgaaaagcatttactttgtggctggattatttgtaatgctggtacaaggcagctggcaacgttcccttcaagacacagaggagaaatccagatcattctcagcttcccaggcagacccactcagtgatcctgatcagatgaacgaggacaagcgccattcacagggcacattcaccagtgactacagcaagtatctggactccaggcgtgcccaagattttgtgcagtggttgatgaataccaagaggaacaggaataacattgccaaacgtcacgatgaatttgagagacatgctgaagggacctttacc

SEQ ID NO: 1405 - protein, 103 aa, Homosapiens
MKSIYFVAGLFVMLVQGSWQRSLQDTEEKSRSFSASQADPLSDPDQMNEDKRHSQGTFTSDYSKYLDSRRAQDFVQWLMNTKRNRNNIAKRHDEFERHAEGTF

SEQ ID NO: 1406 - DNA, 478 bp, Homosapiens
gctcaggataatgtgcactttcaaaactcagcacagattgctaaagctctggttaatgcacaagtggatttccaggcaatgtggtactctgaccagaaccacggcttatccggcctgtccacgaaccacttatacacccacatgacccacttcctaaagcagtgtttctctttgtcagactaaaaacgatgcagatgcaagcctgtatcagaatctgaaaaccttatataaacccctcagacagtttgcttattttattttttatgttgtaaaatgctagtataaacaaacaaattaatgttgttctaaaggctgttaaaaaaaagatgaggactcagaagttcaagctaaatattgtttacattttctggtactctgtgaaagaagagaaaagggagtcatgcattttgctttggacacagtgttttatcacctgttcatttgaagaaaaataataaagtcagaagttcaagtgcta

SEQ ID NO: 1407 - protein, 44 aa, Homosapiens
MCTFKTQHRLLKLWLMHKWISRQCGTLTRTTAYPACPRTTYTPT

SEQ ID NO: 1408 - DNA, 2412 bp, Homosapiens
ttttctaaaggtctctggcttactctgctctcatttgaacttgaaattcagaaggaaggaaagccttcccatttcagcaggagttgctgcaaacctgctaatcaaaataagtcatttttttaaattataagtgaaagtttaaaccagacagagaattttcacttgcaataaggattttcaaacccaaatgtatcttctgtttttaaaatatactttttccctattaaaacatggttcagttctcctccaagtataataaaaagaggccatggtacaatctgagccccctcttttattctgtgttttgtagctaaaggtcttcaataaaataccccagagctaaaaacaaagaactgtaaattagtttgagaattcttcatttaactgttagattcagcaagattatttagctgattctcccattccatgcatttcatgaattaaaaatagacctctgccactgacctattaccagcaccatgtctgtctacctctctctctctctctttctcacactgtcactcattctccctgtctaaagaatgactttctctggtaaagatgatatgatctatcctgatctgagggaagtgattcccagaaatctgtggtcataaggtcctaaaaacatggtatggctttagctggagagtcacactgtccccttatgatttttagggacgttcttgcatcagggcaagaataaacacagagagtcacttcctaatctagtgcacacatttttttttggtccatgtcccagacaactgcttagtccacgttcccaggagaagcacctctctcacagcatgtttgtacagaccaaacttgcttctcacgaggcagtgcaaccttatttggatgccctgttcatttcttcatatttaagaaaaggttcaaatttccatgtgacatgggcagagatctctttctcttaacaggatcccatttctgaatcacctcttgattccttggagaagaaaatctatgagagctaaacttactcctgactctgcaaattgcatcctgttttgtatttatttccttttccttaaatttgcaggaagaaatataaggtttttaaagacaccaatgacttttcctcctttgagctgctatgtcagaaatccttagaacatgtaccactacaacatacacaaactatggccatgtcttaaattatccaaaaagttcttatggccttcctttggtattctgttgtgaaaataaataagtaaatacaaagatacatgttctgcctcacagaacttttgcaaactgcgaggatgtatcttacatttaaattttggtaattttttttctgtgcatctctttcaagtaaaatcttgtttttgttccagcatggtcctagttggaaagatatagagaaaaaaatgagaattttttttttgcaaaagaaaattgaaattctgtctatctcttaaactgctcctaccatgttttaagagggtctgttctgatcagcacaccaagtatttctaatgaattagggaagaaattaccattatgtctggtcatttatctgaagcttgctgccgaggatgcaagatagacatgtaatccacccttagccatattctccagctcccttcagtccggattgtgagtagagttgctataaacatatggaggaaagcttatgaaagtaaatctgagtctgactcataacaatgtctctacagtcctatggaggatacgtttcatcactggcccttgcatctggaactggtcttttcaaatgtggtatagcagtggctccagtctccagctgggaatattacgcgtctgtctacacagagagattcatgggtctcccaacaaaggatgataatcttgagcactataagaattcaactgtgatggcaagagcagaatatttcagaaatgtagactatcttctcatccacggaacagcagatgataatgtgcactttcaaaactcagcacagattgctaaagctctggttaatgcacaagtggatttccaggcaatgtggtactctgaccagaaccacggcttatccggcctgtccacgaaccacttatacacccacatgacccacttcctaaagcagtgtttctctttgtcagactaaaaacgatgcagatgcaagcctgtatcagaatctgaaaaccttatataaacccctcagacagtttgcttattttattttttatgttgtaaaatgctagtataaacaaacaaattaatgttgttctaaaggctgttaaaaaaaagatgaggactcagaagttcaagctaaatattgtttacattttctggtactctgtgaaagaagagaaaagggagtcatgcattttgctttggacacagtgttttatcacctgttcatttgaagaaaaataataaagtcagaagttcaagtgcta

SEQ ID NO: 1409 - protein, 141 aa, Homosapiens [sequence omitted]

SEQ ID NO: 1410 - DNA, 1484 bp, Homosapiens
agaaaaaaaccttgtcctggcttcagcttccaactacaaagacagacttggtccttttcaacggttttcacagatccagtgacccacgctctgaagacagaattagctaactttcaaaaacatctggaaaaatgaaggttacaatgaatttgaagaataccctggaagaagaaacatctacagaattagcattggaagctatcctccaagcaagaagtgtgttacttgccatctaaggaaagaaaggtgccaatattacacagcaagtttcagcgactacgccaagtactatgcacttgtctgctacggcccaggcatccccatttccacccttcatgatggacgcactgatcaagaaattaaaatcctggaagaaaacaaggaattggaaaatgctttgaaaaatatccagctgcctaaagaggaaattaagaaacttgaagtagatgaaattactttatggtacaagatgattcttcctcctcaatttgacagatcaaagaagtatcccttgctaattcaagtgtatggtggtccctgcagtcagagtgtaaggtctgtatttgctgttaattggatatcttatcttgcaagtaaggaagggatggtcattgccttggtggatggtcgaggaacagctttccaaggtgacaaactcctctatgcagtgtatcgaaagctgggtgtttatgaagttgaagaccagattacagctgtcagaaaattcatagaaatgggtttcattgatgaaaaaagaatagccatatggggctggtcctatggaggatacgtttcatcactggcccttgcatctggaactggtcttttcaaatgtggtatagcagtggctccagtctccagctgggaatattacgcgtctgtctacacagagagattcatgggtctcccaacaaaggatgataatcttgagcactataagaattcaactgtgatggcaagagcagaatatttcagaaatgtagactatcttctcatccacggaacagcagatgataatgtgcactttcaaaactcagcacagattgctaaagctctggttaatgcacaagtggatttccaggcaatgtggtactctgaccagaaccacggcttatccggcctgtccacgaaccacttatacacccacatgacccacttcctaaagcagtgtttctctttgtcagactaaaaacgatgcagatgcaagcctgtatcagaatctgaaaaccttatataaacccctcagacagtttgcttattttattttttatgttgtaaaatgctagtataaacaaacaaattaatgttgttctaaaggctgttaaaaaaaagatgaggactcagaagttcaagctaaatattgtttacattttctggtactctgtgaaagaagagaaaagggagtcatgcattttgctttggacacagtgttttatcacctgttcatttgaagaaaaataataaagtcagaagttcaagtgcta

SEQ ID NO: 1411 - protein, 239 aa, Homosapiens
MILPPQFDRSKKYPLLIQVYGGPCSQSVRSVFAVNWISYLASKEGMVIALVDGRGTAFQGDKLLYAVYRKLGVYEVEDQITAVRKFIEMGFIDEKRIAIWGWSYGGYVSSLALASGTGLFKCGIAVAPVSSWEYYASVYTERFMGLPTKDDNLEHYKNSTVMARAEYFRNVDYLLIHGTADDNVHFQNSAQIAKALVNAQVDFQAMWYSDQNHGLSGLSTNHLYTHMTHFLKQCFSLSD

SEQ ID NO: 1412 - DNA, 2786 bp, Homosapiens
aagaacgcccccaaaatctgtttctaattttacagaaatcttttgaaacttggcacggtattcaaaagtccgtggaaagaaaaaaaccttgtcctggcttcagcttccaactacaaagacagacttggtccttttcaacggttttcacagatccagtgacccacgctctgaagacagaattagctaactttcaaaaacatctggaaaaatgaagacttgggtaaaaatcgtatttggagttgccacctctgctgtgcttgccttattggtgatgtgcattgtcttacgcccttcaagagttcataactctgaagaaaatacaatgagagcactcacactgaaggatattttaaatggaacattttcttataaaacattttttccaaactggatttcaggacaagaatatcttcatcaatctgcagataacaatatagtactttataatattgaaacaggacaatcatataccattttgagtaatagaaccatgaaaagtgtgaatgcttcaaattacggcttatcacctgatcggcaatttgtatatctagaaagtgattattcaaagctttggagatactcttacacagcaacatattacatctatgaccttagcaatggagaatttgtaagaggaaatgagcttcctcgtccaattcagtatttatgctggtcgcctgttgggagtaaattagcatatgtctatcaaaacaatatctatttgaaacaaagaccaggagatccaccttttcaaataacatttaatggaagagaaaataaaatatttaatggaatcccagactgggtttatgaagaggaaatgcttgctacaaaatatgctctctggtggtctcctaatggaaaatttttggcatatgcggaatttaatgatacggatataccagttattgcctattcctattatggcgatgaacaatatcctagaacaataaatattccatacccaaaggctggagctaagaatcccgttgttcggatatttattatcgataccacttaccctgcgtatgtaggtccccaggaagtgcctgttccagcaatgatagcctcaagtgattattatttcagttggctcacgtgggttactgatgaacgagtatgtttgcagtggctaaaaagagtccagaatgtttcggtcctgtctatatgtgacttcagggaagactggcagacatgggattgtccaaagacccaggagcatatagaagaaagcagaactggatgggctggtggattctttgtttcaacaccagttttcagctatgatgccatttcgtactacaaaatatttagtgacaaggatggctacaaacatattcactatatcaaagacactgtggaaaatgctattcaaattacaagtggcaagtgggaggccataaatatattcagagtaacacaggattcactgttttattctagcaatgaatttgaagaataccctggaagaagaaacatctacagaattagcattggaagctatcctccaagcaagaagtgtgttacttgccatctaaggaaagaaaggtgccaatattacacagcaagtttcagcgactacgccaagtactatgcacttgtctgctacggcccaggcatccccatttccacccttcatgatggacgcactgatcaagaaattaaaatcctggaagaaaacaaggaattggaaaatgctttgaaaaatatccagctgcctaaagaggaaattaagaaacttgaagtagatgaaattactttatggtacaagatgattcttcctcctcaatttgacagatcaaagaagtatcccttgctaattcaagtgtatggtggtccctgcagtcagagtgtaaggtctgtatttgctgttaattggatatcttatcttgcaagtaaggaagggatggtcattgccttggtggatggtcgaggaacagctttccaaggtgacaaactcctctatgcagtgtatcgaaagctgggtgtttatgaagttgaagaccagattacagctgtcagaaaattcatagaaatgggtttcattgatgaaaaaagaatagccatatggggctggtcctatggaggatacgtttcatcactggcccttgcatctggaactggtcttttcaaatgtggtatagcagtggctccagtctccagctgggaatattacgcgtctgtctacacagagagattcatgggtctcccaacaaaggatgataatcttgagcactataagaattcaactgtgatggcaagagcagaatatttcagaaatgtagactatcttctcatccacggaacagcagatgataatgtgcactttcaaaactcagcacagattgctaaagctctggttaatgcacaagtggatttccaggcaatgtggtactctgaccagaaccacggcttatccggcctgtccacgaaccacttatacacccacatgacccacttcctaaagcagtgtttctctttgtcagactaaaaacgatgcagatgcaagcctgtatcagaatctgaaaaccttatataaacccctcagacagtttgcttattttattttttatgttgtaaaatgctagtataaacaaacaaattaatgttgttctaaaggctgttaaaaaaaagatgaggactcagaagttcaagctaaatattgtttacattttctggtactctgtgaaagaagagaaaagggagtcatgcattttgctttggacacagtgttttatcacctgttcatttgaagaaaaataataaagtcagaagttcaagtgcta

SEQ ID NO: 1413 - protein, 760 aa, Homosapiens; identical to SEQ ID NO: 100

SEQ ID NO: 1414 - DNA, 632 bp, Homosapiens
aggaaaacatagaggagggaggtccctaagaagttgagagaggatgaagatcagagacagaaattaaaatcctggaagaaaacaaggaattggaaaatgctttgaaaaatatccagctgcctaaagaggaaattaagaaacttgaagtagatgaaattagtaagatcttttaaaaacttctcatttatagatatgaagctgagcaattttcttgcttttaaaaaagcatagagtgaatgttacagtgcaaattctgcgatctattaatattacaggatttcatttaaaataatcttactgtaacaattcttagttttactaaatatctttaatatgtttgtgaacatggttgatcttataccttttcaatagcttcctttccacactgacgtttttttaaaaagagcttatctaattttaattttaaaatgtatccttctagaacaaatagtaattcaaggtttctagtcatttatacatttaacacaaaaatttaataaaagttacttttaaatatatcctaaattcttaacaatttagtagttgaaaattgattttattgcatatattgttattaaagacaataaatgatgctactagtgctgtggaatgaagatttttctccttttttt

SEQ ID NO: 1415 - protein, 41 aa, Homosapiens
RSETEIKILEENKELENALKNIQLPKEEIKKLEVDEISKIF

SEQ ID NO: 1416 - DNA, 3807 bp, Homosapiens
gggaaaacaaaatatccgccggaggagctttgctagagcgttggtcttggtgtcagagagaattcgctttccttttctgtttcccgcggtgtccttaaccaaaggcctcctctcttcacccgccccgaccaaaaggtggcgtctccctgaggaaactccctccccgccaggcagattacgtttacaaagtcctgagaagagaatcgaaacagaaaccaaagtcaggcaaactctgtaagaactgcctgacagaaagctggactcaaagctcctacccgagtgtgcagcaggatcgccccggtccgggaccccaggcgcacaccgcagagtccaaagtgccgcgcctgccggccgcacctgcctgccgcggccccgcgcgccgccccgctgcccacctgcccgcctgcccacctgcccaggtgcgagtgcagccccgcgcgccggcctgagagccctgtggacaacctcgtcattgtcaggcacagagcggtagaccctgcttctctaagtgggcagcggacagcggcacgcacatttcacctgtcccgcagacaacagcaccatctgcttgggagaaccctctcccttctctgagaaagaaagatgtcgaatgggtattccacagacgagaatttccgctatctcatctcgtgcttcagggccagggtgaaaatgtacatccaggtggagcctgtgctggactacctgacctttctgcctgcagaggtgaaggagcagattcagaggacagtcgccacctccgggaacatgcaggcagttgaactgctgctgagcaccttggagaagggagtctggcaccttggttggactcgggaattcgtggaggccctccggagaaccggcagccctctggccgcccgctacatgaaccctgagctcacggacttgccctctccatcgtttgagaacgctcatgatgaatatctccaactgctgaacctccttcagcccactctggtggacaagcttctagttagagacgtcttggataagtgcatggaggaggaactgttgacaattgaagacagaaaccggattgctgctgcagaaaacaatggaaatgaatcaggtgtaagagagctactaaaaaggattgtgcagaaagaaaactggttctctgcatttctgaatgttcttcgtcaaacaggaaacaatgaacttgtccaagagttaacaggctctgattgctcagaaagcaatgcagagattgagaatttatcacaagttgatggtcctcaagtggaagagcaacttctttcaaccacagttcagccaaatctggagaaggaggtctggggcatggagaataactcatcagaatcatcttttgcagattcttctgtagtttcagaatcagacacaagtttggcagaaggaagtgtcagctgcttagatgaaagtcttggacataacagcaacatgggcagtgattcaggcaccatgggaagtgattcagatgaagagaatgtggcagcaagagcatccccggagccagaactccagctcaggccttaccaaatggaagttgcccagccagccttggaagggaagaatatcatcatctgcctccctacagggagtggaaaaaccagagtggctgtttacattgccaaggatcacttagacaagaagaaaaaagcatctgagcctggaaaagttatagttcttgtcaataaggtactgctagttgaacagctcttccgcaaggagttccaaccatttttgaagaaatggtatcgtgttattggattaagtggtgatacccaactgaaaatatcatttccagaagttgtcaagtcctgtgatattattatcagtacagctcaaatccttgaaaactccctcttaaacttggaaaatggagaagatgctggtgttcaattgtcagacttttccctcattatcattgatgaatgtcatcacaccaacaaagaagcagtgtataataacatcatgaggcattatttgatgcagaagttgaaaaacaatagactcaagaaagaaaacaaaccagtgattccccttcctcagatactgggactaacagcttcacctggtgttggaggggccacgaagcaagccaaagctgaagaacacattttaaaactatgtgccaatcttgatgcatttactattaaaactgttaaagaaaaccttgatcaactgaaaaaccaaatacaggagccatgcaagaagtttgccattgcagatgcaaccagagaagatccatttaaagagaaacttctagaaataatgacaaggattcaaacttattgtcaaatgagtccaatgtcagattttggaactcaaccctatgaacaatgggccattcaaatggaaaaaaaagctgcaaaagaaggaaatcgcaaagaacgtgtttgtgcagaacatttgaggaagtacaatgaggccctacaaattaatgacacaattcgaatgatagatgcgtatactcatcttgaaactttctataatgaagagaaagataagaagtttgcagtcatagaagatgatagtgatgagggtggtgatgatgagtattgtgatggtgatgaagatgaggatgatttaaagaaacctttgaaactggatgaaacagatagatttctcatgactttattttttgaaaacaataaaatgttgaaaaggctggctgaaaacccagaatatgaaaatgaaaagctgaccaaattaagaaataccataatggagcaatatactaggactgaggaatcagcacgaggaataatctttacaaaaacacgacagagtgcatatgcgctttcccagtggattactgaaaatgaaaaatttgctgaagtaggagtcaaagcccaccatctgattggagctggacacagcagtgagttcaaacccatgacacagaatgaacaaaaagaagtcattagtaaatttcgcactggaaaaataaatctgcttatcgctaccacagtggcagaagaaggtctggatattaaagaatgtaacattgttatccgttatggtctcgtcaccaatgaaatagccatggtccaggcccgtggtcgagccagagctgatgagagcacctacgtcctggttgctcacagtggttcaggagttatcgaacatgagacagttaatgatttccgagagaagatgatgtataaagctatacattgtgttcaaaatatgaaaccagaggagtatgctcataagattttggaattacagatgcaaagtataatggaaaagaaaatgaaaaccaagagaaatattgccaagcattacaagaataacccatcactaataactttcctttgcaaaaactgcagtgtgctagcctgttctggggaagatatccatgtaattgagaaaatgcatcacgtcaatatgaccccagaattcaaggaactttacattgtaagagaaaacaaagcactgcaaaagaagtgtgccgactatcaaataaatggtgaaatcatctgcaaatgtggccaggcttggggaacaatgatggtgcacaaaggcttagatttgccttgtctcaaaataaggaattttgtagtggttttcaaaaataattcaacaaagaaacaatacaaaaagtgggtagaattacctatcacatttcccaatcttgactattcagaatgctgtttatttagtgatgaggattagcacttgattgaagattcttttaaaatactatcagttaaacatttaatatgattatgattaatgtattcattatgctacagaactgacataagaatcaataaaatgattgttttactctgcattgaa

SEQ ID NO: 1417 - protein, 1025 aa, Homosapiens; identical to SEQ ID NO: 102

SEQ ID NO: 1418 - DNA, 959 bp, Homosapiens
tatccatgtaattgagaaaatgcatcacgtcaatatgaccccagaattcaagtgagtccagaaagacccatttttacatttttccacaaggggtgaagcaggttgcattgtaaatgttctttcaaaatagtgcaaatgagattcatttattttacaacttcctctcctttagcctctcaattatattcctattttaaatgtctatgttttaaataaactgcactggggcaggaaaagagaagtgtaagaaccaaagccattttgatccaaggcacgtatttttgtatgctcatcatttgttctcaaatttttgaacaactaaagtcaagttaatataaccaacagacttgaaagaagttatgaaaggcaacatgccccttgagaggtatgtgtagaagagaagcattgccttagttgcaataacaagcctgggaagcaggagggaaggaaggaatgccgtgtagaataccgcaggcatgcggatgagctccaggtccaataacccatgaactacacactggtattttgtcagttctccatgatgattctttccctttgatacttatagggaactttacattgtaagagaaaacaaagcactgcaaaagaagtgtgccgactatcaaataaatggtgaaatcatctgcaaatgtggccaggcttggggaacaatgatggtgcacaaaggcttagatttgccttgtctcaaaataaggaattttgtagtggttttcaaaaataattcaacaaagaaacaatacaaaaagtgggtagaattacctatcacatttcccaatcttgactattcagaatgctgtttatttagtgatgaggattagcacttgattgaagattcttttaaaatactatcagttaaacatttaatatgattatgattaatgtattcattatgctacagaactgacataagaatcaataaaatgattgttttactctgc

SEQ ID NO: 1419 - protein, 30 aa, Homosapiens
MWPGLGNNDGAQRLRFALSQNKEFCSGFQK

SEQ ID NO: 1420 - DNA, 2001 bp, Homosapiens
gggaaaacaaaatatccgccggaggagctttgctagagcgttggtcttggtgtcagagagaattcgctttccttttctgtttcccgcggtgtccttaaccaaaggcctcctctcttcacccgccccgaccaaaaggtggcgtctccctgaggaaactccctccccgccaggcagattacgtttacaaagtcctgagaagagaatcgaaacagaaaccaaagtcaggcaaactctgtaagaactgcctgacagaaagctggactcaaagctcctacccgagtgtgcagcaggatcgccccggtccgggaccccaggcgcacaccgcagagtccaaagtgccgcgcctgccggccgcacctgcctgccgcggccccgcgcgccgccccgctgcccacctgcccgcctgcccacctgcccaggtgcgagtgcagccccgcgcgccggcctgagagccctgtggacaacctcgtcattgtcaggcacagagcggtagaccctgcttctctaagtgggcagcggacagcggcacgcacatttcacctgtcccgcagacaacagcaccatctgcttgggagaaccctctcccttctctgagaaagaaagatgtcgaatgggtattccacagacgagaatttccgctatctcatctcgtgcttcagggccagggtgaaaatgtacatccaggtggagcctgtgctggactacctgacctttctgcctgcagaggtgaaggagcagattcagaggacagtcgccacctccgggaacatgcaggcagttgaactgctgctgagcaccttggagaagggagtctggcaccttggttggactcgggaattcgtggaggccctccggagaaccggcagccctctggccgcccgctacatgaaccctgagctcacggacttgccctctccatcgtttgagaacgctcatgatgaatatctccaactgctgaacctccttcagcccactctggtggacaagcttctagttagagacgtcttggataagtgcatggaggaggaactgttgacaattgaagacagaaaccggattgctgctgcagaaaacaatggaaatgaatcaggtgtaagagagctactaaaaaggattgtgcagaaagaaaactggttctctgcatttctgaatgttcttcgtcaaacaggaaacaatgaacttgtccaagagttaacaggctctgattgctcagaaagcaatgcagagattgagaatttatcacaagttgatggtcctcaagtggaagagcaacttctttcaaccacagttcagccaaatctggagaaggaggtctggggcatggagaataactcatcagaatcatcttttgcagattcttctgtagtttcagaatcagacacaagtttggcagaaggaagtgtcagctgcttagatgaaagtcttggacataacagcaacatgggcagtgattcaggcaccatgggaagtgattcagatgaagagaatgtggcagcaagagcatccccggagccagaactccagctcaggccttaccaaatggaagttgcccagccagccttggaagggaagaatatcatcatctgcctccctacagggagtggaaaaaccagagtggctgtttacattgccaaggatcacttagacaagaagaaaaaagcatctgagcctggaaaagttatagttcttgtcaataaggtactgctagttgaacagctcttccgcaaggagttccaaccatttttgaagaaatggtatcgtgttattggattaagtggtgatacccaactgaaaatatcatttccagaagttgtcaagtcctgtgatattattatcagtacagctcaaatccttgaaaactccctcttaaacttggaaaatggagaagatgctggtgttcaattgtcagacttttccctcattatcattgatgaatgtcatcacaccaacaaagaagcagtgtataataacatcatgaggcattatttgatgcagaagttg

SEQ ID NO: 1421 - protein, 465 aa, Homosapiens
MSNGYSTDENFRYLISCFRARVKMYIQVEPVLDYLTFLPAEVKEQIQRTVATSGNMQAVELLLSTLEKGVWHLGWTREFVEALRRTGSPLAARYMNPELTDLPSPSFENAHDEYLQLLNLLQPTLVDKLLVRDVLDKCMEEELLTIEDRNRIAAAENNGNESGVRELLKRIVQKENWFSAFLNVLRQTGNNELVQELTGSDCSESNAEIENLSQVDGPQVEEQLLSTTVQPNLEKEVWGMENNSSESSFADSSVVSESDTSLAEGSVSCLDESLGHNSNMGSDSGTMGSDSDEENVAARASPEPELQLRPYQMEVAQPALEGKNIIICLPTGSGKTRVAVYIAKDHLDKKKKASEPGKVIVLVNKVLLVEQLFRKEFQPFLKKWYRVIGLSGDTQLKISFPEVVKSCDIIISTAQILENSLLNLENGEDAGVQLSDFSLIIIDECHHTNKEAVYNNIMRHYLMQK

SEQ ID NO: 1422 - DNA, 1841 bp, Homosapiens
gggaaaacaaaatatccgccggaggagctttgctagagcgttggtcttggtgtcagagagaattcgctttccttttctgtttcccgcggtgtccttaaccaaaggcctcctctcttcacccgccccgaccaaaaggtggcgtctccctgaggaaactccctccccgccaggcagattacgtttacaaagtcctgagaagagaatcgaaacagaaaccaaagtcaggcaaactctgtaagaactgcctgacagaaagctggactcaaagctcctacccgagtgtgcagcaggatcgccccggtccgggaccccaggcgcacaccgcagagtccaaagtgccgcgcctgccggccgcacctgcctgccgcggccccgcgcgccgccccgctgcccacctgcccgcctgcccacctgcccaggtgcgagtgcagccccgcgcgccggcctgagagccctgtggacaacctcgtcattgtcaggcacagagcggtagaccctgcttctctaagtgggcagcggacagcggcacgcacatttcacctgtcccgcagacaacagcaccatctgcttgggagaaccctctcccttctctgagaaagaaagatgtcgaatgggtattccacagacgagaatttccgctatctcatctcgtgcttcagggccagggtgaaaatgtacatccaggtggagcctgtgctggactacctgacctttctgcctgcagaggtgaaggagcagattcagaggacagtcgccacctccgggaacatgcaggcagttgaactgctgctgagcaccttggagaagggagtctggcaccttggttggactcgggaattcgtggaggccctccggagaaccggcagccctctggccgcccgctacatgaaccctgagctcacggacttgccctctccatcgtttgagaacgctcatgatgaatatctccaactgctgaacctccttcagcccactctggtggacaagcttctagttagagacgtcttggataagtgcatggaggaggaactgttgacaattgaagacagaaaccggattgctgctgcagaaaacaatggaaatgaatcaggtgtaagagagctactaaaaaggattgtgcagaaagaaaactggttctctgcatttctgaatgttcttcgtcaaacaggaaacaatgaacttgtccaagagttaacaggctctgattgctcagaaagcaatgcaggtatttgtaattttactgaggaagattcttcaaattctgcctagtgattgagaattcaataaagcagaaagacacaatgctaaacaccaagatttttagaatcaaaattttaagagtggaacatatgtgatagatcatctattttatcaccttaacaaatgaggaaattgatgcctgggaaaatatcaactgatcaaagaccatttttcatccaaccaacactctttctactaccttattttaaaaacaatatgactaccagaaattttatcaagattatgtaacattaaatatacacaaatacattggaagaaagtattttagtggttataaaaaatctgctgcatattcttctgaacatttttatacattttaagcaatgtattaagcatttgataaaaggattgttttgtcaatatatctcaaccttacctaatgtgagattttaaacagcattcaataatagtaataacataacattttatagctccttctcctacattatttgtaaatctcacttaaactgctatcttatttttcttttcgtagtatgcatcctatgtttccaaaaatatcatatgaaagacaaattgaaagttaactattaattaattat

SEQ ID NO: 1423 - protein, 221 aa, Homosapiens
MSNGYSTDENFRYLISCFRARVKMYIQVEPVLDYLTFLPAEVKEQIQRTVATSGNMQAVELLLSTLEKGVWHLGWTREFVEALRRTGSPLAARYMNPELTDLPSPSFENAHDEYLQLLNLLQPTLVDKLLVRDVLDKCMEEELLTIEDRNRIAAAENNGNESGVRELLKRIVQKENWFSAFLNVLRQTGNNELVQELTGSDCSESNAGICNFTEEDSSNSA

SEQ ID NO: 1424 - DNA, 815 bp, Homosapiens
ggaaagcgaattctctctgacaccaagaccaacgctctagcaaagctcctccggcggatattttgttttcccagcaggttctgccttaacaataaggtcctttgtaggccaaaatgtgcagggcataaaagcatgtgatttgggactttccaaaggggaagtgaacagaaactgccacagacccggacgtgaacagggagttaccctcggctggtgaatgtaggcaggcctggctgagggtggtgagactgcgagggacaggtgagagatgaagctcagaagacatctttgcagagatgtggagaagacaggaggaagtccttcctaaaataaacctgacctcctattgctggtatttatgcagctttgaccaggacctggtaacagatgtggatggacttgaaccaccaactcagcttagaaggaagccaagacttaaagtttcctagatcccagctttttggaaattttagcattcaggtgccaggaatgcagatgggacagccagtgccagaaacaggcccagctatactcctcgatggatactctgggccagcatattcagacacttattcctcagctggtgactccgtgtatacttacttcagtgctgttgctggacaggatggtgaagtggatgctgaagaacttcagagatgtttgacacagtctggaattaatggaacttactctcccttcagtttggaaacctgcagaattatgattgccatgttggatagagatcacacaggaaaaatgggatttaatgcattcaaagagctatgggcagctcttaatgcctggaaggaaaactt

SEQ ID NO: 1425 - protein, 141 aa, Homosapiens
MWMDLNHQLSLEGSQDLKFPRSQLFGNFSIQVPGMQMGQPVPETGPAILLDGYSGPAYSDTYSSAGDSVYTYFSAVAGQDGEVDAEELQRCLTQSGINGTYSPFSLETCRIMIAMLDRDHTGKMGFNAFKELWAALNAWKE

SEQ ID NO: 1426 - DNA, 688 bp, Homosapiens
agctcctccggcggatattttgttttcccagcaggttctgccttaacaataaggtcctttgtaggccaaaatgtgcagggcataaaagcatgtgatttgggactttccaaaggggaagtgaacagaaactgccacagacccggacgtgaacagggagttaccctcggctggtgaatgtaggcaggcctggctgagggtggtgagactgcgagggacaggtgagagatgaagctcagaagacatctttgcagagatgtggagaagacaggaggaagtccttcctaaaataaacctgacctcctgtgggttcccaaacactaacttgtttccctgggaatttggaggtgggttcgaaaaatttggaaattttagcattcaggtgccaggaatgcagatgggacagccagtgccagaaacaggcccagctatactcctcgatggatactctgggccagcatattcagacacttattcctcagctggtgactccgtgtatacttacttcagtgctgttgctggacaggatggtgaagtggatgctgaagaacttcagagatgtttgacacagtctggaattaatggaacttactctcccttcagtttggaaacctgcagaattatgattgccatgttggatagagatcacacaggaaaaatgggatttaatgcattcaaagagctatgggca

SEQ ID NO: 1427 - protein, 144 aa, Homosapiens
MWRRQEEVLPKINLTSCGFPNTNLFPWEFGGGFEKFGNFSIQVPGMQMGQPVPETGPAILLDGYSGPAYSDTYSSAGDSVYTYFSAVAGQDGEVDAEELQRCLTQSGINGTYSPFSLETCRIMIAMLDRDHTGKMGFNAFKELW

SEQ ID NO: 1428 - DNA, 868 bp, Homosapiens
gggagttaccctcggctggtgaatgtaggcaggcctggctgagggtggtgagactgcgagggacaggtgagagatgaagctcagaagacatctttgcagagatgtggagaagacaggaggaagtccttcctaaaataaacctgacctcctgtgggttcccaaacactaacttgtttccctgggaatttggaggtgggttcgaaaaatttggaaattttagcattcaggtgccaggaatgcagatgggacagccagtgccagaaacaggcccagctatactcctcgatggatactctgggccagcatattcagacacttattcctcagctggtgactccgtgtatacttacttcagtgctgttgctggacaggatggtgaagtggatgctgaagaacttcagagatgtttgacacagtctggaattaatggaacttactctcccttcagtttggaaacctgcagaattatgattgccatgttggatagaaaagaaacttaaagatctttgtctgtgaagaagaaaattatctccctagttcaatctgtagtgaaataagactacagaaggcattgttttttccttttttattttttgtattatatatttttcttaaatatgttttattgtcttctctaagcaaaaagttcttaataaacatagtatttctctctgcgtcctatttcattagtgaagacatagttcacctaaaatggcatcctgctctgaatctagactttttagaaatggcatatgtttttgatgatatgtcaacattcaaaattgtcctaattaaattgttgtttaaatgtaatgtcaactctttataaacttaaaaataaacaagtaattaaccactctaattgttc

SEQ ID NO: 1429 - protein, 132 aa, Homosapiens
MWRRQEEVLPKINLTSCGFPNTNLFPWEFGGGFEKFGNFSIQVPGMQMGQPVPETGPAILLDGYSGPAYSDTYSSAGDSVYTYFSAVAGQDGEVDAEELQRCLTQSGINGTYSPFSLETCRIMIAMLDRKET

SEQ ID NO: 1430 - DNA, 1162 bp, Homosapiens
gggagttaccctcggctggtgaatgtaggcaggcctggctgagggtggtgagactgcgagggacaggtgagagatgaagctcagaagacatctttgcagagatgtggagaagacaggaggaagtccttcctaaaataaacctgacctcctgtgggttcccaaacactaacttgtttccctgggaatttggaggtgggttcgaaaaatttggaaattttagcattcaggtgccaggaatgcagatgggacagccagtgccagaaacaggcccagctatactcctcgatggatactctgggccagcatattcagacacttattcctcagctggtgactccgtgtatacttacttcagtgctgttgctggacaggatggtgaagtggatgctgaagaacttcagagatgtttgacacagtctggaattaatggaacttactctcccttcagtttggaaacctgcagaattatgattgccatgttggatagaaaagaaacttaaagatctttgtctgtgaagaagaaaattatctccctagttcaatctgtagtgaaataagactacagaaggcattgttttttccttttttattttttgtattatatatttttcttaaatatgttttattgtcttctctaagcaaaaagttcttaataaacatagtatttctctctgcgtcctatttcattagtgaagacatagttcacctaaaatggcatcctgctctgaatctagactttttagaaatggcatatgtttttgatgatatgtcaacattcaaaattgtcctaattaaattgttgtttaaatgtaatgtcaactctttataaacttaaaaataaacaagtaattaaccactctaattgttcagaaattttacatttgacttatttgacaacattaacattagtggtggctttgccattaaaaacccagtaagtattttgagtgcatctatgtgatgtggtgttttgagcatagtaggcaccacagcaacttttctgcgtggtactaaaactgccgaaaatgcgacgtagaatcaccagatctttagtgtttaatatccctggtataagatgttataattaatgtaatttctttcttggcaaacacctcatgtctgtcttagtgaagatttaataaaccacttatttttcttatgc

SEQ ID NO: 1431 - protein, 132 aa, Homosapiens; identical to SEQ ID NO: 1429

SEQ ID NO: 1432 - DNA, 5186 bp, Homosapiens
atcgggccgccggcgtccgggctccagaggccgcctggctgggcgcccggtgccttttgtctggcgcagggccggcgtttgcatcacatttcggatacctccctctctttttcgcctctccttctgcctcccgctcacatcgcctccccactcccgccaccgtcccccgccggactgctagcctcctagaccgaagcccgaggacgtctctgcccgagcgatgtcccctctccagaaagttgccgccgccgccgccgccgccgccactgccgccgctgggcggtgaaacaaagtctggcggggccgcctcccggtgcaggagcgcaccggtgcctagcggctggactccgctgccgggcgtcccgctttcccccggggagccctaaacgctccaggccatggccgagggcgcggccggcagggaggatccggcgccgcccgacgcggcggggggcgaagacgacccccgagtgggcccggatgccgccggggactgcgtgacggcggcctctgggggccggatgagggaccgtcgcagcggggtcgcactgccaggcgccgcggggaccccagcggacagcgaggcgggcctcctggaggcagcacgggcgaccccccggcgcagcagcatcatcaagatgggactgtgtagttgcaggaaaacagctcagagtttccactgattcttcattatggatccttcaaaccaaaaatgtggtggaagaaagaaaaccgtgtctttcagcagcatgccatcggaaaagaaaattagcagtgcaaatgactgcatcagcttcatgcaagctggctgtgagttgaagaaagtccggccaaattctcgcatttacaaccgttttttcactctggacacagaccttcaagctcttcgctgggaaccttcaaagaaagacctcgagaaagccaagcttgatatttctgccataaaagagatcagactggggaaaaacacggaaacatttagaaacaatggccttgctgaccagatctgtgaggactgtgccttttccatactccacggggaaaactatgagtctctggacctagttgccaattcagcagatgtggcaaacatctgggtgtctgggttacggtacctggtttctcgaagtaagcagcctcttgattttatggagggcaaccagaacacaccacggttcatgtggttgaaaacagtgtttgaagcagcagatgttgatgggaatgggattatgttggaagacacctctgtagagttaataaaacaactcaaccctactctgaaggaagccaagatcaggttaaagtttaaagaaatccagaagagcaaggaaaaactaaccacccgcgtgaccgaagaggaattttgtgaagctttttgtgaactttgcaccaggccagaagtgtatttcttacttgtacagatatctaaaaacaaagaatatttggatgccaatgatctcatgctctttttagaagctgagcaaggagtcacccatatcaccgaggatatatgcttagacatcataaggagatacgaactttctgaagagggacgtcaaaaagggtttcttgcaattgatggctttacccagtatttattgtcatcagaatgtgacatttttgatcctgagcaaaagaaggttgcccaagatatgacccagccattatctcactactatatcaatgcctctcataacacctatctaatagaagaccagttcagggggccagctgacatcaatgggtacattagagctttgaaaatgggctgtcgaagcgttgaactcgatgtaagtgatggttcagataatgaaccaatcctttgtaatcgaaataacatgacaacccatgtttcctttcgaagtgtcatagaggtaataaataaatttgcctttgttgcttctgaatacccactcattctttgcttgggaaatcactgctccttgccgcagcagaaggtaatggctcaacagatgaaaaaggtctttggcaataaactctatactgaagcacctttgccctcagaatcctacctcccatcaccagaaaaattaaaaagaatgatcattgtgaaaggaaagaagttgccttctgatccagatgtgttagaaggagaagtaacagatgaagatgaagaagctgaaatgtctcgaaggatgtcggtagattacaatggtgagcagaagcaaatccgactctgtagggagctctctgatttggtgtctatttgtaaatctgttcaatacagggattttgaactatctatgaaaagccaaaactattgggaaatgtgttcatttagtgaaacagaggccagccgcattgcaaatgagtacccagaggattttgttaattataataagaagttcttatcaagaatctatccaagtgccatgaggatcgattccagtaacttgaatccacaggacttttggaattgtggctgtcagattgtagcaatgaattttcagactccgggtccaatgatggaccttcacacgggctggtttcttcaaaacgggggatgtggttatgttctaaggccgtctataatgcgagatgaagtttcttacttcagcgcaaatacaaagggcattctacctggggtgtctcctctagctcttcatatcaagatcatcagtggtcagaatttcccaaagcccaagggagcttgtgccaaaggggatgtcatagatccctatgtttgtatagagatacacggaattccagcggattgttcggaacaaagaactaaaactgtacagcaaaacagtgataatcctatttttgatgaaacttttgagttccaagtaaacctacctgagctggccatgatccgttttgttgttctggatgatgactacattggggatgagtttatagggcaatatacgataccatttgaatgtttgcagcctggatatcggcatgttcccctgcgttcttttgtgggtgacatcatggagcacgtaaccctttttgtccacatagcaataactaatcgaagtggaggaggaaaggcacagaagcgcagtctttcagtgagaatggggaagaaagttcgggaatataccatgctcaggaatatcggtcttaaaaccattgatgacatctttaaaatagcggttcatccattacgagaagccatagatatgagagaaaatatgcagaatgcaatcgtgtctattaaggaactatgtggactccctccaattgccagtctgaagcagtgcctgttaactctgtcatctcggctcatcaccagtgacaatactccttcagtctcacttgtgatgaaagacagctttccttacctggagcctctgggtgcaattccagatgtgcagaaaaagatgctgactgcttatgatctgatgattcaagagagccggtttctcatagaaatggcggacacagtccaggaaaagattgtacagtgtcagaaagcagggatggagttccatgaagaacttcataatttgggggcaaaagaaggcttgaagggaagaaaactcaacaaagcaactgagagctttgcttggaacattacagtattgaagggccaaggagatctgttgaagaatgccaagaatgaagctatagaaaacatgaagcagatccagctggcatgcctgtcctgtggactgagtaaagcccccagcagcagtgctgaggccaagagcaagcgcagcctggaagccatagaggagaaggaaagtagtgaggagaatgggaagctgtgactctgggcattatcgacacgttcacccatcttatcaaggactctggtttctcattcttgttttctttctttaaatgttttataagttcacaaaatggtgccctatatggggtattggacatagatattttcacaatgtcagtatttcagtgtagttaatttatctaaattaaagcctttagtatcagtgttttaaattctgagacatgtgtcaacacccctgtgtggatgcctgtggaagagtgtgtgtgtgtgtgtgtgtgtgtgtgtgtggcagagagagagaaagagagagagagagagaaattctgttaaaatctattctgtgttgcattattcatttagtgagttattccttgatcattttgggacaattgttttaatctgaaattctaaagagcacttactgtaacctgttgctgtgtttaatttgacttctctgcctttgacatttaatttagtgatcttagcatagcttattattgaaggaagccaaatttatcaaagcatagatgttttggtagattaaatatagattagaaaaattcctaagaatcagagtagaaataaaagtgaatgaaagattaaacagatgatgagaatttctaaaaagattagcaaggtcatttcttcagtcagaaaactttaaaaaatatttattaaataaaatcaatttttaggaagttttctgtagtcatttactaaacatatgatttcactagaaaagctgatcataagtgaatttatacctacctgtgtggtactctgaaacacactgaaagctctgttgcaattaggattttgatgtgacaataatattgttgtataatttcgagatttgtaggaaggtctcattcttccaagctgagagtctagcactcattttctataacagatatggcagcttagaggtgttggctttgtttggatgtaatttagggtactaaatttaaatttaaagatattgttcaaacaatatcatatcatcacattgagctgatataaattctgtgggtccgataatatctttgtgataatttaagagctaaccagttaccacacatctatgatataaccctaacacacacagaaaagcatacatgcaaaaagaaatgactaattagggtacatttataattgcatctaggtaatttttaccctaatgtcttcataaagtacttgagtgtaatgtttgttacctccaacagaactaaatgttctatggttatgaaagaatatatttatttaaagcattgcttttattttgaaaagcttcttaattaatttgattaacaaatatgctaatttggggaaacctagagaagataattgttgaaattttgcaaatataaacatctcctatagcttctgtgttatttctgacttcttaacactattatgtttatgttgcacattactgaaagagtaaagatatgaaaaaaac

SEQ ID NO: 1433 - protein, 1016 aa, Homosapiens
MDPSNQKCGGRKKTVSFSSMPSEKKISSANDCISFMQAGCELKKVRPNSRIYNRFFTLDTDLQALRWEPSKKDLEKAKLDISAIKEIRLGKNTETFRNNGLADQICEDCAFSILHGENYESLDLVANSADVANIWVSGLRYLVSRSKQPLDFMEGNQNTPRFMWLKTVFEAADVDGNGIMLEDTSVELIKQLNPTLKEAKIRLKFKEIQKSKEKLTTRVTEEEFCEAFCELCTRPEVYFLLVQISKNKEYLDANDLMLFLEAEQGVTHITEDICLDIIRRYELSEEGRQKGFLAIDGFTQYLLSSECDIFDPEQKKVAQDMTQPLSHYYINASHNTYLIEDQFRGPADINGYIRALKMGCRSVELDVSDGSDNEPILCNRNNMTTHVSFRSVIEVINKFAFVASEYPLILCLGNHCSLPQQKVMAQQMKKVFGNKLYTEAPLPSESYLPSPEKLKRMIIVKGKKLPSDPDVLEGEVTDEDEEAEMSRRMSVDYNGEQKQIRLCRELSDLVSICKSVQYRDFELSMKSQNYWEMCSFSETEASRIANEYPEDFVNYNKKFLSRIYPSAMRIDSSNLNPQDFWNCGCQIVAMNFQTPGPMMDLHTGWFLQNGGCGYVLRPSIMRDEVSYFSANTKGILPGVSPLALHIKIISGQNFPKPKGACAKGDVIDPYVCIEIHGIPADCSEQRTKTVQQNSDNPIFDETFEFQVNLPELAMIRFVVLDDDYIGDEFIGQYTIPFECLQPGYRHVPLRSFVGDIMEHVTLFVHIAITNRSGGGKAQKRSLSVRMGKKVREYTMLRNIGLKTIDDIFKIAVHPLREAIDMRENMQNAIVSIKELCGLPPIASLKQCLLTLSSRLITSDNTPSVSLVMKDSFPYLEPLGAIPDVQKKMLTAYDLMIQESRFLIEMADTVQEKIVQCQKAGMEFHEELHNLGAKEGLKGRKLNKATESFAWNITVLKGQGDLLKNAKNEAIENMKQIQLACLSCGLSKAPSSSAEAKSKRSLEAIEEKESSEENGKL

SEQ ID NO: 1434 - DNA, 4619 bp, Homosapiens
aggcacatagattctctctttgaacaatgcagctgctgcaggggatggggaagggatggcactggcaattcaagactgcctttcctacttcttcagtgcctctttcaccaatatgaagttaaaaccaggatccttcaaaccaaaaatgtggtggaagaaagaaaaccgtgtctttcagcagcatgccatcggaaaagaaaattagcagtgcaaatgactgcatcagcttcatgcaagctggctgtgagttgaagaaagtccggccaaattctcgcatttacaaccgttttttcactctggacacagaccttcaagctcttcgctgggaaccttcaaagaaagacctcgagaaagccaagcttgatatttctgccataaaagagatcagactggggaaaaacacggaaacatttagaaacaatggccttgctgaccagatctgtgaggactgtgccttttccatactccacggggaaaactatgagtctctggacctagttgccaattcagcagatgtggcaaacatctgggtgtctgggttacggtacctggtttctcgaagtaagcagcctcttgattttatggagggcaaccagaacacaccacggttcatgtggttgaaaacagtgtttgaagcagcagatgttgatgggaatgggattatgttggaagacacctctgtagagttaataaaacaactcaaccctactctgaaggaagccaagatcaggttaaagtttaaagaaatccagaagagcaaggaaaaactaaccacccgcgtgaccgaagaggaattttgtgaagctttttgtgaactttgcaccaggccagaagtgtatttcttacttgtacagatatctaaaaacaaagaatatttggatgccaatgatctcatgctctttttagaagctgagcaaggagtcacccatatcaccgaggatatatgcttagacatcataaggagatacgaactttctgaagagggacgtcaaaaagggtttcttgcaattgatggctttacccagtatttattgtcatcagaatgtgacatttttgatcctgagcaaaagaaggttgcccaagatatgacccagccattatctcactactatatcaatgcctctcataacacctatctaatagaagaccagttcagggggccagctgacatcaatgggtacattagagctttgaaaatgggctgtcgaagcgttgaactcgatgtaagtgatggttcagataatgaaccaatcctttgtaatcgaaataacatgacaacccatgtttcctttcgaagtgtcatagaggtaataaataaatttgcctttgttgcttctgaatacccactcattctttgcttgggaaatcactgctccttgccgcagcagaaggtaatggctcaacagatgaaaaaggtctttggcaataaactctatactgaagcacctttgccctcagaatcctacctcccatcaccagaaaaattaaaaagaatgatcattgtgaaaggaaagaagttgccttctgatccagatgtgttagaaggagaagtaacagatgaagatgaagaagctgaaatgtctcgaaggatgtcggtagattacaatggtgagcagaagcaaatccgactctgtagggagctctctgatttggtgtctatttgtaaatctgttcaatacagggattttgaactatctatgaaaagccaaaactattgggaaatgtgttcatttagtgaaacagaggccagccgcattgcaaatgagtacccagaggattttgttaattataataagaagttcttatcaagaatctatccaagtgccatgaggatcgattccagtaacttgaatccacaggacttttggaattgtggctgtcagattgtagcaatgaattttcagactccgggtccaatgatggaccttcacacgggctggtttcttcaaaacgggggatgtggttatgttctaaggccgtctataatgcgagatgaagtttcttacttcagcgcaaatacaaagggcattctacctggggtgtctcctctagctcttcatatcaagatcatcagtggtcagaatttcccaaagcccaagggagcttgtgccaaaggggatgtcatagatccctatgtttgtatagagatacacggaattccagcggattgttcggaacaaagaactaaaactgtacagcaaaacagtgataatcctatttttgatgaaacttttgagttccaagtaaacctacctgagctggccatgatccgttttgttgttctggatgatgactacattggggatgagtttatagggcaatatacgataccatttgaatgtttgcagcctggatatcggcatgttcccctgcgttcttttgtgggtgacatcatggagcacgtaaccctttttgtccacatagcaataactaatcgaagtggaggaggaaaggcacagaagcgcagtctttcagtgagaatggggaagaaagttcgggaatataccatgctcaggaatatcggtcttaaaaccattgatgacatctttaaaatagcggttcatccattacgagaagccatagatatgagagaaaatatgcagaatgcaatcgtgtctattaaggaactatgtggactccctccaattgccagtctgaagcagtgcctgttaactctgtcatctcggctcatcaccagtgacaatactccttcagtctcacttgtgatgaaagacagctttccttacctggagcctctgggtgcaattccagatgtgcagaaaaagatgctgactgcttatgatctgatgattcaagagagccggtttctcatagaaatggcggacacagtccaggaaaagattgtacagtgtcagaaagcagggatggagttccatgaagaacttcataatttgggggcaaaagaaggcttgaagggaagaaaactcaacaaagcaactgagagctttgcttggaacattacagtattgaagggccaaggagatctgttgaagaatgccaagaatgaagctatagaaaacatgaagcagatccagctggcatgcctgtcctgtggactgagtaaagcccccagcagcagtgctgaggccaagagcaagcgcagcctggaagccatagaggagaaggaaagtagtgaggagaatgggaagctgtgactctgggcattatcgacacgttcacccatcttatcaaggactctggtttctcattcttgttttctttctttaaatgttttataagttcacaaaatggtgccctatatggggtattggacatagatattttcacaatgtcagtatttcagtgtagttaatttatctaaattaaagcctttagtatcagtgttttaaattctgagacatgtgtcaacacccctgtgtggatgcctgtggaagagtgtgtgtgtgtgtgtgtgtgtgtgtgtgtggcagagagagagaaagagagagagagagagaaattctgttaaaatctattctgtgttgcattattcatttagtgagttattccttgatcattttgggacaattgttttaatctgaaattctaaagagcacttactgtaacctgttgctgtgtttaatttgacttctctgcctttgacatttaatttagtgatcttagcatagcttattattgaaggaagccaaatttatcaaagcatagatgttttggtagattaaatatagattagaaaaattcctaagaatcagagtagaaataaaagtgaatgaaagattaaacagatgatgagaatttctaaaaagattagcaaggtcatttcttcagtcagaaaactttaaaaaatatttattaaataaaatcaatttttaggaagttttctgtagtcatttactaaacatatgatttcactagaaaagctgatcataagtgaatttatacctacctgtgtggtactctgaaacacactgaaagctctgttgcaattaggattttgatgtgacaataatattgttgtataatttcgagatttgtaggaaggtctcattcttccaagctgagagtctagcactcattttctataacagatatggcagcttagaggtgttggctttgtttggatgtaatttagggtactaaatttaaatttaaagatattgttcaaacaatatcatatcatcacattgagctgatataaattctgtgggtccgataatatctttgtgataatttaagagctaaccagttaccacacatctatgatataaccctaacacacacagaaaagcatacatgcaaaaagaaatgactaattagggtacatttataattgcatctaggtaatttttaccctaatgtcttcataaagtacttgagtgtaatgtttgttacctccaacagaactaaatgttctatggttatgaaagaatatatttatttaaagcattgcttttattttgaaaagcttcttaattaatttgattaacaaatatgctaatttggggaaacctagagaagataattgttgaaattttgcaaatataaacatctcctatagcttctgtgttatttctgacttcttaacactattatgtttatgttgcacattactgaaagagtaaagatatgaaaaaaac

SEQ ID NO: 1435 - protein, 997 aa, Homosapiens
MPSEKKISSANDCISFMQAGCELKKVRPNSRIYNRFFTLDTDLQALRWEPSKKDLEKAKLDISAIKEIRLGKNTETFRNNGLADQICEDCAFSILHGENYESLDLVANSADVANIWVSGLRYLVSRSKQPLDFMEGNQNTPRFMWLKTVFEAADVDGNGIMLEDTSVELIKQLNPTLKEAKIRLKFKEIQKSKEKLTTRVTEEEFCEAFCELCTRPEVYFLLVQISKNKEYLDANDLMLFLEAEQGVTHITEDICLDIIRRYELSEEGRQKGFLAIDGFTQYLLSSECDIFDPEQKKVAQDMTQPLSHYYINASHNTYLIEDQFRGPADINGYIRALKMGCRSVELDVSDGSDNEPILCNRNNMTTHVSFRSVIEVINKFAFVASEYPLILCLGNHCSLPQQKVMAQQMKKVFGNKLYTEAPLPSESYLPSPEKLKRMIIVKGKKLPSDPDVLEGEVTDEDEEAEMSRRMSVDYNGEQKQIRLCRELSDLVSICKSVQYRDFELSMKSQNYWEMCSFSETEASRIANEYPEDFVNYNKKFLSRIYPSAMRIDSSNLNPQDFWNCGCQIVAMNFQTPGPMMDLHTGWFLQNGGCGYVLRPSIMRDEVSYFSANTKGILPGVSPLALHIKIISGQNFPKPKGACAKGDVIDPYVCIEIHGIPADCSEQRTKTVQQNSDNPIFDETFEFQVNLPELAMIRFVVLDDDYIGDEFIGQYTIPFECLQPGYRHVPLRSFVGDIMEHVTLFVHIAITNRSGGGKAQKRSLSVRMGKKVREYTMLRNIGLKTIDDIFKIAVHPLREAIDMRENMQNAIVSIKELCGLPPIASLKQCLLTLSSRLITSDNTPSVSLVMKDSFPYLEPLGAIPDVQKKMLTAYDLMIQESRFLIEMADTVQEKIVQCQKAGMEFHEELHNLGAKEGLKGRKLNKATESFAWNITVLKGQGDLLKNAKNEAIENMKQIQLACLSCGLSKAPSSSAEAKSKRSLEAIEEKESSEENGKL

SEQ ID NO: 1436 - DNA, 733 bp, Homosapiens
tcacttaataatgttagaaaagaaccttgggttaaaccctggaaaagtgagcttgcagggccaaggagatctgttgaagaatgccaagaatgaagctatagaaaacatgaagcagatccagctggcatgcctgtcctgtggactgagtaaagcccccagcagcagtgctgaggccaagagcaagcgcagcctggaagccatagaggagaaggaaagtagtgaggagaatgggaagctgtgactctgggcattatcgacacgttcacccatcttatcaaggactctggtttctcattcttgttttctttctttaaatgttttataagttcacaaaatggtgccctatatggggtattggacatagatattttcacaatgtcagtatttcagtgtagttaatttatctaaattaaagcctttagtatcagtgttttaaattctgagacatgtgtcaacacccctgtgtggatgcctgtggaagagtgtgtgtgtgtgtgtgtgtgtgtgtgtgtggcagagagagagaaagagagagagagagagaaattctgttaaaatctattctgtgttgcattattcatttagtgagttattccttgatcattttgggacaattgttttaatctgaaattctaaagagcacttactgtaacctgttgctgtgtttaatttgacttctctgcctttgacatttaatttagtgatcttagcatagcttattattgaaggaagc

SEQ ID NO: 1437 - protein, 76 aa, Homosapiens
MLEKNLGLNPGKVSLQGQGDLLKNAKNEAIENMKQIQLACLSCGLSKAPSSSAEAKSKRSLEAIEEKESSEENGKL

SEQ ID NO: 1438 - DNA, 518 bp, Homosapiens
ccaggttttgtctccagatttttctgaaaatattaatgaagccagctgggaagaggagcagtttggatgagactgggataagaagtggttaataaaatctggttatctattctggaaaaaataaacagctgataccaccattctgaactattacagtgaattccacataggcactgaaggtgcaagctttcatgaattgcttgcctttgagtcagaatctggaacgctgaggaggtctctttccagtaacttggaccagagacaactgtaaatgtgctggaagccagaagatgttggggaagctggcaaagagaaaacctgagagttatttactgctcagcctgcagcatccatgagtgactgaagggagtatctggacctttttctcacttccaaaagcaagtgctaccagaaaggaagaagaaaaccttgaagttatcttagcctacaacagtgatatcatccatatctttattgtcatggatgaaaatgggaaataaaagattctgatggctcct

SEQ ID NO: 1439 - protein, 48 aa, Homosapiens
TADTTILNYYSEFHIGTEGASFHELLAFESESGTLRRSLSSNLDQRQL

SEQ ID NO: 1440 - DNA, 315 bp, Homosapiens
ccaggttttgtctccagatttttctgaaaatattaatgaagccagctgggaagaggagcagtttggatgagactgggataagaagtggttaataaaatctggttatctattctggaaaaaataaacagctgataccaccattctgaactattacagtgaattccacataggcactgaaggtgcaagctttcatgaattgcttgcctttgagtcaggtactgtgttaaggacattatgtttaggactagatttacttctccaaaaagctaattccatgagttctggaggttgggaagtccaagataaagatgccag

SEQ ID NO: 1441 - DNA, 364 bp, Homosapiens
tagtcctaaacataatgtccttaacacagtacctgactcaaaggcaagcaattcatgaaagcttgcaccttcagtgcctatgtggaattcactgtaatagttcagaatggtggtatcagctgtttattttttccagaatagataaccagattttattaaccacttcttatcccagtctcatccaaactgctcctcttcccagctggcttcattaatattttcagaaaaatctggagacaaaacatttcaaaaccaatccagccttcctgacaagtccccaaagtcttaattcattccagtctttactcaaaagtccaagtccaaaatctcatctgaggcaaggcaagtcccttccacatatgag

SEQ ID NO: 1442 - protein, 66 aa, Homosapiens [sequence omitted]

SEQ ID NO: 1443 - DNA, 2528 bp, Homosapiens
aatgcaagcagatgaagaggaaagaactgagcagcagtatttcaggattctcaataaggcatcaatgaaaaaaggtcaaaactgtgatccctgctacttgggaggctgagacacaagaattgcttgaatccaggaggcggaggttgcagtgaaccaagatcatgccactgaactccagcctgggtgacagagcaagagtctgtctcaaaaaaaaaaaaaagaaaagaaaaagatattgcttagaaaagtaacttgagtcctgttgagcctaagtaaaggacaataatggaagtttctagtctgcaaaatatgaagatgcccctcagagacacagctgtgggtgcctctcacaagacagatgttcaggaaaactgggctgttgctctggaattttcaatgagttattttacttgtttttgcctcagtttacagaaaataaactggcaacaatatctccttgttattgtgaggataaaataaaaggtgtgacatttctattttaaatgtataaaatgccgaaaaattggaggcaactggaaggtacagtagtggatgtgaggtagtaagggggaaaaaaggatatgtaaatcacctaagatgaaatagacattcagaaggccgtaacgtgaagtgtgagtgacactgattcgctaaaaatcctatatagtgtcttaaaacagcagcagtaacaacaacaaagtttatttgagaggaggaattctggaaaaaagcttctttcaaaaaaaaaaaaagagtcttctagtgctcagacagttcgttcctctgcaaaggcgggttactctgttggggtccattatagttctgaggatgaataggacaggacaaggagatggttcctggcccctgttctcctgccacagatctgtcccacctcccaggctccatgcatacagtgacagagatggaaagcccagaaccagtccctttaatgcacttatttgcaaaacaagatgtcactatgcagcagagtgacagtcctttcccctggaactgtcccagagttctccaagctgaagccagggctacattcaccatctcagactcctgctgagctaagtaaccaccctctcctaccttctcttcaggagccctggcacccttgctctggggagagtttgaagagcaacctgaaagttcccacagtttttcctcaaatctgggtttccatgagcatgggccaccagtcgggagagccacatgcctgcccttgcctggctcaagactgtcactctgtcagattcatatcgctctctgacccttagccttccagtctggatcttgaccttgaactggactctgtaggaagttcttaacattaaaggaagttatttatctcttttcaactaacccaagcactttctagcaccttttagcagtttaagctctatgactccattggataaaatgctggggagcaggacattgacacagtcacagaatatcacacacggaatcctcattcattcccccagggaaacagcacctgtagaagacaaatctggtagacactactgtgacaggtgattttatatgtcagcttgactaggccacaggatgtgtagacatttgtcaaatttttttttatatgtctgtgaggatgtttctggatgagattaacattgaatcagtagactgagtaaagaagaccgccctccccagtgggggtgtccctcatccaacctgtggaagccctacatagaacaaaaaggctgaacctcccccaaaatacggtgatctcaagctgcctgacttctggtgctggaacattgttctttttctgccttccgactcaaactgaaaatcagctcatcttgtatcctgagtctgctggcttccagactgaactatacattgactctcccaggtttccagcttgcaactgctggtcttgggacttctcagcctccataatcatgcattagccaatttctatatagatctagaaattcatatatatatatgtgtgtgtgtgtgtgtatgtgtgtgtgtgtgtgtacgcatatatatacagtcatgaatcactgagcagtgggcataccttctgagaaatgtgtcattaggcactgttatcattgtgtgaacatcatagtgtacttacacacacctagacggtatagcctacaacacacctaggctatatagtataacttgttgctggtagattacaaacctgtacaacctgttactgtactgaatactgtaggcaattgtaaaacaatggtaagtatttgtgtatctaaacatagctaaccatagaaaaggtacagtaaaaatactgtataagagataaaacatggtgtgcctgtataggttgcttaccataaataaagcttgcaggttggaagttactctgggtgagtcagtgagtaaatgatgagtgaatgtgaggcccttggacatcactgtaccctactgtagactttataaacactgtacacttaggttaccctaaatctattttaaaattgttttctttcttcaataataaattacccttagcttactgt

SEQ ID NO: 1444 - protein, 35 aa, Homosapiens
MQADEEERTEQQYFRILNKASMKKGQNCDPCYLGG

SEQ ID NO: 1445 - DNA, 1206 bp, Homosapiens
gtgaaggagactgagaaggaacagtcaaagatattgcaggaagaccagtagtacatggaagtcaaaggagagagcatcaagaaagagatgcgatgagtcaacaagaagtttacagcactgagaaagacgagtcaacaacagaaggaaaaaaatccagagaaaatggcacttgctgcattggaatgaaagataatctgcagaaggacctgctcagtggcaataaacattggcattcttggaaacagtgtttgcctaagaatcttctgtctgcctttgttgctttggccatattatgataagggcatgactggatttaccaaaatgggcatgattggatctacttattctcttatcagacaccttttcctagacaacatcctgaaacataagaataagcacaaaaatgaacatattacatcaaacgtaccactgagaagaatggtaagtttaacagtttcccacgtgggaggcatattgacgattacaattttaagttagcagaacaccagctcacatggaaacagtctcctccgtgaattctttctttggctgacagacatgagatgttagctgtctaagaagaccttcacaccaacaccttcttagaagatattgtaagataacaatccttgagtggaacctgaattctttctaaacactgcatgtaggaaaacaagaggcagttcacacaatcacttaacacctcttcttaaaagtgaatccttgaaggagtggtgttcaaatatttaagtacattagatactttatacacgccacatccaaaatgctcagtattcctaatacatttcattttctcccaagttttaatggttgatgcacaatcacattaatttcctattaatttctaggaatatgtacacagtagccttaggagaaagaagataactattactttacatttttaactgttttgttttcatgtccatgagagaaaaattaaagtaagttaaaaaattaactcagacactctatttatttttaggaagacatacaccccccacagggagacttttacatgttgtaataatgttcacaaacagctactctttaagtgtaacactattctaagcctcttttcctccattttatttcatatacatttatgcatctgcatgcatatataaccacatgtatttatatttagtaggtatagtttattacacataaatctaaatatctatcata

SEQ ID NO: 1446 - protein, 67 aa, Homosapiens
MSQQEVYSTEKDESTTEGKKSRENGTCCIGMKDNLQKDLLSGNKHWHSWKQCLPKNLLSAFVALAIL

SEQ ID NO: 1447 - DNA, 358 bp, Homosapiens
gggaggagaaagggaggaaagggagtagagaaggccacacacaatcttaaattcaatatttcactcccgttaaagataagctgtttataagctccagtgtagggcatgtaattctatgtaaaaactctgtggttcctcttcccacatgtaaatcatgatcactctacattctgctctctgggagccctcaaggcaaagagacaacaagactcgagaccacagaaaggacttatcacaagtctttgtggtagctgaggagtgccccctacagactgatatgcacaatgcaagcagatgaagaggaaagaactgagcagcagtatttcaggattctcaataaggcatcaatgaaaaaagg

SEQ ID NO: 1448 - protein, 47 aa, Homosapiens
MITLHSALWEPSRQRDNKTRDHRKDLSQVFVVAEECPLQTDMHNASR

SEQ ID NO: 1449 - DNA, 1688 bp, Homosapiens
ggcaatggcgggcgcccctcccccagcctcgctgccgccttgcagtttgatctcagactgctgtgctagcaatcagcgagactccctggggtaggaccctccgagccaggtgcgggagatagtctcctggtgcgaggatttttaagccggtcggaaaagcgcagtattcgggtgggagtgacccgattttccagacaggtgaagacagaacaagaaaacaaaccaagaatttcccctcaccagccaccagctctgccagcaacttgatcttagacttcccagcctccgtaacgcctctgcttataatctgtcatggattggaaaactagaaaaaacagtttacagagtataacaaactttggaggagttaatcgactctaagtaaaagagtatctagcacggctgtggaacaaaggagagactcacaaactgttgaaagaataaatgaatgaatgaattctgttcatgagctttaataaaacagctctgagtagtaacagtggatcaaatttaggcttcttgatgcaggcatggtgtagattactacttctgtattgtcccaggagctcagcacattcctgcagagatgataggagctcatctgatacttgtcagctttgaataaactccagtccccaagagagagaatgagaatcaccggaatacgaaacttccctgttggacttcccaacattcttgaatgcaccaagatagcctcttgctgtgagattaataaatgaataaatgcctccatatttttcaaatctgtgaagttaacaacatgtagatttttttgcatatttaaaaactgcaactaaatcttaatgcctctgaagcagatggaagaaaataataggcttccattaactgtgtcaaattgtataggtcttggccatcactggtcctgttgtgatgaaggttttttgcccttggatataatttaattttcaattcttctaattatggtacttcagaacatcaatatttgagatgaacttctctagtgtcaaggactgatttgagttgtgtaaaccctgaatatctgagacaggtctcgattattttagaaagtttattttgccaaggttgaggatgtgtgcctgtgacacggcctcgggaggtcctgaggacatgtgctcaaggtggtcagagcacagctttgctttatacattttagagagacatgagacatcaaccgacatatgtaagatgaacattggttccatctggaaaggcgagacaacttcaaacgaggagggggcttccaggtcataggtagataagagacaaatggctgcattcttttgagtttctgattagcctttccaaaggaggcaattagagtgagcaaaatgaacaaaatcaattattttgattctgaacaaaatgggaggctggttttccctaagcagttcccagcttgacttttccctttagctgagggatttggggggcccaagatttatttttctttcaccgttgtatcaaactacacaggcggccttggaaaccatcacagttgagagtaggtaacgcccatttgttgcatagttttgtgctccacactcttatctacaaaattatgaatttttttacatatattaatttcagaaaaactaaaaataaaacaaagtagtttcaaactagtattgtttttatatcttaaaaataaagctttatatactctc

SEQ ID NO: 1450 - protein, 51 aa, Homosapiens
MSFNKTALSSNSGSNLGFLMQAWCRLLLLYCPRSSAHSCRDDRSSSDTCQL

SEQ ID NO: 1451 - DNA, 781 bp, Homosapiens
acagttctggaagctttgaagtccaagatgaaggtggcagcagcttgagtgtctgaaacaagaagaaatggaaaataactgcagcacgtttatgacattcgtttctttctccacatgaaacatacaatgagaacactttatagatgaattgtgtcttcgattgaatagagaatggtggactagctttggttttatggaattggataatttgtcatagtttctgtccctggaaaaatgagaacccaaaggaaaacaagtggaaagcctttaaaaaatagtgatataatacacagctgatatttttggttcatagaatactttaaagtacatcatttacaaagcaaattactaaattataagaaatgctgtcatcatcaataaacattcacagagcttcaggttttaacacaaagcattcctcatatttcaggtgatattatttatgaaaaaattacttggagattgctccaaggttatcacattcttttcaaaccatcaattccctattattatttactattattagttattatttataaatacatatgaatacacaatgaaagcatgctttatgtatagcatataaatatatttgaactttactttccccacatactatctatcctgcaatattacaccaccagtaaaagagtatctaaatattaattgctcctatcacaatagtggaaactagaagagataagttttcccaaatctgagtagaaaaccatggttagcggatatccatttgtccatttacggaattatagcaataaaatcc

SEQ ID NO: 1452 - protein, 55 aa, Homosapiens
TFTELQVLTQSIPHISGDIIYEKITWRLLQGYHILFKPSIPYYYLLLLVIIYKYI

SEQ ID NO: 1453 - DNA, 965 bp, Homosapiens
aagtgaagactgagtctgaaatgggaaagatatccccacacaagtccagcacaggctgttagaactctatatctcttgttctggaagctttgaagtccaagatgaaggtggcagcagcttgagtgtctgggtccccagtttgaaatgtcttgttactgctgacaagacctgcatgactgaccatttgctccctaagagatgaaaactgacattgctttgaagttcaaaatgacattgccaaaacaagaagaaatggaaaataactgcagcacgtttatgacattcgtttctttctccacatgaaacatacaatgagaacactttatagatgaattgtgtcttcgattgaatagagaatggtggactagctttggttttatggaattggataatttgtcatagtttctgtccctggaaaaatgagaacccaaaggaaaacaagtggaaagcctttaaaaaatagtgatataatacacagctgatatttttggttcatagaatactttaaagtacatcatttacaaagcaaattactaaattataagaaatgctgtcatcatcaataaacattcacagagcttcaggttttaacacaaagcattcctcatatttcaggtgatattatttatgaaaaaattacttggagattgctccaaggttatcacattcttttcaaaccatcaattccctattattatttactattattagttattatttataaatacatatgaatacacaatgaaagcatgctttatgtatagcatataaatatatttgaactttactttccccacatactatctatcctgcaatattacaccaccagtaaaagagtatctaaatattaattgctcctatcacaatagtggaaactagaagagataagttttcccaaatctgagtagaaaaccatggttagcggatatccatttgtccatttacggaattatagcaataaaatc

SEQ ID NO: 1454 - protein, 34 aa, Homosapiens
MKTDIALKFKMTLPKQEEMENNCSTFMTFVSFST

SEQ ID NO: 1455 - DNA, 927 bp, Homosapiens
gggatcaaaccataattctgcgaaactcccatcttttcaaataaagaactggagttcccaagcagttgagagacttgtccaagctcaaatgggtccccagtttgaaatgtcttgttactgctgacaagacctgcatgactgaccatttgctccctaagagatgaaaactgacattgctttgaagttcaaaatgacattgccaaaacaagaagaaatggaaaataactgcagcacgtttatgacattcgtttctttctccacatgaaacatacaatgagaacactttatagatgaattgtgtcttcgattgaatagagaatggtggactagctttggttttatggaattggataatttgtcatagtttctgtccctggaaaaatgagaacccaaaggaaaacaagtggaaagcctttaaaaaatagtgatataatacacagctgatatttttggttcatagaatactttaaagtacatcatttacaaagcaaattactaaattataagaaatgctgtcatcatcaataaacattcacagagcttcaggttttaacacaaagcattcctcatatttcaggtgatattatttatgaaaaaattacttggagattgctccaaggttatcacattcttttcaaaccatcaattccctattattatttactattattagttattatttataaatacatatgaatacacaatgaaagcatgctttatgtatagcatataaatatatttgaactttactttccccacatactatctatcctgcaatattacaccaccagtaaaagagtatctaaatattaattgctcctatcacaatagtggaaactagaagagataagttttcccaaatctgagtagaaaaccatggttagcggatatccatttgtccatttacggaattatagcaataaaatc

SEQ ID NO: 1456 - protein, 34 aa, Homosapiens; identical to SEQ ID NO: 1454

SEQ ID NO: 1457 - DNA, 454 bp, Homosapiens
aagtgaagactgagtctgaaatgggaaagatatccccacacaagtccagcacaggctgttagaactctatatctcttgttctggaagctttgaagtccaagatgaaggtggcagcagcttgagtgtctgggtccccagtttgaaatgtcttgttactgctgacaagacctgcatgactgaccatttgctccctaagagatgaaaactgacattgctttgaagttcaaaatgacattgccaaaacaagaagaaatggaaaataactgcagcacgtttatgacattcgtttctttctccacatgaaacatacaatgagaacactttatagatgaattgtgtcttcgattgaatagagaatggtggactagctttggttttatggaattggataatttgtcatagtttctgtccctggaaaaatgagaacccaaaggaaaacaagtggaaagccttt

SEQ ID NO: 1458 - protein, 34 aa, Homosapiens; identical to SEQ ID NO: 1454

SEQ ID NO: 1459 - DNA, 411 bp, Homosapiens
gaatcctctaaaataagtcacatgggaaaaaattctgatcttattctagacgaagaatgaaaagccaggaagctacataacccaagggtccccagtttgaaatgtcttgttactgctgacaagacctgcatgactgaccatttgctccctaagagatgaaaactgacattgctttgaagttcaaaatgacattgccaaaacaagaagaaatggaaaataactgcagcacgtttatgacattcgtttctttctccacatgaaacatacaatgagaacactttatagatgaattgtgtcttcgattgaatagagaatggtggactagctttggttttatggaattggataatttgtcatagtttctgtccctggaaaaatgagaacccaaaggaaaacaagtggaaagccttt

SEQ ID NO: 1460 - protein, 34 aa, Homosapiens; identical to SEQ ID NO: 1454

SEQ ID NO: 1461 - DNA, 542 bp, Homosapiens
cacgcccggctaatttttgtatttttagtagagacggggtttcaccgtgttagccaggatggtctcgatctcctgacctcgtgatccgcccgcctcggcctcccaaagtgctgggattacaggcgtgagccaccatgcccggcctgttttcaagtaggaagaagaaaagctttttgaatgaatcacttctcatcttctccgaagttggaagcatcaagaatctaaataagcatttatgatggctggcatgaatatgcggaagatagaatgggagtcctagttgaccttcatataatttttagaagatggagcacttcaacttcttccactcatgaaaagagaggtgacaggtgaagacagaacaagaaaacaaaccaagaatttcccctcaccagccaccagctctgccagcaacttgatcttagacttcccagcctccgtaacgcctctgcttataatctgtcatggattggaaaactagaaaaaacagtttacagagtataacaaactttggaggagttaatcgactctaagtaaaagag

SEQ ID NO: 1462 - protein, 49 aa, Homosapiens
MKREVTGEDRTRKQTKNFPSPATSSASNLILDFPASVTPLLIICHGLEN

SEQ ID NO: 1463 - DNA, 630 bp, Homosapiens
aggaagtcattaaagaagcaacccatggcaaaactagttattttcttaaaacagtaggaagaagaaaagctttttgaatgaatcacttctcatcttctccgaagttggaagcatcaagaatctaaataagcatttatgatggctggcatgaatatttctctccttcatcgtgcctattttatgaacttgaacaaggaagttgccacaacatctgtgggccagagaactatgccagaatgttatttccagattgcttcctgtatttacaaaggtataaatctttgatttctatatattcttctcacacccttctctgcgaacacacctatcttccccattttttaactggctaagttctatctgcctatcatgaaaagcaaagccacctataacaaattccttagatttaagtaactcttttttaaattccggtgtattttttgtgccttctattggttagattttgttaaaataatgctgcataacaaacctttccaataataatttgatacaataatttattactgtttatgtacctccaggttgccagggcgtccactggtctaaatagcactcatcttcctactgcaggtctataggtccactgatacggctttgctactctacccc

SEQ ID NO: 1464 - protein, 49 aa, Homosapiens
MMAGMNISLLHRAYFMNLNKEVATTSVGQRTMPECYFQIASCIYKGINL

SEQ ID NO: 1465 - DNA, 444 bp, Homosapiens
tctgatcttattctagacgaagaatgaaaagccaggaagctacataacccaagaaacaacagtcagatgccaataaccaggaaccacctgcaggacaagctaagcccagaaatgctgccttcacctgaacttctgcctcagtgcgagacctgacctgatttcttgcctctttctcataccaacatttccatccagtggggagaaatgtaccttgctgggtgcaaaaagtgccaatgcaaaagaaaatgcaagactgcgcatacttaacccctcctggaagaacaaacttttttcaaggaatccccacccctgtctccacctacctgcccaaaagtccttaaaaatttccctttactctacttccagggagaaggtgctttgagcatgagctcccgttctccattacttgatcaatgaatggaatttctgcactgttttgccaaa

SEQ ID NO: 1466 - protein, 35 aa, Homosapiens
MQKKMQDCAYLTPPGRTNFFQGIPTPVSTYLPKSP

SEQ ID NO: 1467 - DNA, 453 bp, Homosapiens
ctgaagtgatcctatcttgtgactcatgcatggcacgtctataagtcaagctggaatcctctaaaataagtcacatgggaaaaaattctgatcttattctagacgaagaatgaaaagccaggaagctacataacccaaggtaacaaattaaaaaattaaaatatcatatcccaaaatggaaataaaacagatagaatgccgagtatatattaaataaggcaagctatttatgatgagctaactcacttgcaagttaccagagagcatggagtaaatcctttatttctcatgtcctcattgtgcctaagactgcgtttctgtacacacattaaaaaaacaggaaatcaatggttcccaatggtgatgtgtgaactcttcaggatctggaggaacattattaaattgctccattagctttctcttgtttgggttgaaaataaaaattgtgatgcc

SEQ ID NO: 1468 - protein, 41 aa, Homosapiens
MSSLCLRLRFCTHIKKTGNQWFPMVMCELFRIWRNIIKLLH

SEQ ID NO: 1469 - DNA, 402 bp, Homosapiens
gaaacccctaagaactctgcagcaggtggtaaagggattccagcagttgaggcagccttcctaagagaaatgcaggtgcaacagaaaaacaaaagcaaacacaagccaggagaaggatgcagccaaggagaaaaggggattggaggagatttaacagagtatcaacaggatccactgcagaagaggtaacaaattaaaaaattaaaatatcatatcccaaaatggaaataaaacagatagaatgccgagtatatattaaataaggcaagctatttatgatgaggaatgtgctgagctcctgggacaatacagaagtagtaatctacaccatgcctgcatcaagaagcctaaatttgatccactgttactactcagagctgttttattaaagctcatgaacag

SEQ ID NO: 1470 - protein, 39 aa, Homosapiens
MQVQQKNKSKHKPGEGCSQGEKGIGGDLTEYQQDPLQKR

SEQ ID NO: 1471 - DNA, 486 bp, Homosapiens
ctatcttgtgactcatgcatggcacgtctataagtcaagctggaatcctctaaaataagtcacatgggaaaaaattctgatcttattctagacgaagaatgaaaagccaggaagctacataacccaaggtgcctttctaggattttagcacatggaagaaatgtccctacccatgcatacagaaacgcataagaacaggaagtgacgtattgtttatcaggaaaaacagtattcatgtattatttacaaaaattgaggctgatctccaagctctactgtggaaagagttcatcaagttcctagactgaagaaagctaattaaaaagtcattaaaatgacaaaaatctaggacacctgtgcattttgaaatatctcattttgtatcaaatactttggcagttctggattgataaccaagtttatatttcagcaaacaggggacctcaagagcataacttaatctcagagttgttcacctccgtgcaa

SEQ ID NO: 1472 - protein, 50 aa, Homosapiens
NDKNLGHLCILKYLILYQILWQFWIDNQVYISANRGPQEHNLISELFTSV

SEQ ID NO: 1473 - DNA, 408 bp, Homosapiens
agggtggtacaaagaagagaagaccagggaagagaagctcatgaaggaaacaaacatggctgtctggtttggaaaagcacatttgatagtttatgaagtcacagaggagagtgactcttgcctcgccacccacttattcatctggaaggaggcttccatgattttagcacatggaagaaatgtccctacccatgcatacagaaacgcataagaacaggaagtgacgtattgtttatcaggaaaaacagtattcatgtattatttacaaaaattgaggctgatctccaagctctactgtggaaagagttcatcaagttcctagactgaagaaagctaattgtaagaaatacatatgtagtatgcacaagtttcattataaataagagtaaaaacgtgcattgtatatgt

SEQ ID NO: 1474 - protein, 56 aa, Homosapiens
MKETNMAVWFGKAHLIVYEVTEESDSCLATHLFIWKEASMILAHGRNVPTHAYRNA

SEQ ID NO: 1475 - DNA, 314 bp, Homosapiens
agctggaatcctctaaaataagtcacatgggaaaaaattctgatcttattctagacgaagaatgaaaagccaggaagctacataacccaagagagaagttatacatactcatgaatcaatgtgtacaatggagaattaatactgaaaacaaatgtattttattctactttttaaaaaattgttgaaatggagcccagccttcccactaccacttgttgcaactcccacacttcatatgtacaccacctctttccttgacccttgaaagacaccatgtggttttcacctgagaatgatataaatatgaacactct

SEQ ID NO: 1476 - protein, 37 aa, Homosapiens
MYFILLFKKLLKWSPAFPLPLVATPTLHMYTTSFLDP

SEQ ID NO: 1477 - DNA, 4112 bp, Homosapiens
gtgagcgcgagcgcggcgcgccggccggctaacccgagagcgcgaggcgccccaggctggcaggcgccgcgggacccctcaccctctctggtcgcccctccccggattcccccaccctccgtgcctgcaggagcccctgggctttcccggaggagctcgccctgaagggcccggacctcggcgagcccaccaccgttccctccagcgccgccgccgccaccgcagcagccggagcagcatggtccagctgaggaagctgctccgcgtcctgactttgatgaagttcccctgctgcgtgctggaggtgctcctgtgcgcgctggcggcggcggcgcgcggccaggagatgtacgccccgcactcaatccggatcgagggggacgtcaccctcggggggctgttccccgtgcacgccaagggtcccagcggagtgccctgcggcgacatcaagagggaaaacgggatccacaggctggaagcgatgctctacgccctggaccagatcaacagtgatcccaacctactgcccaacgtgacgctgggcgcgcggatcctggacacttgttccagggacacttacgcgctcgaacagtcgcttactttcgtccaggcgctcatccagaaggacacctccgacgtgcgctgcaccaacggcgaaccgccggttttcgtcaagccggagaaagtagttggagtgattggggcttcggggagttcggtctccatcatggtagccaacatcctgaggctcttccagatcccccagattagttatgcatcaacggcacccgagctaagtgatgaccggcgctatgacttcttctctcgcgtggtgccacccgattccttccaagcccaggccatggtagacattgtaaaggccctaggctggaattatgtgtctaccctcgcatcggaaggaagttatggagagaaaggtgtggagtccttcacgcagatttccaaagaggcaggtggactctgcattgcccagtccgtgagaatcccccaggaacgcaaagacaggaccattgactttgatagaattatcaaacagctcctggacacccccaactccagggccgtcgtgatttttgccaacgatgaggatataaagcagatccttgcagcagccaaaagagctgaccaagttggccattttctttgggtgggatcagacagctggggatccaaaataaacccactgcaccagcatgaagatatcgcagaaggggccatcaccattcagcccaagcgagccacggtggaagggtttgatgcctactttacgtcccgtacacttgaaaacaacagaagaaatgtatggtttgccgaatactgggaggaaaacttcaactgcaagttgacgattagtgggtcaaaaaaagaagacacagatcgcaaatgcacaggacaggagagaattggaaaagattccaactatgagcaggagggtaaagtccagttcgtgattgacgcagtctatgctatggctcacgcccttcaccacatgaacaaggatctctgtgctgactaccggggtgtctgcccagagatggagcaagctggaggcaagaagttgctgaagtatatacgcaatgttaatttcaatggtagtgctggcactccagtgatgtttaacaagaacggggatgcacctgggcgttatgacatctttcagtaccagaccacaaacaccagcaacccgggttaccgtctgatcgggcagtggacagacgaacttcagctcaatatagaagacatgcagtggggtaaaggagtccgagagatacccgcctcagtgtgcacactaccatgtaagccaggacagagaaagaagacacagaaaggaactccttgctgttggacctgtgagccttgcgatggttaccagtaccagtttgatgagatgacatgccagcattgcccctatgaccagaggcccaatgaaaatcgaaccggatgccaggatattcccatcatcaaactggagtggcactccccctgggctgtgattcctgtcttcctggcaatgttggggatcattgccaccatctttgtcatggccactttcatccgctacaatgacacgcccattgtccgggcatctgggcgggaactcagctatgttcttttgacgggcatctttctttgctacatcatcactttcctgatgattgccaaaccagatgtggcagtgtgttctttccggcgagttttcttgggcttgggtatgtgcatcagttatgcagccctcttgacgaaaacaaatcggatttatcgcatatttgagcagggcaagaaatcagtaacagctcccagactcataagcccaacatcacaactggcaatcacttccagtttaatatcagttcagcttctaggggtgttcatttggtttggtgttgatccacccaacatcatcatagactatgatgaacacaagacaatgaaccctgagcaagccagaggggttctcaagtgtgacattacagatctccaaatcatttgctccttgggatatagcattcttctcatggtcacatgtactgtgtatgccatcaagactcggggtgtacccgagaattttaacgaagccaagcccattggattcactatgtacacgacatgtatagtatggcttgccttcattccaattttttttggcaccgctcaatcagcggaaaagctctacatacaaactaccacgcttacaatctccatgaacctaagtgcatcagtggcgctggggatgctatacatgccgaaagtgtacatcatcattttccaccctgaactcaatgtccagaaacggaagcgaagcttcaaggcggtagtcacagcagccaccatgtcatcgaggctgtcacacaaacccagtgacagacccaacggtgaggcaaagaccgagctctgtgaaaacgtagacccaaacagccctgctgcaaaaaagaagtatgtcagttataataacctggttatctaacctgttccattccatggaaccatggaggaggaagaccctcagttattttgtcacccaacctggcataggactctttggtcctacccgcttcccatcaccggaggagcttccccggccgggagaccagtgttagaggatccaagcgacctaaacagctgctttatgaaatatccttactttatctgggcttaataagtcactgacatcagcactgccaactcggctgcaattgtggaccttccctaccaaagggagtgttgaaactcaagtcccgccctggctctttagaatggaccactgagagccacaggaccgttttggggctgacctgtcttattacgtatgtacttctaggttgcaaggttttgaaattttctgtacagtttgtgaggacctttgcactttgccatctgatgtcgtacctcggttcactgtttgttttcgaatgccttgttttcatagagccctattctctcagacggtggaatatttggaaaaattttaaaacaattaaaattttaaagcaatcttggcagactaaaacaagtacatctgtacatgactgtataattacgattatagtaccactgcacatcatgtttttttttttaagacaaaaaagatgtttaaagaccaaaaactgtgctgagaaagtatgccccacctatctttggtatatgataggttacataaaaggaaggtattggctgaactgaatagaggtcttgatctttggaatgcatgccagtaatgtattttacagtacatgtttattatgttcaatatttgtatttgtgttctcttttgttatttttaattagggtatatgaatattttgcaataattttaataattattaagctgtttgaaggaaagaatatggatttttcatgtcttgaggttttgttcatgccccctttgactgatcagtgtgataaggactttaggaaaaaaagcatgtatgttttttactgtttgtaataagtactttcgttaatcttgctgcttatgtgccaatttagtggaaaaaaacaacccttgctgaaaaattccctctttccattctctttcaattctgtgatattgtccaagaatgtatcaataaaatactttggttaactttttt

SEQ ID NO: 1478 - protein, 915 aa, Homosapiens; identical to SEQ ID NO: 106

SEQ ID NO: 1479 - DNA, 3192 bp, Homosapiens
ggtcgcccctccccggattcccccaccctccgtgcctgcaggagcccctgggctttcccggaggagctcgccctgaagggcccggacctcggcgagcccaccaccgttccctccagcgccgccgccgccaccgcagcagccggagcagcatggtccagctgaggaagctgctccgcgtcctgactttgatgaagttcccctgctgcgtgctggaggtgctcctgtgcgcgctggcggcggcggcgcgcggccaggagatgtacgccccgcactcaatccggatcgagggggacgtcaccctcggggggctgttccccgtgcacgccaagggtcccagcggagtgccctgcggcgacatcaagagggaaaacgggatccacaggctggaagcgatgctctacgccctggaccagatcaacagtgatcccaacctactgcccaacgtgacgctgggcgcgcggatcctggacacttgttccagggacacttacgcgctcgaacagtcgcttactttcgtccaggcgctcatccagaaggacacctccgacgtgcgctgcaccaacggcgaaccgccggttttcgtcaagccggagaaagtagttggagtgattggggcttcggggagttcggtctccatcatggtagccaacatcctgaggctcttccagatcccccagattagttatgcatcaacggcacccgagctaagtgatgaccggcgctatgacttcttctctcgcgtggtgccacccgattccttccaagcccaggccatggtagacattgtaaaggccctaggctggaattatgtgtctaccctcgcatcggaaggaagttatggagagaaaggtgtggagtccttcacgcagatttccaaagaggcaggtggactctgcattgcccagtccgtgagaatcccccaggaacgcaaagacaggaccattgactttgatagaattatcaaacagctcctggacacccccaactccagggccgtcgtgatttttgccaacgatgaggatataaagcagatccttgcagcagccaaaagagctgaccaagttggccattttctttgggtgggatcagacagctggggatccaaaataaacccactgcaccagcatgaagatatcgcagaaggggccatcaccattcagcccaagcgagccacggtggaagggtttgatgcctactttacgtcccgtacacttgaaaacaacagaagaaatgtatggtttgccgaatactgggaggaaaacttcaactgcaagttgacgattagtgggtcaaaaaaagaagacacagatcgcaaatgcacaggacaggagagaattggaaaagattccaactatgagcaggagggtaaagtccagttcgtgattgacgcagtctatgctatggctcacgcccttcaccacatgaacaaggatctctgtgctgactaccggggtgtctgcccagagatggagcaagctggaggcaagaagttgctgaagtatatacgcaatgttaatttcaatggtagtgctggcactccagtgatgtttaacaagaacggggatgcacctgggcgttatgacatctttcagtaccagaccacaaacaccagcaacccgggttaccgtctgatcgggcagtggacagacgaacttcagctcaatatagaagacatgcagtggggtaaaggagtccgagagatacccgcctcagtgtgcacactaccatgtaagccaggacagagaaagaagacacagaaaggaactccttgctgttggacctgtgagccttgcgatggttaccagtaccagtttgatgagatgacatgccagcattgcccctatgaccagaggcccaatgaaaatcgaaccggatgccaggatattcccatcatcaaactggagtggcactccccctgggctgtgattcctgtcttcctggcaatgttggggatcattgccaccatctttgtcatggccactttcatccgctacaatgacacgcccattgtccgggcatctgggcgggaactcagctatgttcttttgacgggcatctttctttgctacatcatcactttcctgatgattgccaaaccagatgtggcagtgtgttctttccggcgagttttcttgggcttgggtatgtgcatcagttatgcagccctcttgacgaaaacaaatcggatttatcgcatatttgagcagggcaagaaatcagtaacagctcccagactcataagcccaacatcacaactggcaatcacttccagtttaatatcagttcagcttctaggggtgttcatttggtttggtgttgatccacccaacatcatcatagactatgatgaacacaagacaatgaaccctgagcaagccagaggggttctcaagtgtgacattacagatctccaaatcatttgctccttgggatatagcattcttctcatggtcacatgtactgtgtatgccatcaagactcggggtgtacccgagaattttaacgaagccaagcccattggattcactatgtacacgacatgtatagtatggcttgccttcattccaattttttttggcaccgctcaatcagcggaaaagctctacatacaaactaccacgcttacaatctccatgaacctaagtgcatcagtggcgctggggatgctatacatgccgaaagtgtacatcatcattttccaccctgaactcaatgtccagaaacggaagcgaagcttcaaggcggtagtcacagcagccaccatgtcatcgaggctgtcacacaaacccagtgacagacccaacggtgaggcaaagaccgagctctgtgaaaacgtagacccaaacaatttttttttttggctgtacagtggaacttggattacactttaaattaactttctctaggaatcaaagtaacctctgaggacctcagcttgcacaaagaggattgagataacatttccaaagcttgttcttcttgagctgacccaacacttaggaaaacatgacatggatcagcaactccattttctgtgagaagtgcaactgctactgaccatctgcactggcatctagtcaagcgattgtctgaggcaagattttggagattcccatctgatattcttctatttggtctcttgtacccattgtcatcctgtaccacacataataaagtttaagaatgtcaagc

SEQ ID NO: 1480 - protein, 913 aa, Homosapiens; identical to SEQ ID NO: 110

SEQ ID NO: 1481 - DNA, 4115 bp, Homosapiens
ggtcgcccctccccggattcccccaccctccgtgcctgcaggagcccctgggctttcccggaggagctcgccctgaagggcccggacctcggcgagcccaccaccgttccctccagcgccgccgccgccaccgcagcagccggagcagcatggtccagctgaggaagctgctccgcgtcctgactttgatgaagttcccctgctgcgtgctggaggtgctcctgtgcgcgctggcggcggcggcgcgcggccaggagatgtacgccccgcactcaatccggatcgagggggacgtcaccctcggggggctgttccccgtgcacgccaagggtcccagcggagtgccctgcggcgacatcaagagggaaaacgggatccacaggctggaagcgatgctctacgccctggaccagatcaacagtgatcccaacctactgcccaacgtgacgctgggcgcgcggatcctggacacttgttccagggacacttacgcgctcgaacagtcgcttactttcgtccaggcgctcatccagaaggacacctccgacgtgcgctgcaccaacggcgaaccgccggttttcgtcaagccggagaaagtagttggagtgattggggcttcggggagttcggtctccatcatggtagccaacatcctgaggctcttccagatcccccagattagttatgcatcaacggcacccgagctaagtgatgaccggcgctatgacttcttctctcgcgtggtgccacccgattccttccaagcccaggccatggtagacattgtaaaggccctaggctggaattatgtgtctaccctcgcatcggaaggaagttatggagagaaaggtgtggagtccttcacgcagatttccaaagaggcaggtggactctgcattgcccagtccgtgagaatcccccaggaacgcaaagacaggaccattgactttgatagaattatcaaacagctcctggacacccccaactccagggccgtcgtgatttttgccaacgatgaggatataaagcagatccttgcagcagccaaaagagctgaccaagttggccattttctttgggtgggatcagacagctggggatccaaaataaacccactgcaccagcatgaagatatcgcagaaggggccatcaccattcagcccaagcgagccacggtggaagggtttgatgcctactttacgtcccgtacacttgaaaacaacagaagaaatgtatggtttgccgaatactgggaggaaaacttcaactgcaagttgacgattagtgggtcaaaaaaagaagacacagatcgcaaatgcacaggacaggagagaattggaaaagattccaactatgagcaggagggtaaagtccagttcgtgattgacgcagtctatgctatggctcacgcccttcaccacatgaacaaggatctctgtgctgactaccggggtgtctgcccagagatggagcaagctggaggcaagaagttgctgaagtatatacgcaatgttaatttcaatggtagtgctggcactccagtgatgtttaacaagaacggggatgcacctgggcgttatgacatctttcagtaccagaccacaaacaccagcaacccgggttaccgtctgatcgggcagtggacagacgaacttcagctcaatatagaagacatgcagtggggtaaaggagtccgagagatacccgcctcagtgtgcacactaccatgtaagccaggacagagaaagaagacacagaaaggaactccttgctgttggacctgtgagccttgcgatggttaccagtaccagtttgatgagatgacatgccagcattgcccctatgaccagaggcccaatgaaaatcgaaccggatgccaggatattcccatcatcaaactggagtggcactccccctgggctgtgattcctgtcttcctggcaatgttggggatcattgccaccatctttgtcatggccactttcatccgctacaatgacacgcccattgtccgggcatctgggcgggaactcagctatgttcttttgacgggcatctttctttgctacatcatcactttcctgatgattgccaaaccagatgtggcagtgtgttctttccggcgagttttcttgggcttgggtatgtgcatcagttatgcagccctcttgacgaaaacaaatcggatttatcgcatatttgagcagggcaagaaatcagtaacagctcccagactcataagcccaacatcacaactggcaatcacttccagtttaatatcagttcagcttctaggggtgttcatttggtttggtgttgatccacccaacatcatcatagactatgatgaacacaagacaatgaaccctgagcaagccagaggggttctcaagtgtgacattacagatctccaaatcatttgctccttgggatatagcattcttctcatggtcacatgtactgtgtatgccatcaagactcggggtgtacccgagaattttaacgaagccaagcccattggattcactatgtacacgacatgtatagtatggcttgccttcattccaattttttttggcaccgctcaatcagcggaaaagctctacatacaaactaccacgcttacaatctccatgaacctaagtgcatcagtggcgctggggatgctatacatgccgaaagtgtacatcatcattttccaccctgaactcaatgtccagaaacggaagcgaagcttcaaggcggtagtcacagcagccaccatgtcatcgaggctgtcacacaaacccagtgacagacccaacggtgaggcaaagaccgagctctgtgaaaacgtagacccaaacaactgtataccaccagtaagaaagagtgtacaaaagtctgttacttggtacactatcccaccaacagtatagcttttgactgctttcccaaaggccctgctgcaaaaaagaagtatgtcagttataataacctggttatctaacctgttccattccatggaaccatggaggaggaagaccctcagttattttgtcacccaacctggcataggactctttggtcctacccgcttcccatcaccggaggagcttccccggccgggagaccagtgttagaggatccaagcgacctaaacagctgctttatgaaatatccttactttatctgggcttaataagtcactgacatcagcactgccaactcggctgcaattgtggaccttccctaccaaagggagtgttgaaactcaagtcccgccctggctctttagaatggaccactgagagccacaggaccgttttggggctgacctgtcttattacgtatgtacttctaggttgcaaggttttgaaattttctgtacagtttgtgaggacctttgcactttgccatctgatgtcgtacctcggttcactgtttgttttcgaatgccttgttttcatagagccctattctctcagacggtggaatatttggaaaaattttaaaacaattaaaattttaaagcaatcttggcagactaaaacaagtacatctgtacatgactgtataattacgattatagtaccactgcacatcatgtttttttttttaagacaaaaaagatgtttaaagaccaaaaactgtgctgagaaagtatgccccacctatctttggtatatgataggttacataaaaggaaggtattggctgaactgaatagaggtcttgatctttggaatgcatgccagtaatgtattttacagtacatgtttattatgttcaatatttgtatttgtgttctcttttgttatttttaattagggtatatgaatattttgcaataattttaataattattaagctgtttgaaggaaagaatatggatttttcatgtcttgaggttttgttcatgccccctttgactgatcagtgtgataaggactttaggaaaaaaagcatgtatgttttttactgtttgtaataagtactttcgttaatcttgctgcttatgtgccaatttagtggaaaaaaacaacccttgctgaaaaattccctctttccattctctttcaattctgtgatattgtccaagaatgtatcaataaaatactttggttaactttttt

SEQ ID NO: 1482 - protein, 922 aa, Homosapiens; identical to SEQ ID NO: 108

SEQ ID NO: 1483 - DNA, 690 bp, Homosapiens
gggagacggagaaaaaatgggaggaaggcggatccggggccgctgagcggtgggttctgccgcagtgttctctcgcctcctgctccagcagcctctgccccatggctcctgagctgcactggggagatgcccttctatcctgtctcagtttcccaatcctaaacgtccttcaaaaatcccccagattagttatgcatcaacggcacccgagctaagtgatgaccggcgctatgacttcttctctcgcgtggtgccacccgattccttccaagcccaggccatggtagacattgtaaaggccctaggctggaattatgtgtctaccctcgcatcggaaggaagttatggagagaaaggtgtggagtccttcacgcagatttccaaagaggcaggtggactctgcattgcccagtccgtgagaatcccccaggaacgcaaagacaggaccattgactttgatagaattatcaaacagctcctggacacccccaactccagggccgtcgtgatttttgccaacgatgaggatataaagcagatccttgcagcagccaaaagagctgaccaagttggccattttctttgggtgggatcagacagctggggatccaaaataaacccactgcaccagcatgaagatatcgcagaaggggccatcaccattcagcccaagcgagccacggtggaagg

SEQ ID NO: 1484 - protein, 135 aa, Homosapiens
MVDIVKALGWNYVSTLASEGSYGEKGVESFTQISKEAGGLCIAQSVRIPQERKDRTIDFDRIIKQLLDTPNSRAVVIFANDEDIKQILAAAKRADQVGHFLWVGSDSWGSKINPLHQHEDIAEGAITIQPKRATV

SEQ ID NO: 1485 - DNA, 515 bp, Homosapiens
taggtttgcactcaagactgacatttaccgtaatggaagctgttcatatgcccccaggaaagaatgaacaatttaatagaaaatgctaaaggagtgatattaggaaaaaatcaataaatgttactgatgctatcgtcatcatcatcatcatcatcattatcatcatcatcaaggtcatgacagaaagaggacacattacatgaaatctcaacttcatccctgggccatgcacacctgtagctaatttttgtatctttctatttgagttcgggtttcgcatcgttttgtcccacacaacagaagctgatctccaaagagaggaatgatgtagcctcaagtaacaaagacattgagggaagtctttcacatcctgggatgcctgtggcccagcacagagggctgttgggttgccaacacagagtttacccctcaggtgtctgtaattgggtaaagagaggtgaagtttagcatgtgatatgtaaaacgggcagctacaaatacaattctaaaacaag

SEQ ID NO: 1486 - protein, 30 aa, Homosapiens
MPVAQHRGLLGCQHRVYPSGVCNWVKRGEV

SEQ ID NO: 1487 - DNA, 1937 bp, Homosapiens
atcagttgttatcattattaggcagatgggagcaaaatggacaggagagaattggaaaagattccaactatgagcaggagggtaaagtccagttcgtgattgacgcagtctatgctatggctcacgcccttcaccacatgaacaaggatctctgtgctgactaccggggtgtctgcccagagatggagcaagctggaggcaagaagttgctgaagtatatacgcaatgttaatttcaatggtagtgctggcactccagtgatgtttaacaagaacggggatgcacctgggcgttatgacatctttcagtaccagaccacaaacaccagcaacccgggttaccgtctgatcgggcagtggacagacgaacttcagctcaattaattaccaaggggccttgcactgagggcatcaacaagatatgtggcccaagacagctgcttggcttcccatccaagataaagtcagatgctctagaaatgtgtgcatgttgaggactgaagggaggagaaactttgcttcttatttatcacctgtcaggtctggagaagcacagatgccaagtgcatggaacacagaagctgctcagtgaatggcctttgattatgagataggagaattacaagatgatgttagaaggatgggatagagaccatttgtgcctgctacagaatgttggcatggaaagtccttccaggacatcgtagtacccttagtagtatagaagacatgcagtggggtaaaggagtccgagagatacccgcctcagtgtgcacactaccatgtaagccaggacagagaaagaagacacagaaaggaactccttgctgttggacctgtgagccttgcgatggttaccagtaccagtttgatgagatgacatgccagcattgcccctatgaccagaggcccaatgaaaatcgaaccggatgccaggatattcccatcatcaaactggagtggcactccccctgggctgtgattcctgtcttcctggcaatgttggggatcattgccaccatctttgtcatggccactttcatccgctacaatgacacgcccattgtccgggcatctgggcgggaactcagctatgttcttttgacgggcatctttctttgctacatcatcactttcctgatgattgccaaaccagatgtggcagtgtgttctttccggcgagttttcttgggcttgggtatgtgcatcagttatgcagccctcttgacgaaaacaaatcggatttatcgcatatttgagcagggcaagaaatcagtaacagctcccagactcataagcccaacatcacaactggcaatcacttccagtttaatatcagttcagcttctaggggtgttcatttggtttggtgttgatccacccaacatcatcatagactatgatgaacacaagacaatgaaccctgagcaagccagaggggttctcaagtgtgacattacagatctccaaatcatttgctccttgggatatagcattcttctcatggtcacatgtactgtgtatgccatcaagactcggggtgtacccgagaattttaacgaagccaagcccattggattcactatgtacacgacatgtatagtatggcttgccttcattccaattttttttggcaccgctcaatcagcggaaaagcatcagtttgctaaggataacagcctccagctccatctatgttcctgcaaaagacatgactcatgcttttttatggctgtacagtattccatggtctcaggctttccctgaatcattgtaagataatggagacgcagcaatgactgttcttgttatcctccccgaccggactaaatgaagacggggcctctgtcctatttattttcctgagcatctaatggtgcctggacacacactgtcattgtttgaaaaatgagtacatgttcactctaaagttacaag

SEQ ID NO: 1488 - protein, 364 aa, Homosapiens
MLAWKVLPGHRSTLSSIEDMQWGKGVREIPASVCTLPCKPGQRKKTQKGTPCCWTCEPCDGYQYQFDEMTCQHCPYDQRPNENRTGCQDIPIIKLEWHSPWAVIPVFLAMLGIIATIFVMATFIRYNDTPIVRASGRELSYVLLTGIFLCYIITFLMIAKPDVAVCSFRRVFLGLGMCISYAALLTKTNRIYRIFEQGKKSVTAPRLISPTSQLAITSSLISVQLLGVFIWFGVDPPNIIIDYDEHKTMNPEQARGVLKCDITDLQIICSLGYSILLMVTCTVYAIKTRGVPENFNEAKPIGFTMYTTCIVWLAFIPIFFGTAQSAEKHQFAKDNSLQLHLCSCKRHDSCFFMAVQYSMVSGFP

SEQ ID NO: 1489 - DNA, 707 bp, Homosapiens
acataagcaatcaaattggtggttttctgactgttgagtgcatttccttagagactgtcattcaggacagattttgtctttatcatgataccaaatatcatttgtatttaaaaaacactgtgtatcctaaaccaaggtcagttaatctccaaaatctttctttcccccaatcattgtgaatgagcatcttcccaatattcaagagaggtgacccttgtgactcgtttccatctactaaagatgtatctcaactttgcagatttttttttttggctgtacagtggaacttggattacactttaaattaactttctctaggaatcaaaggtaatcattatttctctctatgatctaaatgactattctcatgttttttttcaagttgaagattagttttcaattccctttatatctctgccctttttcatagtaacctctgaggacctcagcttgcacaaagaggattgagataacatttccaaagcttgttcttcttgagctgacccaacacttaggaaaacatgacatggatcagcaactccattttctgtgagaagtgcaactgctactgaccatctgcactggcatctagtcaagcgattgtctgaggcaagattttggagattcccatctgatattcttctatttggtctcttgtacccattgtcatcctgtaccacacataataaagtttaagaatgtcaagc

SEQ ID NO: 1490 - protein, 42 aa, Homosapiens
MSIFPIFKRGDPCDSFPSTKDVSQLCRFFFLAVQWNLDYTLN

SEQ ID NO: 1491 - DNA, 649 bp, Homosapiens
gatgatcatatttgacatctactggtcatcctgagtgaagtttagccattcagagttcaaacgatgagtcttcatatacagatggttataaaaagactcacctctgcttaaggtaatcaagtttggcatggaaacatgagcaaaggtaattaaactcagaagatttgctaacattaaaaaatggcaatttcctggaacaaaaatgtgaaaagctaattccccccaccccctcatcacctgctcctctctctgcttttgccatagcaaagccctataaagaaactggccaccagggtcattatcagtctgagctgaaaatttgattaagctggcctcctagggttagtatgaaaaatgctacatttttgttcttggaccttaattcctctttccctcatttttgtcatgtttgcaaatttcatttgcatttaatttcctgtggtttgccaaagtccagactgagacttgagctgttgtttttattcaggtgagaagtgcaactgctactgaccatctgcactggcatctagtcaagcgattgtctgaggcaagattttggagattcccatctgatattcttctatttggtctcttgtacccattgtcatcctgtaccacacataataaagtttaagaatgtcaagcaatc

SEQ ID NO: 1492 - protein, 47 aa, Homosapiens
MKNATFLFLDLNSSFPHFCHVCKFHLHLISCGLPKSRLRLELLFLFR

SEQ ID NO: 1493 - DNA, 490 bp, Homosapiens
gcctcacattctcctgggagatggagaaagtctccattgttttatagttcagaattgaactggtataattgggaatgtctccatttttttggtagtcatgttcttcattctttagctttgtatcttctcaagttgaggaatgtgctaaactgagtagtaaatttaaaaaaggatttaagagagatcattataaaatgaattgcttcttctttgtaagatacaggaagtttagtagctttcttgaagtctcaaatgagaattgagatgttgaagagaacatctactcttttgctatttagtgatgggctaagggcaatttactaatgaaatgaacaggcaggaaacaggccattgactacagaagtaattacaaaaaaaagtacttctttttattttagcacagacagtgctttgaatggtttcatacaaaagttagtttggacaaagttgtatcaggcaataatccaacatgcagaagtttggtgagatt

SEQ ID NO: 1494 - protein, 52 aa, Homosapiens
NEQAGNRPLTTEVITKKSTSFYFSTDSALNGFIQKLVWTKLYQAIIQHAEVW

SEQ ID NO: 1495 - DNA, 2683 bp, Homosapiens
ataggtaattatgtcttcatactatgggacacttccctcagatgcatcctctaaactggaaagagttaatttcccaaagcttaaactggttggcttaggattgggctcaggggaagagaacccagaaactcaacatgctgacaaaagggtgaagttttttaccagtcggatttttggcctccctctctctgtgaaaaacagtaaaaggtctcagtatttttaaattttcctcacccctcccagtgtttcattttgatacgttttctaataacccagtgtgtcttttcttgccttcaagccatcaaactccaaacggtcatgcaactggagcctccggcgatggtcccttttgccagggaccctgagataggcctccgagggagctctgactgccatttccccaaaacagcccccactatcagcaggaaacagctgcctgagcaattgtgtctggttcgtgaagtgacttcccattttcatccaattggccctgatctcacatcccaagcccatggatcataccacattgttctttctgcaaaacagttgagaattaccagtaattgggactgtttacattcaatgccatcatgacagaagcagctttattatattgcagaggaatgattaatacatgatggggattaaagattgcactgcagcaggccaaggcaagaggcaataaagattaataattttagatttccactgtagcaagaacgggaaaaaagcgtcatctgaaatgccaacttcaagcaattgcagtgatttcctggaaccctacgtgacaagtccagattcagtgggaaagactgtgaggatccgttagcaatgtttacgatgggcaagtcttgtgatggggttaccctccttgcattagaatttgcagtcttctattaggccattagtctttgagagcaaaaactgtatgtatctcatttttgtagccccagtgccaggcacacagtagctgctccaaaagcaaaggacatcgagtctgaatcaagctgcttgggtttaatggctgtctttgtcgcttactagctgagtggactcgtcatatttataacttaattgtggttcagtttccttctctacagaaaaggcatgagttcctcattcatagagttataataagggttaaataaagtcatgcatatccaaagcttagcatagtacctgagacatagcaaatacttgaggaatgcaggtataaattaacataggagtgaataacattgcaaggaaacagagaaaaggatcctaaacagtcctgctggtatattcatttatgattcaaaaatcctcaattgttaaaatttgggtcagaaccttattattccaggttgttggtaaatgtgaggacccttctgggtttggaagtagaacaataaattgagaggccaaagaagctgcaaataaaaattggcttctctgggaaaatgattttcacatttatacctacctgccttttgtcctcccatgcatttctccagatgtgataccaatgtgatacaattgttgtttattccttctctgacaatagcaaggtagagtgagccttccagtgagggcttaaaatatagctccagagacattcaccactacttcctgcctccatggttacacattccctttcacaaataaaacatggcctcatgcttcatgctgagcttgcattttacatacatcatttggatcttctctgcaaacctatgaagtgggcatggtaatcttcctttacaaatagagaaactgaggcctaagatggggagcaatttccctttaaaaaccttttattgtcaaggtccaaatggctgatgattcatgccatagacatcccaaaccagctggtaggcagagctcttggcattccaaatggaaacgtggaacagacacagatcacctggccacacagacctcagctctaaagacagatgactacttacctgttaaagttccctgtgcactattttttaaaatctagagatagataataaataggttaagttacattttaaattagcccaagagcatttgagaacagaatcatttttagaatcttaattctgagattcactgttgggcttaagtcactgcttctgtgatggttagttttgggtgtgaacttgactgtattaagggatacttacctgggaaagcattatttactctccatgcttcagtagatactgagcccttcccttttctgctgaaagggaaacccaggtggcttggcgtttgattagaataattgggctgccccaggtgtgtccgtgagggtgcctctgagggaaactgggactaaatgaagaagatctgccctccatatgggcaggcactattccaattggctgggggccccagatagaacaaaaaggcagataaagggcagtctccctggagaagagacctgcctgtagacagacatcagaactccaggttctccagcctttgggctccaggactcacaccaatgcgccaccgggctctctgaccttcagctttggactgagaattacaccatagaatgccctggttctgaggccttcaaactcagactgagccacgctacaggctttccggattgtccagcatacagaaggtctgttgtgggatttctcagcctccatgagtaagtaagaaaattgcctctaataaatcctttttcatatgtctctct

SEQ ID NO: 1496 - protein, 91 aa, Homosapiens; identical to SEQ ID NO: 694

SEQ ID NO: 1497 - DNA, 2528 bp, Homosapiens
agtgggtaccgggacgccgtgaggcggaagctgtgtatggcgggaggctgtggcggtcccttggtggggaagctgttgctgttgctagacgacgggaactagctctcgtcacttcctcagcccgccgtctgcccactcctctagccggaacctgggggcccggagccggggtaggcacagagttgtcctcggaggtccaggacagcggccagcccggcggcgggagtcagggccacgccacctgcagggaagaacccgagtcgaagcgggaagatggctgcagacaagcctgcagatcagggagcagagaaacatgaaggcacaggtcagtcctctgggatcactgatcaagagaaggagttatccaccaatgctttccaagctttcacatctggaaattatgatgcctgtctacaacaccttgcctgtctacaagatataaacaaagatgattataaaataattttgaatacagcagtagctgagttttttaaaagtaaccaaacaacaacagataatttgagacaaacacttaaccagctgaagaatcaggtccactcagctgttgaagaaatggatggattagatgatgttgaaaacagcatgttgtactataatcaagcagtcattctttatcatctgcggcagtatacagaagccatatcagttggtgaaaaactttatcagttcatagagccttttgaagaaaaatttgcccaagcagtgtgttttttgcttgtagacctgtatatattaacctaccaagctgagaaagctttgcatcttcttgctgtcctagaaaaaatgatttcacagggtaacaataacaaaaatggaaagaatgagactggtaataacaacaacaaagatggatctaatcataaagctgaaagtggagctctaatagaagctgcaaaatcaaagatacatcagtacaaagtacgagcttatatccaaatgaagtctctgaaagcatgtaaaagggaaatcaagtcagtcatgaatacagctggaaattccgcaccctctctctttcttaaaagcaattttgagtacttaagaggtaattatcgaaaagccgtgaagctattaaatagttcaaacattgctgagcatccaggattcatgaaaacaggtgaatgcttgagatgcatgttctggaataaccttggttgcatccattttgccatgagcaagcacaatttgggaatattctactttaaaaaggctctgcaagagaatgacaatgtctgtgcacagctcagtgcaggtagcactgatccaggtaaaaaattttcaggaagacccatgtgtacgttactaaccaataagagatatgagttgctgtataactgtggaattcagcttcttcacattggaaggcctcttgctgccttcgaatgtctgattgaagctgttcaggtttatcatgcaaatcctcgcctctggctacggctggctgaatgctgcattgctgccaataaggggacttctgaacaagaaactaaaggccttcccagcaaaaaaggaattgtacagtctattgttggtcaaggctatcatcgtaaaatagttttggcatcacagtctatacagaatactgtttataatgatgggcagtcttcggccattcctgtagccagtatggagtttgcagccatatgtctcagaaatgccttgttgctgctacctgaagaacagcaagatccaaagcaggaaaatggggctaaaaatagtaatcaattaggtgggaacacagagagcagcgaaagcagtgaaacttgcaggtgctccatacttgcttgcagtgcctacgtggctctggctttgggtgataacctcatggctttgaatcatgcagataaacttcttcagcagcccaagctgtcaggatctcttaagtttttgggacatttatatgctgcagaagccctcatctctctcgacagaatatctgatgccattactcacttgaacccggagaatgtcactgatgtctccttagggatctcttcaaatgagcaggaccaaggatcagacaaaggtgaaaatgaagcaatggaatcctctggtaagcgggcccctcagtgctaccccagttccgtcaactctgccaggactgtgatgctgttcaaccttggcagcgcttactgcctgaggagcgaatatgacaaagcccgaaagtgtctccaccaggcggcttcaatgatccatcctaaagaggtgccccctgaggccatcttgctggcagtctaccttgaactgcagaatggtaatactcagctggccttacagatcatcaaaaggaatcagctgctccctgcagtgaaaacacactctgaagtgagaaagaagccagtgtttcagcctgtccacccgatccagcccatccaaatgccggctttcaccactgtgcagagaaagtgatacttcacttttggaaaactgttacctgagacccaggggagaatttactggccattttagttgtatcacagcagaatgaataaaagatggtgaaggctgtt

SEQ ID NO: 1498 - protein, 717 aa, Homosapiens
MAADKPADQGAEKHEGTGQSSGITDQEKELSTNAFQAFTSGNYDACLQHLACLQDINKDDYKIILNTAVAEFFKSNQTTTDNLRQTLNQLKNQVHSAVEEMDGLDDVENSMLYYNQAVILYHLRQYTEAISVGEKLYQFIEPFEEKFAQAVCFLLVDLYILTYQAEKALHLLAVLEKMISQGNNNKNGKNETGNNNNKDGSNHKAESGALIEAAKSKIHQYKVRAYIQMKSLKACKREIKSVMNTAGNSAPSLFLKSNFEYLRGNYRKAVKLLNSSNIAEHPGFMKTGECLRCMFWNNLGCIHFAMSKHNLGIFYFKKALQENDNVCAQLSAGSTDPGKKFSGRPMCTLLTNKRYELLYNCGIQLLHIGRPLAAFECLIEAVQVYHANPRLWLRLAECCIAANKGTSEQETKGLPSKKGIVQSIVGQGYHRKIVLASQSIQNTVYNDGQSSAIPVASMEFAAICLRNALLLLPEEQQDPKQENGAKNSNQLGGNTESSESSETCRCSILACSAYVALALGDNLMALNHADKLLQQPKLSGSLKFLGHLYAAEALISLDRISDAITHLNPENVTDVSLGISSNEQDQGSDKGENEAMESSGKRAPQCYPSSVNSARTVMLFNLGSAYCLRSEYDKARKCLHQAASMIHPKEVPPEAILLAVYLELQNGNTQLALQIIKRNQLLPAVKTHSEVRKKPVFQPVHPIQPIQMPAFTTVQRK

SEQ ID NO: 1499 - DNA, 2609 bp, Homosapiens
agtgggtaccgggacgccgtgaggcggaagctgtgtatggcgggaggctgtggcggtcccttggtggggaagctgttgctgttgctagacgacgggaactagctctcgtcacttcctcagcccgccgtctgcccactcctctagccggaacctgggggcccggagccggggtaggcacagagttgtcctcggaggtccaggacagcggccagcccggcggcgggagtcagggccacgccacctgcagggaagaacccgagtcgaagcgggaagatggctgcagacaagcctgcagatcagggagcagagaaacatgaaggcacaggtcagtcctctgggatcactgatcaagagaaggagttatccaccaatgctttccaagctttcacatctggaaattatgatgcctgtctacaacaccttgcctgtctacaagatataaacaaagatgattataaaataattttgaatacagcagtagctgagttttttaaaagtaaccaaacaacaacagataatttgagacaaacacttaaccagctgaagaatcaggtccactcagctgttgaagaaatggatggattagatgatgttgaaaacagcatgttgtactataatcaagcagtcattctttatcatctgcggcagtatacagaagccatatcagttggtgaaaaactttatcagttcatagagccttttgaagaaaaatttgcccaagcagtgtgttttttgcttgtagacctgtatatattaacctaccaagctgagaaagctttgcatcttcttgctgtcctagaaaaaatgatttcacagggtaacaataacaaaaatggaaagaatgagactggtaataacaacaacaaagatggatctaatcataaagctgaaagtggagctctaatagaagctgcaaaatcaaagatacatcagtacaaagtacgagcttatatccaaatgaagtctctgaaagcatgtaaaagggaaatcaagtcagtcatgaatacagctggaaattccgcaccctctctctttcttaaaagcaattttgagtacttaagaggtaattatcgaaaagccgtgaagctattaaatagttcaaacattgctgagcatccaggattcatgaaaacaggtgaatgcttgagatgcatgttctggaataaccttggttgcatccattttgccatgagcaagcacaatttgggaatattctactttaaaaaggctctgcaagagaatgacaatgtctgtgcacagctcagtgcaggtagcactgatccaggtaaaaaattttcaggaagacccatgtgtacgttactaaccaataagagatatgagttgctgtataactgtggaattcagcttcttcacattggaaggcctcttgctgccttcgaatgtctgattgaagctgttcaggtttatcatgcaaatcctcgcctctggctacggctggctgaatgctgcattgctgccaataaggggacttctgaacaagaaactaaaggccttcccagcaaaaaaggaattgtacagtctattgttggtcaaggctatcatcgtaaaatagttttggcatcacagtctatacagaatactgtttataatgatgggcagtcttcggccattcctgtagccagtatggagtttgcagccatatgtctcagaaatgccttgttgctgctacctgaagaacagcaagatccaaagcaggaaaatggggctaaaaatagtaatcaattaggtgggaacacagagagcagcgaaagcagtgaaacttgcagcagtaaaagccatgatggagataaattcattccagctccaccttcttctccattgagaaaacaggaattagaaaacttaaagtgctccatacttgcttgcagtgcctacgtggctctggctttgggtgataacctcatggctttgaatcatgcagataaacttcttcagcagcccaagctgtcaggatctcttaagtttttgggacatttatatgctgcagaagccctcatctctctcgacagaatatctgatgccattactcacttgaacccggagaatgtcactgatgtctccttagggatctcttcaaatgagcaggaccaaggatcagacaaaggtgaaaatgaagcaatggaatcctctggtaagcgggcccctcagtgctaccccagttccgtcaactctgccaggactgtgatgctgttcaaccttggcagcgcttactgcctgaggagcgaatatgacaaagcccgaaagtgtctccaccaggcggcttcaatgatccatcctaaagaggtgccccctgaggccatcttgctggcagtctaccttgaactgcagaatggtaatactcagctggccttacagatcatcaaaaggaatcagctgctccctgcagtgaaaacacactctgaagtgagaaagaagccagtgtttcagcctgtccacccgatccagcccatccaaatgccggctttcaccactgtgcagagaaagtgatacttcacttttggaaaactgttacctgagacccaggggagaatttactggccattttagttgtatcacagcagaatgaataaaagatggtgaaggctgtt

SEQ ID NO: 1500 - protein, 744 aa, Homosapiens; identical to SEQ ID NO: 112

SEQ ID NO: 1501 - DNA, 2772 bp, Homosapiens
agtgggtaccgggacgccgtgaggcggaagctgtgtatggcgggaggctgtggcggtcccttggtggggaagctgttgctgttgctagacgacgggaactagctctcgtcacttcctcagcccgccgtctgcccactcctctagccggaacctgggggcccggagccggggtaggcacagagttgtcctcggaggtccaggacagcggccagcccggcggcgggagtcagggccacgccacctgcagggaagaacccgagtcgaagcgggaagatggctgcagacaagcctgcagatcagggagcagagaaacatgaaggcacaggtcagtcctctgggatcactgatcaagagaaggagttatccaccaatgctttccaagctttcacatctggaaattatgatgcctgtctacaacaccttgcctgtctacaagatataaacaaagatgattataaaataattttgaatacagcagtagctgagttttttaaaagtaaccaaacaacaacagataatttgagacaaacacttaaccagctgaagaatcaggtccactcagctgttgaagaaatggatggattagatgatgttgaaaacagcatgttgtactataatcaagcagtcattctttatcatctgcggcagtatacagaagccatatcagttggtgaaaaactttatcagttcatagagccttttgaagaaaaatttgcccaagcagtgtgttttttgcttgtagacctgtatatattaacctaccaagctgagaaagctttgcatcttcttgctgtcctagaaaaaatgatttcacagggtaacaataacaaaaatggaaagaatgagactggtaataacaacaacaaagatggatctaatcataaagctgaaagtggagctctaatagaagctgcaaaatcaaagatacatcagtacaaagtacgagcttatatccaaatgaagtctctgaaagcatgtaaaagggaaatcaagtcagtcatgaatacagctggaaattccgcaccctctctctttcttaaaagcaattttgagtacttaagaggtaattatcgaaaagccgtgaagctattaaatagttcaaacattgctgagcatccaggattcatgaaaacaggtgaatgcttgagatgcatgttctggaataaccttggttgcatccattttgccatgagcaagcacaatttgggaatattctactttaaaaaggctctgcaagagaatgacaatgtctgtgcacagctcagtgcaggtagcactgatccaggtaaaaaattttcaggaagacccatgtgtacgttactaaccaataagagatatgagttgctgtataactgtggaattcagcttcttcacattggaaggcctcttgctgccttcgaatgtctgattgaagctgttcaggtttatcatgcaaatcctcgcctctggctacggctggctgaatgctgcattgctgccaataaggggacttctgaacaagaaactaaaggccttcccagcaaaaaaggaattgtacagtctattgttggtcaaggctatcatcgtaaaatagttttggcatcacagtctatacagaatactgtttataatgatgggcagtcttcggccattcctgtagccagtatggagtttgcagccatatgtctcagaaatgccttgttgctgctacctgaagaacagcaagatccaaagcaggaaaatggggctaaaaatagtaatcaattaggtgggaacacagagagcagcgaaagcagtgaaacttgcagcagtaaaagccatgatggagataaattcattccagctccaccttcttctccattgagaaaacaggaattagaaaacttaaagtgctccatacttgcttgcagtgcctacgtggctctggctttgggtgataacctcatggctttgaatcatgcagataaacttcttcagcagcccaagctgtcaggatctcttaagtttttgggacatttatatgctgcagaagccctcatctctctcgacagaatatctgatgccattactcacttgaacccggagaatgtcactgatgtctccttagggatctcttcaaatgagcaggaccaaggatcagacaaaggtgaaaatgaagcaatggaatcctctggtaagcgggcccctcagtgctaccccagttccgtcaactctgccaggactgtgatgctgttcaaccttggcagcgcttactgcctgaggagcgaatatgacaaagcccgaaagtgtctccaccaggcggcttcaatgatccatcctaaagaggtgccccctgaggccatcttgctggcagtctaccttgaactgcagaatggtaatactcagctggccttacagatcatcaaaaggaatcagctgctccctgcagtgaaaacacactctgaagtgagaaagaagccagtgtttcagcctgtccacccgatccagcccatccaaatgccggctttcaccactgtgcagagaaagtgatacttcacttttggaaaactgttacctgagacccaggggagaatttactggccattttagttgtatcacagcagaatgaataaaagatggtgaaggctgttaattttgagtcaattctacccctgacatttggccaaaagcttacttaaaattaaggatttactaagtcatcatcagctgtttttcttaatttcagccagactattaattttgagccattatgtaatatatgccataggcaattaaaacataattttatcagaa

SEQ ID NO: 1502 - protein, 744 aa, Homosapiens; identical to SEQ ID NO: 112

SEQ ID NO: 1503 - DNA, 1068 bp, Homosapiens
tagaggagctgactaaggctttggaacagaaaccaaatgatgcataatattagtgtcaaagagcttattgtcacattcttgtaattactgtgttgctgttgctgatgcaaagaagtctctcgaattcaatccaaataattccaccactatgttgagaaaaggaacatgtgaatactatgaaaaaaactatgctgctgccctagaaatttttacagaaggacaaaaattagatagtgcagatgctaatttcagtgtctggattaaaagatgtcaagaagctcagaatggcccagaatctgatgtgtggactcatcagtcaaaaatcaggtgctccatacttgcttgcagtgcctacgtggctctggctttgggtgataacctcatggctttgaatcatgcagataaacttcttcagcagcccaagctgtcaggatctcttaagtttttgggacatttatatgctgcagaagccctcatctctctcgacagaatatctgatgccattactcacttgaacccggagaatgtcactgatgtctccttagggatctcttcaaatgagcaggaccaaggatcagacaaaggtgaaaatgaagcaatggaatcctctggtaagcgggcccctcagtgctaccccagttccgtcaactctgccaggactgtgatgctgttcaaccttggcagcgcttactgcctgaggagcgaatatgacaaagcccgaaagtgtctccaccaggcggcttcaatgatccatcctaaagaggtgccccctgaggccatcttgctggcagtctaccttgaactgcagaatggtaatactcagctggccttacagatcatcaaaaggaatcagctgctccctgcagtgaaaacacactctgaagtgagaaagaagccagtgtttcagcctgtccacccgatccagcccatccaaatgccggctttcaccactgtgcagagaaagtgatacttcacttttggaaaactgttacctgagacccaggggagaatttactggccattttagttgtatcacagcagaatgaataaaagatggtgaaggctgtt

SEQ ID NO: 1504 - protein, 272 aa, Homosapiens
MLRKGTCEYYEKNYAAALEIFTEGQKLDSADANFSVWIKRCQEAQNGPESDVWTHQSKIRCSILACSAYVALALGDNLMALNHADKLLQQPKLSGSLKFLGHLYAAEALISLDRISDAITHLNPENVTDVSLGISSNEQDQGSDKGENEAMESSGKRAPQCYPSSVNSARTVMLFNLGSAYCLRSEYDKARKCLHQAASMIHPKEVPPEAILLAVYLELQNGNTQLALQIIKRNQLLPAVKTHSEVRKKPVFQPVHPIQPIQMPAFTTVQRK

SEQ ID NO: 1505 - DNA, 1231 bp, Homosapiens
tagaggagctgactaaggctttggaacagaaaccaaatgatgcataatattagtgtcaaagagcttattgtcacattcttgtaattactgtgttgctgttgctgatgcaaagaagtctctcgaattcaatccaaataattccaccactatgttgagaaaaggaacatgtgaatactatgaaaaaaactatgctgctgccctagaaatttttacagaaggacaaaaattagatagtgcagatgctaatttcagtgtctggattaaaagatgtcaagaagctcagaatggcccagaatctgatgtgtggactcatcagtcaaaaatcaggtgctccatacttgcttgcagtgcctacgtggctctggctttgggtgataacctcatggctttgaatcatgcagataaacttcttcagcagcccaagctgtcaggatctcttaagtttttgggacatttatatgctgcagaagccctcatctctctcgacagaatatctgatgccattactcacttgaacccggagaatgtcactgatgtctccttagggatctcttcaaatgagcaggaccaaggatcagacaaaggtgaaaatgaagcaatggaatcctctggtaagcgggcccctcagtgctaccccagttccgtcaactctgccaggactgtgatgctgttcaaccttggcagcgcttactgcctgaggagcgaatatgacaaagcccgaaagtgtctccaccaggcggcttcaatgatccatcctaaagaggtgccccctgaggccatcttgctggcagtctaccttgaactgcagaatggtaatactcagctggccttacagatcatcaaaaggaatcagctgctccctgcagtgaaaacacactctgaagtgagaaagaagccagtgtttcagcctgtccacccgatccagcccatccaaatgccggctttcaccactgtgcagagaaagtgatacttcacttttggaaaactgttacctgagacccaggggagaatttactggccattttagttgtatcacagcagaatgaataaaagatggtgaaggctgttaattttgagtcaattctacccctgacatttggccaaaagcttacttaaaattaaggatttactaagtcatcatcagctgtttttcttaatttcagccagactattaattttgagccattatgtaatatatgccataggcaattaaaacataattttatcagaa

SEQ ID NO: 1506 - protein, 272 aa, Homosapiens; identical to SEQ ID NO: 1504

SEQ ID NO: 1507 - DNA, 377 bp, Homosapiens
tccaccactatgttgagaaaaggaacatgtgaatactatgaaaaaaactatgctgctgccctagaaatttttacagaaggacaaaaattagatagtgcagatgctaatttcagtgtctggattaaaagatatcctaattttcagttcaaggcatttgggttgcctctaaagtaccttccgtccttatcattgcccaactcaaaatgccaatgttgggaattgcagctgatgctggtgttcagattgtggtgtatacggccattatgagagaactggactttgtgtgtttgtgtgtgactgagtctgtctgggtcacccacactagagtgcagtagcacaatctcaactcactgcaacctccactgtctgggttcagg

SEQ ID NO: 1508 - protein, 85 aa, Homosapiens
MLRKGTCEYYEKNYAAALEIFTEGQKLDSADANFSVWIKRYPNFQFKAFGLPLKYLPSLSLPNSKCQCWELQLMLVFRLWCIRPL

SEQ ID NO: 1509 - DNA, 730 bp, Homosapiens
cagctactcaggaggctgaggcaggagaatcgcttgaatccaggaggcggaggttgcagtgagccgagatcatgcccctgcactccagcctgggcaacagagcgaggctccatctcaaaaaaaaaaaaaagaaaagaaaagaaaatatgccctctaccttctgagcccgaggagaaaagaaagaaaatatgctctgttgttctgcccctcagatttattttcgtgtttttgtaggatcagacaaaggtgaaaatgaagcaatggaatcctctggtaagcgggcccctcagtgctaccccagttccgtcaactctgccaggactgtgatgctgttcaaccttggcagcgcttactgcctgaggagcgaatatgacaaagcccgaaagtgtctccaccaggcggcttcaatgatccatcctaaagaggtgccccctgaggccatcttgctggcagtctaccttgaactgcagaatggtaatactcagctggccttacagatcatcaaaaggaatcagctgctccctgcagtgaaaacacactctgaagtgagaaagaagccagtgtttcagcctgtccacccgatccagcccatccaaatgccggctttcaccactgtgcagagaaagtgatacttcacttttggaaaactgttacctgagacccaggggagaatttactggccattttagttgtatcacagcagaatgaataaaagatggtgaaggctgtt

SEQ ID NO: 1510 - protein, 146 aa, Homosapiens
MLCCSAPQIYFRVFVGSDKGENEAMESSGKRAPQCYPSSVNSARTVMLFNLGSAYCLRSEYDKARKCLHQAASMIHPKEVPPEAILLAVYLELQNGNTQLALQIIKRNQLLPAVKTHSEVRKKPVFQPVHPIQPIQMPAFTTVQRK

SEQ ID NO: 1511 - DNA, 893 bp, Homosapiens
cagctactcaggaggctgaggcaggagaatcgcttgaatccaggaggcggaggttgcagtgagccgagatcatgcccctgcactccagcctgggcaacagagcgaggctccatctcaaaaaaaaaaaaaagaaaagaaaagaaaatatgccctctaccttctgagcccgaggagaaaagaaagaaaatatgctctgttgttctgcccctcagatttattttcgtgtttttgtaggatcagacaaaggtgaaaatgaagcaatggaatcctctggtaagcgggcccctcagtgctaccccagttccgtcaactctgccaggactgtgatgctgttcaaccttggcagcgcttactgcctgaggagcgaatatgacaaagcccgaaagtgtctccaccaggcggcttcaatgatccatcctaaagaggtgccccctgaggccatcttgctggcagtctaccttgaactgcagaatggtaatactcagctggccttacagatcatcaaaaggaatcagctgctccctgcagtgaaaacacactctgaagtgagaaagaagccagtgtttcagcctgtccacccgatccagcccatccaaatgccggctttcaccactgtgcagagaaagtgatacttcacttttggaaaactgttacctgagacccaggggagaatttactggccattttagttgtatcacagcagaatgaataaaagatggtgaaggctgttaattttgagtcaattctacccctgacatttggccaaaagcttacttaaaattaaggatttactaagtcatcatcagctgtttttcttaatttcagccagactattaattttgagccattatgtaatatatgccataggcaattaaaacataattttatcagaa

SEQ ID NO: 1512 - protein, 146 aa, Homosapiens; identical to SEQ ID NO: 1510

SEQ ID NO: 1513 - DNA, 895 bp, Homosapiens
ggcaacagagcgaggctccatctcaaaaaaaaaaaaaagaaaagaaaagaaaatatgccctctaccttctgagcccgaggagaaaagaaagaaaatatgctctgttgttctgcccctcagatttattttcgtgtttttgtaggatcagacaaaggtgaaaatgaagcaatggaatcctgtaagtaagaagttttgtgatacttaagtagcctggcctgcatcccaaaaatttagattctaaatcttctgtgttcgtttttctgcctgaggaatactgctgtgccaagtggctcctcaaggcgatagattgggttgcttccttgctgttggcacggcctcttcaccagtgtctacactctttttccccagctggtaagcgggcccctcagtgctaccccagttccgtcaactctgccaggactgtgatgctgttcaaccttggcagcgcttactgcctgaggagcgaatatgacaaagcccgaaagtgtctccccttacagatcatcaaaaggaatcagctgctccctgcagtgaaaacacactctgaagtgagaaagaagccagtgtttcagcctgtccacccgatccagcccatccaaatgccggctttcaccactgtgcagagaaagtgatacttcacttttggaaaactgttacctgagacccaggggagaatttactggccattttagttgtatcacagcagaatgaataaaagatggtgaaggctgttaattttgagtcaattctacccctgacatttggccaaaagcttacttaaaattaaggatttactaagtcatcatcagctgtttttcttaatttcagccagactattaattttgagccattatgtaatatatgccataggcaattaaaacataattttatcaga

SEQ ID NO: 1514 - protein, 68 aa, Homosapiens
MLFNLGSAYCLRSEYDKARKCLPLQIIKRNQLLPAVKTHSEVRKKPVFQPVHPIQPIQMPAFTTVQRK

SEQ ID NO: 1515 - DNA, 599 bp, Homosapiens
ttagattctaaatcttctgtgttcgtttttctgcctgaggaatactgctgtgccaagtggctcctcaaggcgatagattgggttgcttccttgctgttggcacggcctcttcaccagtgtctacactctttttccccagctggtaagcgggcccctcagtgctaccccagttccgtcaactctgccaggactgtgatgctgttcaaccttggcagcgcttactgcctgaggagcgaatatgacaaagcccgaaagtgtctccaccaggcggcttcaatgatccatcctaaagaggtgccccctgaggccatcttgctggcagtctaccttgaactgcagaatggtaatactcagctggccttacagatcatcaaaaggaatcagctgctccctgcagtgaaaacacactctgaagtgagaaagaagccagtgtttcagcctgtccacccgatccagcccatccaaatgccggctttcaccactgtgcagagaaagtgatacttcacttttggaaaactgttacctgagacccaggggagaatttactggccattttagttgtatcacagcagaatgaataaaagatggtgaaggctgtt

SEQ ID NO: 1516 - protein, 100 aa, Homosapiens [sequence omitted]

SEQ ID NO: 1517 - DNA, 762 bp, Homosapiens
ttagattctaaatcttctgtgttcgtttttctgcctgaggaatactgctgtgccaagtggctcctcaaggcgatagattgggttgcttccttgctgttggcacggcctcttcaccagtgtctacactctttttccccagctggtaagcgggcccctcagtgctaccccagttccgtcaactctgccaggactgtgatgctgttcaaccttggcagcgcttactgcctgaggagcgaatatgacaaagcccgaaagtgtctccaccaggcggcttcaatgatccatcctaaagaggtgccccctgaggccatcttgctggcagtctaccttgaactgcagaatggtaatactcagctggccttacagatcatcaaaaggaatcagctgctccctgcagtgaaaacacactctgaagtgagaaagaagccagtgtttcagcctgtccacccgatccagcccatccaaatgccggctttcaccactgtgcagagaaagtgatacttcacttttggaaaactgttacctgagacccaggggagaatttactggccattttagttgtatcacagcagaatgaataaaagatggtgaaggctgttaattttgagtcaattctacccctgacatttggccaaaagcttacttaaaattaaggatttactaagtcatcatcagctgtttttcttaatttcagccagactattaattttgagccattatgtaatatatgccataggcaattaaaacataattttatcagaa

SEQ ID NO: 1518 - protein, 100 aa, Homosapiens [sequence omitted]

SEQ ID NO: 1519 - DNA, 396 bp, Homosapiens
gaaactccatacacactaaagaaagctactggcaatatataactaaaataaacctctgaattctaccactgaaatggtgcatcatgaagcttcaaggaagattttgattggatctctttagtaggtcacctgccaatccctggaccaatcatgggcattgagccatacctgtagtaggggactgggtaccaccattggcagccccagaggaatctcacaaaattagaaatagttcctcaaaaggacattcatccagtcaggagttcgagaccagccttaccaacatggagaaatcctatctctactaaaaatgcaaaaagtagctgggcgtggtagcacatgcctgtaaccccagatactcgggaggctgaggcaggataattgcttgaacgcagg

SEQ ID NO: 1520 - protein, 52 aa, Homosapiens
GTGYHHWQPQRNLTKLEIVPQKDIHPVRSSRPALPTWRNPISTKNAKSSWAW

SEQ ID NO: 1521 - DNA, 678 bp, Homosapiens
aatactgaagtgttacttaggaaaacaaatgggcatgcagattttgatgtaattgcaactgtatgtgtctgttgtgaaagccaccagcagaattggatggttgactgtagtatcggggtgtccagtcacccatctcaaaacccagagtattacatgtctagcttaattgttaggttttaagacaaaaggaactgaggctcatcagagcagaacaacaggtagtccctaggaagtcacgtgggaatgagcttgaataagtttgttaccttgttggttggcagatgtacttggagtgtgtatcttaagcttttgttttttcacgggcatctttctgttttgagcaaaggcggcttcaatgatccatcctaaagaggtgccccctgaggccatcttgctggcagtctaccttgaactgcagaatggtaatactcagctggccttacagatcatcaaaaggaatcagctgctccctgcagtgaaaacacactctgaagtgagaaagaagccagtgtttcagcctgtccacccgatccagcccatccaaatgccggctttcaccactgtgcagagaaagtgatacttcacttttggaaaactgttacctgagacccaggggagaatttactggccattttagttgtatcacagcagaatgaataaaagatggtgaaggctgtt

SEQ ID NO: 1522 - protein, 73 aa, Homosapiens [sequence omitted]

SEQ ID NO: 1523 - DNA, 840 bp, Homosapiens
aatactgaagtgttacttaggaaaacaaatgggcatgcagattttgatgtaattgcaactgtatgtgtctgttgtgaaagccaccagcagaattggatggttgactgtagtatcggggtgtccagtcacccatctcaaaacccagagtattacatgtctagcttaattgttaggttttaagacaaaaggaactgaggctcatcagagcagaacaacaggtagtccctaggaagtcacgtgggaatgagcttgaataagtttgttaccttgttggttggcagatgtacttggagtgtgtatcttaagcttttgttttttcacgggcatctttctgttttgagcaaaggcggcttcaatgatccatcctaaagaggtgccccctgaggccatcttgctggcagtctaccttgaactgcagaatggtaatactcagctggccttacagatcatcaaaaggaatcagctgctccctgcagtgaaaacacactctgaagtgagaaagaagccagtgtttcagcctgtccacccgatccagcccatccaaatgccggctttcaccactgtgcagagaaagtgatacttcacttttggaaaactgttacctgagacccaggggagaatttactggccattttagttgtatcacagcagaatgaataaaagatggtgaaggctgttaattttgagtcaattctacccctgacatttggccaaaagcttacttaaaattaaggatttactaagtcatcatcagctgtttttcttaatttcagccagactattaattttgagccattatgtaatatatgccataggcaattaaaacataattttatcaga

SEQ ID NO: 1524 - protein, 73 aa, Homosapiens [sequence omitted]

SEQ ID NO: 1525 - DNA, 734 bp, Homosapiens
gtggacaggctgaaacactggcttctttctcacttcagagtgtgttttcactgcagggagcagctgattccttttgatgatctgtaaggccagctgagtattacctataaaaacacttcccgttaaaaaacaaagcacagaacaatactgccacacacaaagcaagacatgaaaatcctgctggggaggtaaaagatgatctagaagagctgtcatctgcagccttggctgtatactggaatcccataaagcctccatcttatccccagaaattctgatttaagcgatgtagggcatggcccaggcaatggaattttaaaaagcttcccagtgattctaaggtatagcccaggtagagaacttgttataggtgggctgtataaaagaaacaatcatctgggagggttggttcatgcctgtaaccctagtactgttgggattacatgcatgagccaccgcacctggcctatttctgtcccttctaatctctctcattcatgtctcttttctacttcatgctatctcatatttagagccaacagcctttcttctagtgagatacatcttggagatcgtatatgccctagaggcatgacctgaatttatgtttgaataaataattctcagcaagaactggcttactgtaaaacttgttaatatgtgttcaaaatactatggtgtataactcaaagcaactgcattctaactcatgttctcagtcatttagctgccta

SEQ ID NO: 1526 - protein, 50 aa, Homosapiens
MSHRTWPISVPSNLSHSCLFSTSCYLIFRANSLSSSEIHLGDRICPRGMT

SEQ ID NO: 1527 - DNA, 856 bp, Homosapiens
atgccccactacagcgtcacatttatgtcctgtggcgaacacgctgtgtttggcgtgacactaggggctccaaactacccattacgtggttcgtcttcagtggcatccaagcgaccgcagcgcgaggctcgggacccagagcaccacctaccggcggcacggtcggcgcagcaggccccagaagggcggggaacgctgtcaagcccaggggcacttcggcgaggagccccacccgccctccagctgaccctcagctgtggcccacatccggggcccagagcgccgcggaaacgccgaagcccggccggcaggtacccgcacccttgtcacaagatagcgcggaaagcgaagaaggaagttcccgtccctcctaaagccgaagccaaagcgaagtctttaaaggccaagaaggcagtgttgaaaggtgtccgcagccacaaaaaaaagaagatccgcacgtcacccaccttacggcggcccaagacaccgcgactccggagacagcccaaatatcctcggaagagcgctcctaggagaaacaagcttgaccactatgctatcatcaagtttctgctgaccactgagtctgccatgaagaagatagaagacaataacacacttgtgttcattgtggatgttaaagccaacaagcaccagattaaacaggctgtgaagaagctctatgacaaagatgtggtcaaggtcaacaccctgattcggcctgatggagagaagaaggtgtatgtttgactggctcctgattacgatgctttggatgttgccaacaaaattgggatcatctaaactgagtccagttgcctaattctaaatatatatatatatatcttttcagcat

SEQ ID NO: 1528 - protein, 249 aa, Homosapiens
MPHYSVTFMSCGEHAVFGVTLGAPNYPLRGSSSVASKRPQREARDPEHHLPAARSAQQAPEGRGTLSSPGALRRGAPPALQLTLSCGPHPGPRAPRKRRSPAGRYPHPCHKIARKAKKEVPVPPKAEAKAKSLKAKKAVLKGVRSHKKKKIRTSPTLRRPKTPRLRRQPKYPRKSAPRRNKLDHYAIIKFLLTTESAMKKIEDNNTLVFIVDVKANKHQIKQAVKKLYDKDVVKVNTLIRPDGEKKVYV

SEQ ID NO: 1529 - DNA, 1018 bp, Homosapiens
acgcgtgcagtacgcacgcgcgtcccacgcgcctcgagtcttccgcgcgcctgcccagccgggccgcggctgcccgcgcttaacacgcacgcgcgccccacgcggcccggagccctcgtgcccccgcctcgcctggcctgggcgcctcacgcacgctccttccccttcggcttagcgcgcggggccgcaggtccccgcgggccgccctgaattattcatcggcaggaagatattagatgtacccgctccgcgcgggccgtcgtgcaatgctatccgagctccgcgcgcgccctgcgcccctcctcctcctcacgtccgtcctctctgaaaccttggcagagaagggggatcacatttcctttgtcatcgggccatttcgccctcgccttggtcccccctccgatcccgagcctcggggatggaggctcctctcgggcgcgctggaatcagtggaaccggcaacagccccgcgcggcgagctcgggagccgcgtggccaacgccgccggctcgcgcccgcgtcatcttctttctgaaaggagtcgccgatccggacgcgggtggcctcggccgcgctgcgcctaccgagctttgctcccgccgtgccccggcctcctggggctttgcacaactcccccagttcgggttgcgtgcgcgcgcgcgcgccccctctttctctgctttgccgcctctgcctcctcctcctcctcctcttctcttcagtacgccggttattgggactgatcggaattcggaatccttttaatctccaaaggagcaaactcacttccgcccgagtgctgggagggggctgggggaggggaggcaggggagggggctccaggcaaacaggaaacattagccctctcagcacggcccgcttttgtgtgctccctccctccgccctccaacctcctcccttctcccggccgctggggagatgaacgcccccgggcttcagtgtgacgacctttgaaaccttctgagcgaggagcagagaacgactcttccgtttattt

SEQ ID NO: 1530 - protein, 168 aa, Homosapiens
MYPLRAGRRAMLSELRARPAPLLLLTSVLSETLAEKGDHISFVIGPFRPRLGPPSDPEPRGWRLLSGALESVEPATAPRGELGSRVANAAGSRPRHLLSERSRRSGRGWPRPRCAYRALLPPCPGLLGLCTTPPVRVACARARPLFLCFAASASSSSSSSLQYAGYWD

SEQ ID NO: 1531 - DNA, 396 bp, Homosapiens
agactcataggggcttggccctgccctgagagagggtcatttatgaccattaaggccagaaggagagctttgtagtcctcactgccccgacttctctgtgaggcacatgctggcaagactctgcacccgccccttggcacgggtctggactctatccaggaagggacagagcatacatggggattatatgcatatttgacaagtgctatgctggaactctcacccaaatctaagaaaagcagcttacaaagaagacaaacacaggcaagcttgagtcatgaaaggagagcagcatgcgggatgggacttcctggattgagaccatggtttggctctgagcttcctgggagtcaaagcaaaatgaccaacaataaataattatgccattatcaaact

SEQ ID NO: 1532 - protein, 56 aa, Homosapiens [sequence omitted]

SEQ ID NO: 1533 - DNA, 1635 bp, Homosapiens
atgacagtccttctaatgcctcgaagttgtttctttttggttttccagctgagcatcgagcaggcccagacggtggcggaacaggtggagatgaaggcgaaggttgtgcagtcggaggtcaaagccgtgacggcgaggcataagaaagccctggaggaacgcgagtgtgagctgctgtggaaggtagaaaagatccgccaggtgaaagccaagtctctgtacctgcaggtggagaagctgcggcaaaacctcaacaagcttgagagcaccatcagtgccgtgcagcaggtcctggaggagggtagagcgctagacatcctactggcccgagaccggatgctggcccaggtgcaggagctgaagaccgtgcggagcctcctgcagccccaggaagacgaccgagtcatgttcacaccccccgatcaggcactgtaccttgccatcaagtcttttggctttgttagcagcggggcctttgccccactcaccaaggccacaggcgatggcctcaagcgtgccctccagggtaaggtggcctccttcacagtcattggttatgaccacgatggtgagccccgcctctcaggaggcgacctgatgtcggctgtggtcctgggccctgatggcaacctgtttggtgcagaggtgagtgatcagcagaatgggacatacgtggtgagttaccgaccccagctggagggtgagcacctggtatctgtgacactgtgcaaccagcacattgagaacagccctttcaaggtggtggtcaagtcaggccgcagctacgtgggcattgggctcccgggcctgagcttcggcagtgagggtgacagcgatggcaagctctgccgcccttggggtgtgagtgtagacaaggagggctacatcattgtcgccgaccgcagcaacaaccgcatccaggtgttcaagccctgcggcgccttccaccacaaattcggcaccctgggctcccggcctgggcagttcgaccgaccagccggcgtggcctgtgacgcctcacgcaggatcgtggtggctgacaaggacaatcatcgcatccagatcttcacgttcgagggccagttcctcctcaagtttggtgagaaaggaaccaagaatgggcagttcaactacccttgggatgtggcggtgaattctgagggcaagatcctggtctcagacacgaggaaccaccggatccagctgtttgggcctgatggtgtcttcctaaacaagtatggcttcgagggggctctctggaagcactttgactccccacggggtgtggccttcaaccatgagggccacttggtggtcactgacttcaacaaccaccggctcctggttattcaccccgactgccagtcggcacgctttctgggctcggagggcacaggcaatgggcagttcctgcgcccacaaggggtagctgtggaccaggaagggcgcatcattgtggcggattccaggaaccatcgggtacagatgtttgaatccaacggcagcttcctgtgcaagtttggtgctcaaggcagcggctttgggcagatggaccgcccttccggcatcgccatcacccccgacggaatgatcgttgtggtggactttggcaacaatcgaatcctcgtcttctaa

SEQ ID NO: 1534 - protein, 544 aa, Homosapiens
MTVLLMPRSCFFLVFQLSIEQAQTVAEQVEMKAKVVQSEVKAVTARHKKALEERECELLWKVEKIRQVKAKSLYLQVEKLRQNLNKLESTISAVQQVLEEGRALDILLARDRMLAQVQELKTVRSLLQPQEDDRVMFTPPDQALYLAIKSFGFVSSGAFAPLTKATGDGLKRALQGKVASFTVIGYDHDGEPRLSGGDLMSAVVLGPDGNLFGAEVSDQQNGTYVVSYRPQLEGEHLVSVTLCNQHIENSPFKVVVKSGRSYVGIGLPGLSFGSEGDSDGKLCRPWGVSVDKEGYIIVADRSNNRIQVFKPCGAFHHKFGTLGSRPGQFDRPAGVACDASRRIVVADKDNHRIQIFTFEGQFLLKFGEKGTKNGQFNYPWDVAVNSEGKILVSDTRNHRIQLFGPDGVFLNKYGFEGALWKHFDSPRGVAFNHEGHLVVTDFNNHRLLVIHPDCQSARFLGSEGTGNGQFLRPQGVAVDQEGRIIVADSRNHRVQMFESNGSFLCKFGAQGSGFGQMDRPSGIAITPDGMIVVVDFGNNRILVF

SEQ ID NO: 1535 - DNA, 1680 bp, Homosapiens
acagttgggtgagggagataactcgtgctcacaggaagccacgcacccttgaaaggcaccgggtccttcttagcatcgtgcttcctgagcaagcctggcattgcctcacagaccttcctcagagccgctttcagaaaagcaagctgcttctggttgggcccagacctgccttgaggagcctgtagagttaaaaaatgaaccccacggatatagcagacaccaccctcgatgaaagcatatacagcaattactatctgtatgaaagtatccccaagccttgcaccaaagaaggcatcaaggcatttggggagctcttcctgcccccactgtattccttggtttttgtatttggtctgcttggaaattctgtggtggttctggtcctgttcaaatacaagcggctcaggtccatgactgatgtgtacctgctcaaccttgccatctcggatctgctcttcgtgttttccctccctttttggggctactatgcagcagaccagtgggtttttgggctaggtctgtgcaagatgatttcctggatgtacttggtgggcttttacagtggcatattctttgtcatgctcatgagcattgatagatacctggcaattgtgcacgcggtgttttccttgagggcaaggaccttgacttatggggtcatcaccagtttggctacatggtcagtggctgtgttcgcctcccttcctggctttctgttcagcacttgttatactgagcgcaaccatacctactgcaaaaccaagtactctctcaactccacgacgtggaaggttctcagctccctggaaatcaacattctcggattggtgatccccttagggatcatgctgttttgctactccatgatcatcaggaccttgcagcattgtaaaaatgagaagaagaacaaggcggtgaagatgatctttgccgtggtggtcctcttccttgggttctggacaccttacaacatagtgctcttcctagagaccctggtggagctagaagtccttcaggactgcacctttgaaagatacttggactatgccatccaggccacagaaactctggcttttgttcactgctgccttaatcccatcatctacttttttctgggggagaaatttcgcaagtacatcctacagctcttcaaaacctgcaggggcctttttgtgctctgccaatactgtgggctcctccaaatttactctgctgacacccccagctcatcttacacgcagtccaccatggatcatgatctccatgatgctctgtagaaaaatgaaatggtgaaatgcagagtcaatgaactttccacattcagagcttacttaaaattgtattttagtaagagattcctgagccagtgtcaggaggaaggcttacacccacagtggaaagacagcttctcatcctgcaggcagctttttctctcccactagacaagtccagcctggcaagggttcacctgggctgaggcatccttcctcacaccaggcttgcctgcaggcatgagtcagtctgatgagaactctgagcagtgcttgaatgaagttgtaggtaatattgcaaggcaaagactattcccttctaacctgaactgatgggtttctccagagggaattgcagagtactggctgatggagtaaatcgctaccttttgctgtggcaaatgggccc

SEQ ID NO: 1536 - protein, 360 aa, Homosapiens; identical to SEQ ID NO: 117

SEQ ID NO: 1537 - DNA, 661 bp, Homosapiens
agggtctcaagatggccaggttttggacttacaccataggctctactggtccttaggcctttggactgaggctggaaccacatcctcagctctcctggatctccagcttggcaactgcagaccttgggacatttcagattccataatcatgacgaaggcgatggcagcagttttccaggctagctgtcttcacaacccgatggctctcttcttttctgctgccacagagactgactgtctgcctcctgcaaatttgaaatttggcaaacctgcctcctctgcttctcagaaccaaactggggccaggagaacttctgacccaagtgttgatcacctctcttcctgcacctcactgtgcaccctctgctcaggaaatgcctttggcgtgttgctgacgtctgtccctgctccatctcttaccaccctgcacttcaccctttcccacacaggtttcacctgatctcagctgctttgggcagaccatccaggtattttggagtctgaaaaggatctctgtctctaagtctggtgcaaatggagtttgggggttttaaaattcattcttcttgctgctgtttcacaatttctcagaaaaggtgaaaatgcagactttggcagttatgttcaatatgaaaagtcttaataaagtaatttttgacct

SEQ ID NO: 1538 - protein, 103 aa, Homosapiens
MTKAMAAVFQASCLHNPMALFFSAATETDCLPPANLKFGKPASSASQNQTGARRTSDPSVDHLSSCTSLCTLCSGNAFGVLLTSVPAPSLTTLHFTLSHTGFT

SEQ ID NO: 1539 - DNA, 2176 bp, Homosapiens
ggctgctgggccgacgaggggcggtgccaggccgtgggtccttagtcaagtgacgcgaagcggccggcctgggcgccgactgcagagccgggaggctggtggtcatgccggggttcctggttcgcatcctccctctgttgctggttctgctgcttctgggccctacgcgcggcttgcgcaatgccacccagaggatgtttgaaattgactatagccgggactccttcctcaaggatggccagccatttcgctacatctcaggaagcattcactactcccgtgtgccccgcttctactggaaggaccggctgctgaagatgaagatggctgggctgaacgccatccagacattacctggcagctgtggacaagtggttgggagtccttctgcccaagatgaagcctctcctctatcagaatggagggccagttataacagtgcaggcagcaacatcacagatgctttcctaagccagaggaagtgtgagcccaaaggacccttgatcaattctgaattctatactggctggctagatcactggggccaacctcactccacaatcaagaccgaagcagtggcttcctccctctatgatatacttgcccgtggggcgagtgtgaacttgtacatgtttataggtgggaccaattttgcctattggaatggggccaactcaccctatgcagcacagcccaccagctacgactatgatgccccactgagtgaggctggggacctcactgagaagtattttgctctgcgaaacatcatccagaagtttgaaaaagtaccagaaggtcctatccctccatctacaccaaagtttgcatatggaaaggtcactttggaaaagttaaagacagtgggagcagctctggacattctgtgtccctctgggcccatcaaaagcctttatcccttgacatttatccaggtgaaacagcattatgggtttgtgctgtaccggacaacacttcctcaagattgcagcaacccagcacctctctcttcacccctcaatggagtccacgatcgagcatatgttgctgtggatgggatcccccagggagtccttgagcgaaacaatgtgatcactctgaacataacagggaaagctggagccactctggaccttctggtagagaacatgggacgtgtgaactatggtgcatatatcaacgattttaagggtttggtttctaacctgactctcagttccaatatcctcacggactggacgatctttccactggacactgaggatgcagtgtgcagccacctggggggctggggacaccgtgacagtggccaccatgatgaagcctgggcccacaactcatccaactacacgctcccggccttttatatggggaacttctccattcccagtgggatcccagacttgccccaggacacctttatccagtttcctggatggaccaagggccaggtctggattaatggctttaaccttggccgctattggccagcccggggccctcagttgaccttgtttgtgccccagcacatcctgatgacctcggccccaaacaccatcaccgtgctggaactggagtgggcaccctgcagcagtgatgatccagaactatgtgctgtgacgttcgtggacaggccagttattggctcatctgtgacctacgatcatccctccaaacctgttgaaaaaagactcatgcccccacccccgcaaaaaaacaaagattcatggctggaccatgtatgatgatgaaagcctgtgtctttgagggattctaccctgaacatacctcacagatcctccctgtcatgccacatttcactgattggaatgtggaaatggaaaaggaatttaggatgtgcattttcacctgaggtttccctgcatccctgcagtgccaaagccccaccttcagggaccacctggaatgtgtgaggggctgacagcacagtaacgtgcatacatatctgcagggctggaatggaagctttaaaggtggtagtgatttttattttggaagaatcatgttacctttttgttaaataaaatttgtactcaaatgatgatgtcactgtttttaatgtgcaggtattgaattatatggtctgacttaaatcataactagacttgagtgggctgaataaaccacttcactaacttgaagttcaaaaggatgg

SEQ ID NO: 1540 - protein, 546 aa, Homosapiens
MPGFLVRILPLLLVLLLLGPTRGLRNATQRMFEIDYSRDSFLKDGQPFRYISGSIHYSRVPRFYWKDRLLKMKMAGLNAIQTLPGSCGQVVGSPSAQDEASPLSEWRASYNSAGSNITDAFLSQRKCEPKGPLINSEFYTGWLDHWGQPHSTIKTEAVASSLYDILARGASVNLYMFIGGTNFAYWNGANSPYAAQPTSYDYDAPLSEAGDLTEKYFALRNIIQKFEKVPEGPIPPSTPKFAYGKVTLEKLKTVGAALDILCPSGPIKSLYPLTFIQVKQHYGFVLYRTTLPQDCSNPAPLSSPLNGVHDRAYVAVDGIPQGVLERNNVITLNITGKAGATLDLLVENMGRVNYGAYINDFKGLVSNLTLSSNILTDWTIFPLDTEDAVCSHLGGWGHRDSGHHDEAWAHNSSNYTLPAFYMGNFSIPSGIPDLPQDTFIQFPGWTKGQVWINGFNLGRYWPARGPQLTLFVPQHILMTSAPNTITVLELEWAPCSSDDPELCAVTFVDRPVIGSSVTYDHPSKPVEKRLMPPPPQKNKDSWLDHV

SEQ ID NO: 1541 - DNA, 2609 bp, Homosapiens
acagcggggcggggcgcggggctgagcaggcgcgagggctggctgctgggccgacgaggggcggtgccaggccgtgggtccttagtcaagtgacgcgaagcggccggcctgggcgccgactgcagagccgggaggctggtggtcatgccggggttcctggttcgcatcctccctctgttgctggttctgctgcttctgggccctacgcgcggcttgcgcaatgccacccagaggatgtttgaaattgactatagccgggactccttcctcaaggatggccagccatttcgctacatctcaggaagcattcactactcccgtgtgccccgcttctactggaaggaccggctgctgaagatgaagatggctgggctgaacgccatccagacgtatgtgccctggaactttcatgagccctggccaggacagtaccagttttctgaggaccatgatgtggaatattttcttcggctggctcatgagctgggactgctggttatcctgaggcccgggccctacatctgtgcagagtgggaaatgggaggattacctgcttggctgctagagaaagagtctattcttctccgctcctccgacccagattacctggcagctgtggacaagtggttgggagtccttctgcccaagatgaagcctctcctctatcagaatggagggccagttataacagtgcaggttgaaaatgaatatggcagctactttgcctgtgattttgactacctgcgcttcctgcagaagcgctttcgccaccatctgggggatgatgtggttctgtttaccactgatggagcacataaaacattcctgaaatgtggggccctgcagggcctctacaccacggtggactttggaacaggcagcaacatcacagatgctttcctaagccagaggaagtgtgagcccaaaggacccttgatcaattctgaattctatactggctggctagatcactggggccaacctcactccacaatcaagaccgaagcagtggcttcctccctctatgatatacttgcccgtggggcgagtgtgaacttgtacatgtttataggtgggaccaattttgcctattggaatggggccaactcaccctatgcagcacagcccaccagctacgactatgatgccccactgagtgaggctggggacctcactgagaagtattttgctctgcgaaacatcatccagaagtttgaaaaagtaccagaaggtcctatccctccatctacaccaaagtttgcatatggaaaggtcactttggaaaagttaaagacagtgggagcagctctggacattctgtgtccctctgggcccatcaaaagcctttatcccttgacatttatccaggtgaaacagcattatgggtttgtgctgtaccggacaacacttcctcaagattgcagcaacccagcacctctctcttcacccctcaatggagtccacgatcgagcatatgttgctgtggatgggatcccccagggagtccttgagcgaaacaatgtgatcactctgaacataacagggaaagctggagccactctggaccttctggtagagaacatgggacgtgtgaactatggtgcatatatcaacgattttaagggtttggtttctaacctgactctcagttccaatatcctcacggactggacgatctttccactggacactgaggatgcagtgtgcagccacctggggggctggggacaccgtgacagtggccaccatgatgaagcctgggcccacaactcatccaactacacgctcccggccttttatatggggaacttctccattcccagtgggatcccagacttgccccaggacacctttatccagtttcctggatggaccaagggccaggtctggattaatggctttaaccttggccgctattggccagcccggggccctcagttgaccttgtttgtgccccagcacatcctgatgacctcggccccaaacaccatcaccgtgctggaactggagtgggcaccctgcagcagtgatgatccagaactatgtgctgtgacgttcgtggacaggccagttattggctcatctgtgacctacgatcatccctccaaacctgttgaaaaaagactcatgcccccacccccgcaaaaaaacaaagattcatggctggaccatgtatgatgatgaaagcctgtgtctttgagggattctaccctgaacatacctcacagatcctccctgtcatgccacatttcactgattggaatgtggaaatggaaaaggaatttaggatgtgcattttcacctgaggtttccctgcatccctgcagtgccaaagccccaccttcagggaccacctggaatgtgtgaggggctgacagcacagtaacgtgcatacatatctgcagggctggaatggaagctttaaaggtggtagtgatttttattttggaagaatcatgttacctttttgttaaataaaatttgtactcaaatgatgatgtcactgtttttaatgtgcaggtattgaattatatggtctgacttaaatcataactagacttgagtgggctgaataaaccacttcactaacttgaagttcaaaaggatgg

SEQ ID NO: 1542 - protein, 677 aa, Homosapiens
MPGFLVRILPLLLVLLLLGPTRGLRNATQRMFEIDYSRDSFLKDGQPFRYISGSIHYSRVPRFYWKDRLLKMKMAGLNAIQTYVPWNFHEPWPGQYQFSEDHDVEYFLRLAHELGLLVILRPGPYICAEWEMGGLPAWLLEKESILLRSSDPDYLAAVDKWLGVLLPKMKPLLYQNGGPVITVQVENEYGSYFACDFDYLRFLQKRFRHHLGDDVVLFTTDGAHKTFLKCGALQGLYTTVDFGTGSNITDAFLSQRKCEPKGPLINSEFYTGWLDHWGQPHSTIKTEAVASSLYDILARGASVNLYMFIGGTNFAYWNGANSPYAAQPTSYDYDAPLSEAGDLTEKYFALRNIIQKFEKVPEGPIPPSTPKFAYGKVTLEKLKTVGAALDILCPSGPIKSLYPLTFIQVKQHYGFVLYRTTLPQDCSNPAPLSSPLNGVHDRAYVAVDGIPQGVLERNNVITLNITGKAGATLDLLVENMGRVNYGAYINDFKGLVSNLTLSSNILTDWTIFPLDTEDAVCSHLGGWGHRDSGHHDEAWAHNSSNYTLPAFYMGNFSIPSGIPDLPQDTFIQFPGWTKGQVWINGFNLGRYWPARGPQLTLFVPQHILMTSAPNTITVLELEWAPCSSDDPELCAVTFVDRPVIGSSVTYDHPSKPVEKRLMPPPPQKNKDSWLDHV

SEQ ID NO: 1543 - DNA, 2063 bp, Homosapiens
ggctgctgggccgacgaggggcggtgccaggccgtgggtccttagtcaagtgacgcgaagcggccggcctgggcgccgactgcagagccgggaggctggtggtcatgccggggttcctggttcgcatcctccctctgttgctggttctgctgcttctgggccctacgcgcggcttgcgcaatgccacccagaggatgtttgaaattgactatagccgggactccttcctcaaggatggccagccatttcgctacatctcaggaagcattcactactcccgtgtgccccgcttctactggaaggaccggctgctgaagatgaagatggctgggctgaacgccatccagacattacctggcagctgtggacaagtggttgggagtccttctgcccaagatgaagcctctcctctatcagaatggagggccagttataacagtgcaggcagcaacatcacagatgctttcctaagccagaggaagtgtgagcccaaaggacccttgatcaattctgaattctatactggctggctagatcactggggccaacctcactccacaatcaagaccgaagcagtggcttcctccctctatgatatacttgcccgtggggcgagtgtgaacttgtacatgtttataggtgggaccaattttgcctattggaatggggccaactcaccctatgcagcacagcccaccagctacgactatgatgccccactgagtgaggctggggacctcactgagaagtattttgctctgcgaaacatcatccagaagtttgaaaaagtaccagaaggtcctatccctccatctacaccaaagtttgcatatggaaaggtcactttggaaaagttaaagacagtgggagcagctctggacattctgtgtccctctgggcccatcaaaagcctttatcccttgacatttatccaggtgaaacagcattatgggtttgtgctgtaccggacaacacttcctcaagattgcagcaacccagcacctctctcttcacccctcaatggagtccacgatcgagcatatgttgctgtggatgggatcccccagggagtccttgagcgaaacaatgtgatcactctgaacataacagggaaagctggagccactctggaccttctggtagagaacatgggacgtgtgaactatggtgcatatatcaacgattttaagggtttggtttctaacctgactctcagttccaatatcctcacggactggacgatctttccactggacactgaggatgcagtgtgcagccacctggggggctggggacaccgtgacagtggccaccatgatgaagcctgggcccacaactcatccaactacacgctcccggccttttatatggggaacttctccattcccagtgggatcccagacttgccccaggacacctttatccagtttcctggatggaccaagggccaggtctggattaatggctttaaccttggccgctattggccagcccggggccctcagttgaccttgtttgtgccccagcacatcctgatgacctcggccccaaacaccatcaccgtgctggaactggagtgggcaccctgcagcagtgatgatccagaactatgtgctgtgacgttcgtggacaggccagttattggctcatctgtgacctacgatcatccctccaaacctgttgaaaaaagactcatgcccccacccccgcaaaaaaacaaagattcatggctggaccatgtatgatgatgaaagcctgtgtctttgagggattctaccctgaacatacctcacagatcctccctgtcatgccacatttcactgattggaatgtggaaatggaaaaggaatttaggatgtgcattttcacctgaggtttccctgcatccctgcagtgccaaagccccaccttcagggaccacctggaatgtgtgaggggctgacagcacagtaacgtgcatacatatctgcagggctggaatggaagctttaaaggtggtagtgatttttattttggaagaatcatgttacctttttgttaaataaaatttgtactcaaatgat

SEQ ID NO: 1544 - protein, 546 aa, Homosapiens; identical to SEQ ID NO: 1540

SEQ ID NO: 1545 - DNA, 2496 bp, Homosapiens
acagcggggcggggcgcggggctgagcaggcgcgagggctggctgctgggccgacgaggggcggtgccaggccgtgggtccttagtcaagtgacgcgaagcggccggcctgggcgccgactgcagagccgggaggctggtggtcatgccggggttcctggttcgcatcctccctctgttgctggttctgctgcttctgggccctacgcgcggcttgcgcaatgccacccagaggatgtttgaaattgactatagccgggactccttcctcaaggatggccagccatttcgctacatctcaggaagcattcactactcccgtgtgccccgcttctactggaaggaccggctgctgaagatgaagatggctgggctgaacgccatccagacgtatgtgccctggaactttcatgagccctggccaggacagtaccagttttctgaggaccatgatgtggaatattttcttcggctggctcatgagctgggactgctggttatcctgaggcccgggccctacatctgtgcagagtgggaaatgggaggattacctgcttggctgctagagaaagagtctattcttctccgctcctccgacccagattacctggcagctgtggacaagtggttgggagtccttctgcccaagatgaagcctctcctctatcagaatggagggccagttataacagtgcaggttgaaaatgaatatggcagctactttgcctgtgattttgactacctgcgcttcctgcagaagcgctttcgccaccatctgggggatgatgtggttctgtttaccactgatggagcacataaaacattcctgaaatgtggggccctgcagggcctctacaccacggtggactttggaacaggcagcaacatcacagatgctttcctaagccagaggaagtgtgagcccaaaggacccttgatcaattctgaattctatactggctggctagatcactggggccaacctcactccacaatcaagaccgaagcagtggcttcctccctctatgatatacttgcccgtggggcgagtgtgaacttgtacatgtttataggtgggaccaattttgcctattggaatggggccaactcaccctatgcagcacagcccaccagctacgactatgatgccccactgagtgaggctggggacctcactgagaagtattttgctctgcgaaacatcatccagaagtttgaaaaagtaccagaaggtcctatccctccatctacaccaaagtttgcatatggaaaggtcactttggaaaagttaaagacagtgggagcagctctggacattctgtgtccctctgggcccatcaaaagcctttatcccttgacatttatccaggtgaaacagcattatgggtttgtgctgtaccggacaacacttcctcaagattgcagcaacccagcacctctctcttcacccctcaatggagtccacgatcgagcatatgttgctgtggatgggatcccccagggagtccttgagcgaaacaatgtgatcactctgaacataacagggaaagctggagccactctggaccttctggtagagaacatgggacgtgtgaactatggtgcatatatcaacgattttaagggtttggtttctaacctgactctcagttccaatatcctcacggactggacgatctttccactggacactgaggatgcagtgtgcagccacctggggggctggggacaccgtgacagtggccaccatgatgaagcctgggcccacaactcatccaactacacgctcccggccttttatatggggaacttctccattcccagtgggatcccagacttgccccaggacacctttatccagtttcctggatggaccaagggccaggtctggattaatggctttaaccttggccgctattggccagcccggggccctcagttgaccttgtttgtgccccagcacatcctgatgacctcggccccaaacaccatcaccgtgctggaactggagtgggcaccctgcagcagtgatgatccagaactatgtgctgtgacgttcgtggacaggccagttattggctcatctgtgacctacgatcatccctccaaacctgttgaaaaaagactcatgcccccacccccgcaaaaaaacaaagattcatggctggaccatgtatgatgatgaaagcctgtgtctttgagggattctaccctgaacatacctcacagatcctccctgtcatgccacatttcactgattggaatgtggaaatggaaaaggaatttaggatgtgcattttcacctgaggtttccctgcatccctgcagtgccaaagccccaccttcagggaccacctggaatgtgtgaggggctgacagcacagtaacgtgcatacatatctgcagggctggaatggaagctttaaaggtggtagtgatttttattttggaagaatcatgttacctttttgttaaataaaatttgtactcaaatgat

SEQ ID NO: 1546 - protein, 677 aa, Homosapiens; identical to SEQ ID NO: 1542

SEQ ID NO: 1547 - DNA, 347 bp, Homosapiens
aggcatcatcacaggtccagatgaacacacgaccatcccaggagcagctggcaatggtgctggtgggcaggctgatggagggggcccaggccacatctcaaacccagtcactgtgcttccagcttctgctctccttccactggccatccttgaagaggttgtcacagccacctgatggaaacttcttgatgtaattgggtttctgcctgaacagctggtctatgaggcttccagggattccatcaacgtaagagttccgctgatgttttggaaatgggtcactgtagaaattaatcaagtggtagtgaggaccttgataattggagtggattctgggattcccaaag

SEQ ID NO: 1548 - protein, 57 aa, Homosapiens
MNTRPSQEQLAMVLVGRLMEGAQATSQTQSLCFQLLLSFHWPSLKRLSQPPDGNFLM

SEQ ID NO: 1549 - DNA, 1326 bp, Homosapiens
caggttgaaaatgaatatggcagctactttgcctgtgattttgactacctgcgcttcctgcagaagcgctttcgccaccatctgggggatgatgtggttctgtttaccactgatggagcacataaaacattcctgaaatgtggggccctgcagggcctctacaccacggtggactttggaacaggcagcaacatcacagatgctttcctaagccagaggaagtgtgagcccaaaggacccttgatcaattctgaattctatactggctggctagatcactggggccaacctcactccacaatcaagaccgaagcagtggcttcctccctctatgatatacttgcccgtggggcgagtgtgaacttgtacatgtttataggtgggaccaattttgcctattggaatggggccaactcaccctatgcagcacagcccaccagctacgactatgatgccccactgagtgaggctggggacctcactgagaagtattttgctctgcgaaacatcatccagaaggtgggtgctttgtatgagctgtggtgggctgatcttggacagagcctcttttgaactcactgtggctctgtggacaacttcctgcctggagccctcctgtttaaaaggatggatgaagggaggcatcagctagacttgggtttgcatcttgtacccacgtggttaagagtgagtctatgagcagatgcttataggagagtaggagatataagacatgtatttaaaaactgcaatatataatacagtgttaaatgctacttacagattcacttcttatatggtgagaattcacccggggaaatttctgtctccattttcttctccttccaggccagattatctttccaaaagttcaggtgagaggtagggtgatgggagagaatgcacagatcctcttgagactatagcccctattaaggcagcatggatatatgggagcccctatccttgagacacagctaatgtacttcaatatcaaaagaggtaaagctaagctctggtttctttatttaatgcatcatctgaaaaaagtaagtttccagtaaccaaagtgtataagaattatttctcactagaaaataactccgtccttatttgcaagagagaagaagataaactattttcctttttatgtgtggcccaatatacagactatgtgatttcagaatgaggaacaccagattttgaacctggacactatttcttcaaccttaagccaattgtgtaaattccctttatataaaagtagaggtagccgtacttacctcacagacttgtacagtttaaaaataaatggcactcaataaa

SEQ ID NO: 1550 - protein, 67 aa, Homosapiens
MFIGGTNFAYWNGANSPYAAQPTSYDYDAPLSEAGDLTEKYFALRNIIQKVGALYELWWADLGQSLF

SEQ ID NO: 1551 - DNA, 965 bp, Homosapiens
acagcggggcggggcgcggggctgagcaggcgcgagggctggctgctgggccgacgaggggcggtgccaggccgtgggtccttagtcaagtgacgcgaagcggccggcctgggcgccgactgcagagccgggaggctggtggtcatgccggggttcctggttcgcatcctccctctgttgctggttctgctgcttctgggccctacgcgcggcttgcgcaatgccacccagaggatgtttgaaattgactatagccgggactccttcctcaaggatggccagccatttcgctacatctcaggaagcattcactactcccgtgtgccccgcttctactggaaggaccggctgctgaagatgaagatggctgggctgaacgccatccagacgtatgtgccctggaactttcatgagccctggccaggacagtaccagttttctgaggaccatgatgtggaatattttcttcggctggctcatgagctgggactgctggttatcctgaggcccgggccctacatctgtgcagagtgggaaatgggaggattacctgcttggctgctagagaaagagtctattcttctccgctcctccgacccagattacctggcagctgtggacaagtggttgggagtccttctgcccaagatgaagcctctcctctatcagaatggagggccagttataacagtgcaggttgaaaatgaatatggcagctactttgcctgtgattttgactacctgcgcttcctgcagaagcgctttcgccaccatctgggggatgatgtggttctgtttaccactgatggagcacataaaacattcctgaaatgtggggccctgcagggcctctacaccacggtggactttggaacaggcagcaacatcacagatgctttcctaagccagaggaagtgtgagcccaaaggacccttgatcaattctgaattctatactggctggct

SEQ ID NO: 1552 - protein, 272 aa, Homosapiens
MPGFLVRILPLLLVLLLLGPTRGLRNATQRMFEIDYSRDSFLKDGQPFRYISGSIHYSRVPRFYWKDRLLKMKMAGLNAIQTYVPWNFHEPWPGQYQFSEDHDVEYFLRLAHELGLLVILRPGPYICAEWEMGGLPAWLLEKESILLRSSDPDYLAAVDKWLGVLLPKMKPLLYQNGGPVITVQVENEYGSYFACDFDYLRFLQKRFRHHLGDDVVLFTTDGAHKTFLKCGALQGLYTTVDFGTGSNITDAFLSQRKCEPKGPLINSEFYTG

SEQ ID NO: 1553 - DNA, 1293 bp, Homosapiens
ctggggacaggctgcttttccctatttggagataaggaaaccaaggcaaagagagatagggcacaggcagtatgacaagatatattgttttgtcaggagggatccatcaagccttgtgcatgagttccacatggcacagcgtgcacagtaaacactcaatgttaatttttcaacgttccagtggagcttgctaaggaactctgttgggcacaggtgcccagaggattcatggagcagccagtcctggggaatgtgagtgggtagcgagctgcctgctgctggggcaggtgatgtgtcaaagcagcaactgctaggggtttgccttccttccctcatgtgcattctggcaggcaaagggggtttcttcctttcctccttgtcctcctggtgtatagtggggttctgggggatctggagaccaccctttttgttcccaggcagccacggtattgacagtgggccataccatgcagtttaaaatgtatctttgagttgaaattttggtggtttccttattcttttttctctcttcactgtccttccaaactcacttttcttgtgtcccgaccgcattttgtgaatcatccttactccctttaagttctcgctttggatttcaccaggtgggctagatggtgccatttcacttccactgtttgatgcggctggtaatgtttgactcacctgttacgtgttatttcactggtttcttgattttacatctttctcatcagtgacctgggcttgatgaaattagctttcattaagtcctattttttttttaattttgcatccttacctcttttctttctcttgaatgccatcattgtgtggtcttatgtacccttcatccactctgaagtccttgcttgactgattgctttctattagcagaaagaaaacaggtccatcctatgtatctgagaaacaacatcaacaccctctcgtatgtggtttgtattccctgacgcggcggacatttttgcagcagaaatttctccatcactgtccagattctggccctggtgggcaggtctccatgacacctttagtccctttgttcaacattcttaaaccatggacctttttgtttgtttgtggccgggggaggtggtgagaaacgttacttgaagcttgatcattctttcaatttcatttgtttctttatttttaatctgttagatgcaaattgaaatgcaatgctttttgaaaatcagcaatagtgtctgtagtatatgatgctgtcacaaaatctcaataaattgatcctgctgccattccttccaaataccc

SEQ ID NO: 1554 - protein, 40 aa, Homosapiens
MTRYIVLSGGIHQALCMSSTWHSVHSKHSMLIFQRSSGAC

SEQ ID NO: 1555 - DNA, 3455 bp, Homosapiens
agctcggtcgcttgtgcgttccgctccggccgccctttgcgcttggatccacttccccatctgtaacgaggtgttgagacgagcggcatggagcaggcctaccagctcttggcctggcgcagtggtagggtcgtgggcagccttgagaagacaaggaagctcgtgctcaggcctgccctggcagtgggagtgactgctgtgctcagcgtggccgggattctgaatgccgcgcagcccccggctgtgaaaactgtggaggtgcccatccatcagctgcctgcctcaatgaacaacctcaagatcgtgctcctctcagacattcacttgggccccacagtgggcaggaccaagatggaaatgtttgtgaggatggtgaatgtgctggaaccagacatcacggtgattgtgggtgacctctccgactcagaagcctcggtcctgcggacggctgtcgctcctctgggccagcttcattcacatctcggtgcctacttcgtcacaggcaatcatgagtactacacgtcagatgtcagcaactggtttgcacttctggaatccctgcatgtccagcctcttcataatgagaacgtgaagatttccgccacacgggcccaacgtggtggtggtggcagtggcagtgggagtgaggatgaggactggatctgcttggctggggtggacgatattgaagcagacatcctgcactactctggccatggcatggatcttgacaaggccctggagggctgcagcccagaccacacaatcatcttgctagctcaccagcccctggctgccaagagagctctccaggctcggccagatattaacctgatcctttctgggcacacacatgctgggcagatcttccccttgaacgtagcagcctatctcctgaatcccttctttgctggtctctaccaggtggcccaggctacattcgtgtatgtcagcccaggcacagcctactacgggatacccatgaggctgggtagcagggccgagatcacagagctcatcctgcagcggtctccctgaactggccctgccctgtgcacctctgccctgcccttgtcctcgaccctccatcctgcttcagagtggtttgcctgcttttcccctccagccttgcccactcatccttgcctacacacccttggtcacaagcctgactcaaacagtgacttatggtgggcctgcctggcatgttcaggctggtttaactatttccttggccagttgctttttttgatgcacttgtgagatcactaaggtcacatatattagcactcccctctattttccagatgatgtggaatggggaccttctcctgcagagctcccagggatgaacctcccctcggggttgctagaaaggcatacctctagaaggtggggcggggaggagcaggagcatttttctcctggtgttttaaaattgtctttaggacttaagtggtttccagaatcattgatccagagcctttctggggaaggggtagtgttgccaggtaatttgggagaacaggcaagatggaagggccctctggctgctagagaagaatattttcttttcctctgattctatcaggatcacctctattgagggcatcagcaaaatctactggaatgcaaagctcctcctgttccaggccttgagggatgctatttaactgtctgtgctcctgggcctttgggggcaaggtcaggggagaagaacggtgggcgccatggtcggtgatggtgagaacatggctgcttaggaattcagagggctttgcctcccttgtctcattttatacaacccttcggggagctcactggggacaggctgcttttccctatttggagataaggaaaccaaggcaaagagagatagggcacaggcagtatgacaagatatgtaggagatttggggctagaaaccaggtcttgtacctcccagtaaaagcggtgcttttgcccttttgccagaagcaatagatcctttgatcctgagatggagataagcacccgtgttagaaaaggcctcactgagaagacagggctgggctggtttcctgctgggtgatttaggcttgtgatggaaagtcttcctccaatggggagtgaagacactcgctctgactggagaggctaaccctgctgctcactcatagggcagcgttgggtgggtgactttccctcactcagccttggtttccatcaaccctaaaatggggataattatcgtatctacctcaagattgttttgtcaggagggatccatcaagccttgtgcatgagttccacatggcacagcgtgcacagtaaacactcaatgttaatttttcaacgttccagtggagcttgctaaggaactctgttgggcacaggtgcccagaggattcatggagcagccagtcctggggaatgtgagtgggtagcgagctgcctgctgctggggcaggtgatgtgtcaaagcagcaactgctaggggtttgccttccttccctcatgtgcattctggcaggcaaagggggtttcttcctttcctccttgtcctcctggtgtatagtggggttctgggggatctggagaccaccctttttgttcccaggcagccacggtattgacagtgggccataccatgcagtttaaaatgtatctttgagttgaaattttggtggtttccttattcttttttctctcttcactgtccttccaaactcacttttcttgtgtcccgaccgcattttgtgaatcatccttactccctttaagttctcgctttggatttcaccaggtgggctagatggtgccatttcacttccactgtttgatgcggctggtaatgtttgactcacctgttacgtgttatttcactggtttcttgattttacatctttctcatcagtgacctgggcttgatgaaattagctttcattaagtcctattttttttttaattttgcatccttacctcttttctttctcttgaatgccatcattgtgtggtcttatgtacccttcatccactctgaagtccttgcttgactgattgctttctattagcagaaagaaaacaggtccatcctatgtatctgagaaacaacatcaacaccctctcgtatgtggtttgtattccctgacgcggcggacatttttgcagcagaaatttctccatcactgtccagattctggccctggtgggcaggtctccatgacacctttagtccctttgttcaacattcttaaaccatggacctttttgtttgtttgtggccgggggaggtggtgagaaacgttacttgaagcttgatcattctttcaatttcatttgtttctttatttttaatctgttagatgcaaattgaaatgcaatgctttttgaaaatcagcaatagtgtctgtagtatatgatgctgtcacaaaatctcaataaattgatcctgctgccattccttccaaataccc

SEQ ID NO: 1556 - protein, 316 aa, Homosapiens
MEQAYQLLAWRSGRVVGSLEKTRKLVLRPALAVGVTAVLSVAGILNAAQPPAVKTVEVPIHQLPASMNNLKIVLLSDIHLGPTVGRTKMEMFVRMVNVLEPDITVIVGDLSDSEASVLRTAVAPLGQLHSHLGAYFVTGNHEYYTSDVSNWFALLESLHVQPLHNENVKISATRAQRGGGGSGSGSEDEDWICLAGVDDIEADILHYSGHGMDLDKALEGCSPDHTIILLAHQPLAAKRALQARPDINLILSGHTHAGQIFPLNVAAYLLNPFFAGLYQVAQATFVYVSPGTAYYGIPMRLGSRAEITELILQRSP

SEQ ID NO: 1557 - DNA, 3992 bp, Homosapiens
cggggcgcgcgtccttccaggcagctcggtcgcttgtgcgttccgctccggccgccctttgcgcttggatccacttccccatctgtaacgaggtgttgagacgaggcggagttgacctggaaacctctccttggccactgtcctttctaaggaactcatttccagagtccaccagcacagaactggtgggggagcctactaggagcagagaaaatggccatcttcaggcagctgtccctaggcgcgaaggccaccctggctgctgtcactgtcttcgtgtccatgatcgcctcccgctcgtatctggcagagagccttgagctcagggcctggcgttggctgcttcgcttgcagcttgccctgtttgtcaactcgctcttgctcattggctccctctacatttggcgcagcacagtgagcaacctctgccactccccagctgcagagtcaacctgttttcagctttggaaggtggtggttctggcatttctggccctggcccattccagtttctttaccatgttctttttagtggccgaagagccctatctcttttccttggcggcctactcctgcctgggtgcttacatcatcatgctcttcttcctcttcatcctcagcggcatggagcaggcctaccagctcttggcctggcgcagtggtagggtcgtgggcagccttgagaagacaaggaagctcgtgctcaggcctgccctggcagtgggagtgactgctgtgctcagcgtggccgggattctgaatgccgcgcagcccccggctgtgaaaactgtggaggtgcccatccatcagctgcctgcctcaatgaacaacctcaagatcgtgctcctctcagacattcacttgggccccacagtgggcaggaccaagatggaaatgtttgtgaggatggtgaatgtgctggaaccagacatcacggtgattgtgggtgacctctccgactcagaagcctcggtcctgcggacggctgtcgctcctctgggccagcttcattcacatctcggtgcctacttcgtcacaggcaatcatgagtactacacgtcagatgtcagcaactggtttgcacttctggaatccctgcatgtccagcctcttcataatgagaacgtgaagatttccgccacacgggcccaacgtggtggtggtggcagtggcagtgggagtgaggatgaggactggatctgcttggctggggtggacgatattgaagcagacatcctgcactactctggccatggcatggatcttgacaaggccctggagggctgcagcccagaccacacaatcatcttgctagctcaccagcccctggctgccaagagagctctccaggctcggccagatattaacctgatcctttctgggcacacacatgctgggcagatcttccccttgaacgtagcagcctatctcctgaatcccttctttgctggtctctaccaggtggcccaggctacattcgtgtatgtcagcccaggcacagcctactacgggatacccatgaggctgggtagcagggccgagatcacagagctcatcctgcagcggtctccctgaactggccctgccctgtgcacctctgccctgcccttgtcctcgaccctccatcctgcttcagagtggtttgcctgcttttcccctccagccttgcccactcatccttgcctacacacccttggtcacaagcctgactcaaacagtgacttatggtgggcctgcctggcatgttcaggctggtttaactatttccttggccagttgctttttttgatgcacttgtgagatcactaaggtcacatatattagcactcccctctattttccagatgatgtggaatggggaccttctcctgcagagctcccagggatgaacctcccctcggggttgctagaaaggcatacctctagaaggtggggcggggaggagcaggagcatttttctcctggtgttttaaaattgtctttaggacttaagtggtttccagaatcattgatccagagcctttctggggaaggggtagtgttgccaggtaatttgggagaacaggcaagatggaagggccctctggctgctagagaagaatattttcttttcctctgattctatcaggatcacctctattgagggcatcagcaaaatctactggaatgcaaagctcctcctgttccaggccttgagggatgctatttaactgtctgtgctcctgggcctttgggggcaaggtcaggggagaagaacggtgggcgccatggtcggtgatggtgagaacatggctgcttaggaattcagagggctttgcctcccttgtctcattttatacaacccttcggggagctcactggggacaggctgcttttccctatttggagataaggaaaccaaggcaaagagagatagggcacaggcagtatgacaagatatgtaggagatttggggctagaaaccaggtcttgtacctcccagtaaaagcggtgcttttgcccttttgccagaagcaatagatcctttgatcctgagatggagataagcacccgtgttagaaaaggcctcactgagaagacagggctgggctggtttcctgctgggtgatttaggcttgtgatggaaagtcttcctccaatggggagtgaagacactcgctctgactggagaggctaaccctgctgctcactcatagggcagcgttgggtgggtgactttccctcactcagccttggtttccatcaaccctaaaatggggataattatcgtatctacctcaagattgttttgtcaggagggatccatcaagccttgtgcatgagttccacatggcacagcgtgcacagtaaacactcaatgttaatttttcaacgttccagtggagcttgctaaggaactctgttgggcacaggtgcccagaggattcatggagcagccagtcctggggaatgtgagtgggtagcgagctgcctgctgctggggcaggtgatgtgtcaaagcagcaactgctaggggtttgccttccttccctcatgtgcattctggcaggcaaagggggtttcttcctttcctccttgtcctcctggtgtatagtggggttctgggggatctggagaccaccctttttgttcccaggcagccacggtattgacagtgggccataccatgcagtttaaaatgtatctttgagttgaaattttggtggtttccttattcttttttctctcttcactgtccttccaaactcacttttcttgtgtcccgaccgcattttgtgaatcatccttactccctttaagttctcgctttggatttcaccaggtgggctagatggtgccatttcacttccactgtttgatgcggctggtaatgtttgactcacctgttacgtgttatttcactggtttcttgattttacatctttctcatcagtgacctgggcttgatgaaattagctttcattaagtcctattttttttttaattttgcatccttacctcttttctttctcttgaatgccatcattgtgtggtcttatgtacccttcatccactctgaagtccttgcttgactgattgctttctattagcagaaagaaaacaggtccatcctatgtatctgagaaacaacatcaacaccctctcgtatgtggtttgtattccctgacgcggcggacatttttgcagcagaaatttctccatcactgtccagattctggccctggtgggcaggtctccatgacacctttagtccctttgttcaacattcttaaaccatggacctttttgtttgtttgtggccgggggaggtggtgagaaacgttacttgaagcttgatcattctttcaatttcatttgtttctttatttttaatctgttagatgcaaattgaaatgcaatgctttttgaaaatcagcaatagtgtctgtagtatatgatgctgtcacaaaatctcaataaattgatcctgctgccattccttccaaataccc

SEQ ID NO: 1558 - protein, 453 aa, Homosapiens
MAIFRQLSLGAKATLAAVTVFVSMIASRSYLAESLELRAWRWLLRLQLALFVNSLLLIGSLYIWRSTVSNLCHSPAAESTCFQLWKVVVLAFLALAHSSFFTMFFLVAEEPYLFSLAAYSCLGAYIIMLFFLFILSGMEQAYQLLAWRSGRVVGSLEKTRKLVLRPALAVGVTAVLSVAGILNAAQPPAVKTVEVPIHQLPASMNNLKIVLLSDIHLGPTVGRTKMEMFVRMVNVLEPDITVIVGDLSDSEASVLRTAVAPLGQLHSHLGAYFVTGNHEYYTSDVSNWFALLESLHVQPLHNENVKISATRAQRGGGGSGSGSEDEDWICLAGVDDIEADILHYSGHGMDLDKALEGCSPDHTIILLAHQPLAAKRALQARPDINLILSGHTHAGQIFPLNVAAYLLNPFFAGLYQVAQATFVYVSPGTAYYGIPMRLGSRAEITELILQRSP

SEQ ID NO: 1559 - DNA, 539 bp, Homosapiens
atcactcaattgaacaagatactaagctctggccacagcttcttcctctgtcttgcccttgccttaccaactcctgccaaagagcctttgcccagggctgttatttcagatttgggaggccacctcagcctcccaaagtgttgggattacaggtgtgagccaccatgcctagccaattcaacagaatttgtaaaaggaaatgaaaccagatgtctagtgtggctgccttctgcttgagtggctggttagcctcattagagctttgtctaagggtgtctcctcaccaaagaaggcaatgttcccccaggtgacttaagtgacaaattctcttttatatcgtgaatttattcattctttcagtacactgttcagcatctaccttttaccaggtcctgcacttggtgctgaaatgcaaagatgaaacagacatacttccttgactgtgtagtagaggaaatgcaatatttatttattgtttcatttgttacataaacctatagcgaattgtattccagatgctatattaaagaaatgatatc

SEQ ID NO: 1560 - protein, 33 aa, Homosapiens
MSSVAAFCLSGWLASLELCLRVSPHQRRQCSPR

SEQ ID NO: 1561 - DNA, 855 bp, Homosapiens
gaggctggcgtccccgccccgaaagcactgggcccgccgcgtcgcaccgtcctctttcctttccttctccctccccttttcccttccttcgtcccttccttccttcctttcgccgggcgcgatggagccggggcgccggggggccgcggcgctgctagcgctgctgtgcgtggcctgcgcgctgcgcgccgggcgcgcccaatacgaacgctacagcttccgcagcttcccacgggacgagctgatgccgctcgagtcggcctaccggcacgcgctggacaagtacagcggcgagcactgggccgagagcgtgggctacctggagatcagcctgcggctgcaccgcttgctgcgcgacagcgaggccttctgccaccgcaactgcagcgccgcgccgcagcccgagcccgccgccggcctcgccagctatcccgagctgcgcctcttcgggggcctgctgcgccgcgcgcactgcctcaagcgctgcaagcagggcctgccagccttccgccagtcccagcccagccgcgaggtgctggcggacttccagcgccgcgagccctacaagttcctgcagttcgcttacttcaaggcaaataatctccccaaagccatcgccgctgctcacacctttctactgaagcatcctgatgacgaaatgatgaagaggaacatggcatattataagagcctgcctggtgccgaggactacattaaagacctggaaaccaagtcatatgaagtatgtttggatttttatgtggcagttagtggcaacctggactgttaaagaaatgtctctccataagcagctgctgatagctaaggacctctagtgatttttggtgacatttg

SEQ ID NO: 1562 - protein, 222 aa, Homosapiens
MEPGRRGAAALLALLCVACALRAGRAQYERYSFRSFPRDELMPLESAYRHALDKYSGEHWAESVGYLEISLRLHRLLRDSEAFCHRNCSAAPQPEPAAGLASYPELRLFGGLLRRAHCLKRCKQGLPAFRQSQPSREVLADFQRREPYKFLQFAYFKANNLPKAIAAAHTFLLKHPDDEMMKRNMAYYKSLPGAEDYIKDLETKSYEVCLDFYVAVSGNLDC

SEQ ID NO: 1563 - DNA, 1940 bp, Homosapiens
gaggctggcgtccccgccccgaaagcactgggcccgccgcgtcgcaccgtcctctttcctttccttctccctccccttttcccttccttcgtcccttccttccttcctttcgccgggcgcgatggagccggggcgccggggggccgcggcgctgctagcgctgctgtgcgtggcctgcgcgctgcgcgccgggcgcgcccaatacgaacgctacagcttccgcagcttcccacgggacgagctgatgccgctcgagtcggcctaccggcacgcgctggacaagtacagcggcgagcactgggccgagagcgtgggctacctggagatcagcctgcggctgcaccgcttgctgcgcgacagcgaggccttctgccaccgcaactgcagcgccgcgccgcagcccgagcccgccgccggcctcgccagctatcccgagctgcgcctcttcgggggcctgctgcgccgcgcgcactgcctcaagcgctgcaagcagggcctgccagccttccgccagtcccagcccagccgcgaggtgctggcggacttccagcgccgcgagccctacaagttcctgcagttcgcttacttcaaggcaaataatctccccaaagccatcgccgctgctcacacctttctactgaagcatcctgatgacgaaatgatgaagaggaacatggcatattataagagcctgcctggtgccgaggactacattaaagacctggaaaccaagtcatatgaaagcctgttcatccgagcagtgcgggcatacaacggtgagaactggagaacatccatcacagacatggagctggcccttcccgacttcttcaaagccttttacgagtgtctcgcagcctgcgagggttccagggagatcaaggacttcaaggatttctacctttccatagcagtgaacgacctgaagaatgcagccccctgtgcagtcagctatctgctctttgatcagaatgacaaggtcatgcagcagaacctggtgtattaccagtaccacagggacacttggggcctctcggatgagcacttccagcccagacctgaagcagttcagttctttaatgtgaccacactccagaaggagctgtatgactttgctaaggaaaatataatggatgatgatgagggagaagttgtggaatatgtggatgacctcttggaactggaggagaccagctagcccacagcaaccaaagagacttcctcttggcgttcaggaaacacagattctttgtccttttcccaacagcccaggctgttgatacctcagagccttctctttactctccaaagtgaaagggaagcccccgtctctctaactgcatgtcatcaggggtgagcctgcctttcctatcttcacacctgccacctcatgttcacacctatctttctcaccttttttttgagatggagtctcgctctcttgcccaggctggagtgcaatggcacgttctcagctcactgcaacctccgcctcttgggttcaagcaattctgctgcatcagcctcccgagtacctgggattacaggcatgtgccaccacgcccggctaattttgtatttttagtagagacggggttttgccatgttggccaggctggtctcgaactcttgacttcagatgatccatctgccttggcctcccacagtgctgggattacaggcgtgagccaccatgcccggcctctttctcacctttacacctgtcttcttatcctcacatctgttttcacaccttcatccctgtcttcctcatgttcacacttgtcttccccatgttcatagctgcctttcttaccattttggtttgaagggcagtcttctctggcttgtttttttgtttttcccagaaaatcagtattattttttaaataagaaaaacattcctagaagatgataattgtgaaaacctcctttggctt

SEQ ID NO: 1564 - protein, 358 aa, Homosapiens
MEPGRRGAAALLALLCVACALRAGRAQYERYSFRSFPRDELMPLESAYRHALDKYSGEHWAESVGYLEISLRLHRLLRDSEAFCHRNCSAAPQPEPAAGLASYPELRLFGGLLRRAHCLKRCKQGLPAFRQSQPSREVLADFQRREPYKFLQFAYFKANNLPKAIAAAHTFLLKHPDDEMMKRNMAYYKSLPGAEDYIKDLETKSYESLFIRAVRAYNGENWRTSITDMELALPDFFKAFYECLAACEGSREIKDFKDFYLSIAVNDLKNAAPCAVSYLLFDQNDKVMQQNLVYYQYHRDTWGLSDEHFQPRPEAVQFFNVTTLQKELYDFAKENIMDDDEGEVVEYVDDLLELEETS

SEQ ID NO: 1565 - DNA, 1984 bp, Homosapiens
gaggctggcgtccccgccccgaaagcactgggcccgccgcgtcgcaccgtcctctttcctttccttctccctccccttttcccttccttcgtcccttccttccttcctttcgccgggcgcgatggagccggggcgccggggggccgcggcgctgctagcgctgctgtgcgtggcctgcgcgctgcgcgccgggcgcgcccaatacgaacgctacagcttccgcagcttcccacgggacgagctgatgccgctcgagtcggcctaccggcacgcgctggacaagtacagcggcgagcactgggccgagagcgtgggctacctggagatcagcctgcggctgcaccgcttgctctgcgcctcttcgggggcctgctgcgccgcgcgcactgcctcaagcgctgcaagcagggcctgccagccttccgccagtcccagcccagccgcgaggtgctggcggacttccagcgccgcgagccctacaagttcctgcagttcgcttacttcaaggcaaataatctccccaaagccatcgccgctgctcacacctttctactgaagcatcctgatgacgaaatgatgaagaggaacatggcatattataagagcctgcctggtgccgaggactacattaaagacctggaaaccaagtcatatgaaagcctgttcatccgagcagtgcgggcatacaacggtgagaactggagaacatccatcacagacatggagctggcccttcccgacttcttcaaagccttttacgagtgtctcgcagcctgcgagggttccagggagatcaaggacttcaaggatttctacctttccatagcagatcattatgtagaagttctggaatgcaaaatacagtgtgaagagaacctcaccccagttataggaggctatccggttgagaaatttgtggctaccatgtatcattacttgcagtttgcctattataagttgaacgacctgaagaatgcagccccctgtgcagtcagctatctgctctttgatcagaatgacaaggtcatgcagcagaacctggtgtattaccagtaccacagggacacttggggcctctcggatgagcacttccagcccagacctgaagcagttcagttctttaatgtgaccacactccagaaggagctgtatgactttgctaaggaaaatataatggatgatgatgagggagaagttgtggaatatgtggatgacctcttggaactggaggagaccagctagcccacagcaaccaaagagacttcctcttggcgttcaggaaacacagattctttgtccttttcccaacagcccaggctgttgatacctcagagccttctctttactctccaaagtgaaagggaagcccccgtctctctaactgcatgtcatcaggggtgagcctgcctttcctatcttcacacctgccacctcatgttcacacctatctttctcaccttttttttgagatggagtctcgctctcttgcccaggctggagtgcaatggcacgttctcagctcactgcaacctccgcctcttgggttcaagcaattctgctgcatcagcctcccgagtacctgggattacaggcatgtgccaccacgcccggctaattttgtatttttagtagagacggggttttgccatgttggccaggctggtctcgaactcttgacttcagatgatccatctgccttggcctcccacagtgctgggattacaggcgtgagccaccatgcccggcctctttctcacctttacacctgtcttcttatcctcacatctgttttcacaccttcatccctgtcttcctcatgttcacacttgtcttccccatgttcatagctgcctttcttaccattttggtttgaagggcagtcttctctggcttgtttttttgtttttcccagaaaatcagtattattttttaaataagaaaaacattcctagaagatgataattgtgaaaacctcctttggctt

SEQ ID NO: 1566 - protein, 222 aa, Homosapiens
MMKRNMAYYKSLPGAEDYIKDLETKSYESLFIRAVRAYNGENWRTSITDMELALPDFFKAFYECLAACEGSREIKDFKDFYLSIADHYVEVLECKIQCEENLTPVIGGYPVEKFVATMYHYLQFAYYKLNDLKNAAPCAVSYLLFDQNDKVMQQNLVYYQYHRDTWGLSDEHFQPRPEAVQFFNVTTLQKELYDFAKENIMDDDEGEVVEYVDDLLELEETS

SEQ ID NO: 1567 - DNA, 2069 bp, Homosapiens
gaggctggcgtccccgccccgaaagcactgggcccgccgcgtcgcaccgtcctctttcctttccttctccctccccttttcccttccttcgtcccttccttccttcctttcgccgggcgcgatggagccggggcgccggggggccgcggcgctgctagcgctgctgtgcgtggcctgcgcgctgcgcgccgggcgcgcccaatacgaacgctacagcttccgcagcttcccacgggacgagctgatgccgctcgagtcggcctaccggcacgcgctggacaagtacagcggcgagcactgggccgagagcgtgggctacctggagatcagcctgcggctgcaccgcttgctgcgcgacagcgaggccttctgccaccgcaactgcagcgccgcgccgcagcccgagcccgccgccggcctcgccagctatcccgagctgcgcctcttcgggggcctgctgcgccgcgcgcactgcctcaagcgctgcaagcagggcctgccagccttccgccagtcccagcccagccgcgaggtgctggcggacttccagcgccgcgagccctacaagttcctgcagttcgcttacttcaaggcaaataatctccccaaagccatcgccgctgctcacacctttctactgaagcatcctgatgacgaaatgatgaagaggaacatggcatattataagagcctgcctggtgccgaggactacattaaagacctggaaaccaagtcatatgaaagcctgttcatccgagcagtgcgggcatacaacggtgagaactggagaacatccatcacagacatggagctggcccttcccgacttcttcaaagccttttacgagtgtctcgcagcctgcgagggttccagggagatcaaggacttcaaggatttctacctttccatagcagatcattatgtagaagttctggaatgcaaaatacagtgtgaagagaacctcaccccagttataggaggctatccggttgagaaatttgtggctaccatgtatcattacttgcagtttgcctattataagttgaacgacctgaagaatgcagccccctgtgcagtcagctatctgctctttgatcagaatgacaaggtcatgcagcagaacctggtgtattaccagtaccacagggacacttggggcctctcggatgagcacttccagcccagacctgaagcagttcagttctttaatgtgaccacactccagaaggagctgtatgactttgctaaggaaaatataatggatgatgatgagggagaagttgtggaatatgtggatgacctcttggaactggaggagaccagctagcccacagcaaccaaagagacttcctcttggcgttcaggaaacacagattctttgtccttttcccaacagcccaggctgttgatacctcagagccttctctttactctccaaagtgaaagggaagcccccgtctctctaactgcatgtcatcaggggtgagcctgcctttcctatcttcacacctgccacctcatgttcacacctatctttctcaccttttttttgagatggagtctcgctctcttgcccaggctggagtgcaatggcacgttctcagctcactgcaacctccgcctcttgggttcaagcaattctgctgcatcagcctcccgagtacctgggattacaggcatgtgccaccacgcccggctaattttgtatttttagtagagacggggttttgccatgttggccaggctggtctcgaactcttgacttcagatgatccatctgccttggcctcccacagtgctgggattacaggcgtgagccaccatgcccggcctctttctcacctttacacctgtcttcttatcctcacatctgttttcacaccttcatccctgtcttcctcatgttcacacttgtcttccccatgttcatagctgcctttcttaccattttggtttgaagggcagtcttctctggcttgtttttttgtttttcccagaaaatcagtattattttttaaataagaaaaacattcctagaagatgataattgtgaaaacctcctttggctt

SEQ ID NO: 1568 - protein, 401 aa, Homosapiens; identical to SEQ ID NO: 121

SEQ ID NO: 1569 - DNA, 2257 bp, Homosapiens
gaggctggcgtccccgccccgaaagcactgggcccgccgcgtcgcaccgtcctctttcctttccttctccctccccttttcccttccttcgtcccttccttccttcctttcgccgggcgcgatggagccggggcgccggggggccgcggcgctgctagcgctgctgtgcgtggcctgcgcgctgcgcgccgggcgcgcccaatacgaacgctacagcttccgcagcttcccacgggacgagctgatgccgctcgagtcggcctaccggcacgcgctggacaagtacagcggcgagcactgggccgagagcgtgggctacctggagatcagcctgcggctgcaccgcttgctgcgcgacagcgaggccttctgccaccgcaactgcagcgccgcgccgcagcccgagcccgccgccggcctcgccagctatcccgagctgcgcctcttcgggggcctgctgcgccgcgcgcactgcctcaagcgctgcaagcagggcctgccagccttccgccagtcccagcccagccgcgaggtgctggcggacttccagcgccgcgagccctacaagttcctgcagttcgcttacttcaaggcaaataatctccccaaagccatcgccgctgctcacacctttctactgaagcatcctgatgacgaaatgatgaagaggaacatggcatattataagagcctgcctggtgccgaggactacattaaagacctggaaaccaagtcatatgaaagcctgttcatccgagcagtgcgggcatacaacggtgagaactggagaacatccatcacagacatggagctggcccttcccgacttcttcaaagccttttacgagtgtctcgcagcctgcgagggttccagggagatcaaggacttcaaggatttctacctttccatagcagtgaacgacctgaagaatgcagccccctgtgcagtcagctatctgctctttgatcagaatgacaaggtcatgcagcagaacctggtgtattaccagtaccacagggacacttggggcctctcggatgagcacttccagcccagacctgaagcagttcagttctttaatgtgaccacactccagaaggagctgtatgactttgctaaggaaaatataatggatgatgatgagggagaagttgtggaatatgtggatgacctcttggaactggaggagaccagctagcccacagcaaccaaagagacttcctcttggcgttcaggaaacacagattctttgtccttttcccaacagcccaggctgttgatacctcagagccttctctttactctccaaagtgaaagggaagcccccgtctctctaactgcatgtcatcaggggtgagcctgcctttcctatcttcacacctgccacctcatgttcacacctatctttctcaccttttttttgagatggagtctcgctctcttgcccaggctggagtgcaatggcacgttctcagctcactgcaacctccgcctcttgggttcaagcaattctgctgcatcagcctcccgagtacctgggattacaggcatgtgccaccacgcccggctaattttgtatttttagtagagacggggttttgccatgttggccaggctggtctcgaactcttgacttcagatgatccatctgccttggcctcccacagtgctgggattacaggcgtgagccaccatgcccggcctctttctcacctttacacctgtcttcttatcctcacatctgttttcacaccttcatccctgtcttcctcatgttcacacttgtcttccccatgttcatagctgcctttcttaccattttggtttgaagggcagtcttctctggcttgtttttttgtttttcccagaaaatcagtattattttttaaataagaaaaacattcctagaagatgataattgtgaaaacctcctttggcttatttgcttttccagattttagtctcctttctccccatccgggaaagatggtggaagacataggctaaatttctccagcctcacaatggtcttcacttggtctgacttgtaccaattctagcacccactgaaaaacaagttgagtagagagtgtagagtgcagaaatgtggcttttgccccactttgcatctccaaaattacaacggttggccgatcccatttgaggacaatgcttagttataagtctccgagttggaaaaggaagaaagccagagctgtctagtttcattcattctttcagtaaatatttattgagt

SEQ ID NO: 1570 - protein, 358 aa, Homosapiens; identical to SEQ ID NO: 1564

SEQ ID NO: 1571 - DNA, 2301 bp, Homosapiens
gaggctggcgtccccgccccgaaagcactgggcccgccgcgtcgcaccgtcctctttcctttccttctccctccccttttcccttccttcgtcccttccttccttcctttcgccgggcgcgatggagccggggcgccggggggccgcggcgctgctagcgctgctgtgcgtggcctgcgcgctgcgcgccgggcgcgcccaatacgaacgctacagcttccgcagcttcccacgggacgagctgatgccgctcgagtcggcctaccggcacgcgctggacaagtacagcggcgagcactgggccgagagcgtgggctacctggagatcagcctgcggctgcaccgcttgctctgcgcctcttcgggggcctgctgcgccgcgcgcactgcctcaagcgctgcaagcagggcctgccagccttccgccagtcccagcccagccgcgaggtgctggcggacttccagcgccgcgagccctacaagttcctgcagttcgcttacttcaaggcaaataatctccccaaagccatcgccgctgctcacacctttctactgaagcatcctgatgacgaaatgatgaagaggaacatggcatattataagagcctgcctggtgccgaggactacattaaagacctggaaaccaagtcatatgaaagcctgttcatccgagcagtgcgggcatacaacggtgagaactggagaacatccatcacagacatggagctggcccttcccgacttcttcaaagccttttacgagtgtctcgcagcctgcgagggttccagggagatcaaggacttcaaggatttctacctttccatagcagatcattatgtagaagttctggaatgcaaaatacagtgtgaagagaacctcaccccagttataggaggctatccggttgagaaatttgtggctaccatgtatcattacttgcagtttgcctattataagttgaacgacctgaagaatgcagccccctgtgcagtcagctatctgctctttgatcagaatgacaaggtcatgcagcagaacctggtgtattaccagtaccacagggacacttggggcctctcggatgagcacttccagcccagacctgaagcagttcagttctttaatgtgaccacactccagaaggagctgtatgactttgctaaggaaaatataatggatgatgatgagggagaagttgtggaatatgtggatgacctcttggaactggaggagaccagctagcccacagcaaccaaagagacttcctcttggcgttcaggaaacacagattctttgtccttttcccaacagcccaggctgttgatacctcagagccttctctttactctccaaagtgaaagggaagcccccgtctctctaactgcatgtcatcaggggtgagcctgcctttcctatcttcacacctgccacctcatgttcacacctatctttctcaccttttttttgagatggagtctcgctctcttgcccaggctggagtgcaatggcacgttctcagctcactgcaacctccgcctcttgggttcaagcaattctgctgcatcagcctcccgagtacctgggattacaggcatgtgccaccacgcccggctaattttgtatttttagtagagacggggttttgccatgttggccaggctggtctcgaactcttgacttcagatgatccatctgccttggcctcccacagtgctgggattacaggcgtgagccaccatgcccggcctctttctcacctttacacctgtcttcttatcctcacatctgttttcacaccttcatccctgtcttcctcatgttcacacttgtcttccccatgttcatagctgcctttcttaccattttggtttgaagggcagtcttctctggcttgtttttttgtttttcccagaaaatcagtattattttttaaataagaaaaacattcctagaagatgataattgtgaaaacctcctttggcttatttgcttttccagattttagtctcctttctccccatccgggaaagatggtggaagacataggctaaatttctccagcctcacaatggtcttcacttggtctgacttgtaccaattctagcacccactgaaaaacaagttgagtagagagtgtagagtgcagaaatgtggcttttgccccactttgcatctccaaaattacaacggttggccgatcccatttgaggacaatgcttagttataagtctccgagttggaaaaggaagaaagccagagctgtctagtttcattcattctttcagtaaatatttattgagt

SEQ ID NO: 1572 - protein, 222 aa, Homosapiens; identical to SEQ ID NO: 1566

SEQ ID NO: 1573 - DNA, 2386 bp, Homosapiens
gaggctggcgtccccgccccgaaagcactgggcccgccgcgtcgcaccgtcctctttcctttccttctccctccccttttcccttccttcgtcccttccttccttcctttcgccgggcgcgatggagccggggcgccggggggccgcggcgctgctagcgctgctgtgcgtggcctgcgcgctgcgcgccgggcgcgcccaatacgaacgctacagcttccgcagcttcccacgggacgagctgatgccgctcgagtcggcctaccggcacgcgctggacaagtacagcggcgagcactgggccgagagcgtgggctacctggagatcagcctgcggctgcaccgcttgctgcgcgacagcgaggccttctgccaccgcaactgcagcgccgcgccgcagcccgagcccgccgccggcctcgccagctatcccgagctgcgcctcttcgggggcctgctgcgccgcgcgcactgcctcaagcgctgcaagcagggcctgccagccttccgccagtcccagcccagccgcgaggtgctggcggacttccagcgccgcgagccctacaagttcctgcagttcgcttacttcaaggcaaataatctccccaaagccatcgccgctgctcacacctttctactgaagcatcctgatgacgaaatgatgaagaggaacatggcatattataagagcctgcctggtgccgaggactacattaaagacctggaaaccaagtcatatgaaagcctgttcatccgagcagtgcgggcatacaacggtgagaactggagaacatccatcacagacatggagctggcccttcccgacttcttcaaagccttttacgagtgtctcgcagcctgcgagggttccagggagatcaaggacttcaaggatttctacctttccatagcagatcattatgtagaagttctggaatgcaaaatacagtgtgaagagaacctcaccccagttataggaggctatccggttgagaaatttgtggctaccatgtatcattacttgcagtttgcctattataagttgaacgacctgaagaatgcagccccctgtgcagtcagctatctgctctttgatcagaatgacaaggtcatgcagcagaacctggtgtattaccagtaccacagggacacttggggcctctcggatgagcacttccagcccagacctgaagcagttcagttctttaatgtgaccacactccagaaggagctgtatgactttgctaaggaaaatataatggatgatgatgagggagaagttgtggaatatgtggatgacctcttggaactggaggagaccagctagcccacagcaaccaaagagacttcctcttggcgttcaggaaacacagattctttgtccttttcccaacagcccaggctgttgatacctcagagccttctctttactctccaaagtgaaagggaagcccccgtctctctaactgcatgtcatcaggggtgagcctgcctttcctatcttcacacctgccacctcatgttcacacctatctttctcaccttttttttgagatggagtctcgctctcttgcccaggctggagtgcaatggcacgttctcagctcactgcaacctccgcctcttgggttcaagcaattctgctgcatcagcctcccgagtacctgggattacaggcatgtgccaccacgcccggctaattttgtatttttagtagagacggggttttgccatgttggccaggctggtctcgaactcttgacttcagatgatccatctgccttggcctcccacagtgctgggattacaggcgtgagccaccatgcccggcctctttctcacctttacacctgtcttcttatcctcacatctgttttcacaccttcatccctgtcttcctcatgttcacacttgtcttccccatgttcatagctgcctttcttaccattttggtttgaagggcagtcttctctggcttgtttttttgtttttcccagaaaatcagtattattttttaaataagaaaaacattcctagaagatgataattgtgaaaacctcctttggcttatttgcttttccagattttagtctcctttctccccatccgggaaagatggtggaagacataggctaaatttctccagcctcacaatggtcttcacttggtctgacttgtaccaattctagcacccactgaaaaacaagttgagtagagagtgtagagtgcagaaatgtggcttttgccccactttgcatctccaaaattacaacggttggccgatcccatttgaggacaatgcttagttataagtctccgagttggaaaaggaagaaagccagagctgtctagtttcattcattctttcagtaaatatttattgagt

SEQ ID NO: 1574 - protein, 401 aa, Homosapiens; identical to SEQ ID NO: 121

SEQ ID NO: 1575 - DNA, 2858 bp, Homosapiens
gaggctggcgtccccgccccgaaagcactgggcccgccgcgtcgcaccgtcctctttcctttccttctccctccccttttcccttccttcgtcccttccttccttcctttcgccgggcgcgatggagccggggcgccggggggccgcggcgctgctagcgctgctgtgcgtggcctgcgcgctgcgcgccgggcgcgcccaatacgaacgctacagcttccgcagcttcccacgggacgagctgatgccgctcgagtcggcctaccggcacgcgctggacaagtacagcggcgagcactgggccgagagcgtgggctacctggagatcagcctgcggctgcaccgcttgctgcgcgacagcgaggccttctgccaccgcaactgcagcgccgcgccgcagcccgagcccgccgccggcctcgccagctatcccgagctgcgcctcttcgggggcctgctgcgccgcgcgcactgcctcaagcgctgcaagcagggcctgccagccttccgccagtcccagcccagccgcgaggtgctggcggacttccagcgccgcgagccctacaagttcctgcagttcgcttacttcaaggcaaataatctccccaaagccatcgccgctgctcacacctttctactgaagcatcctgatgacgaaatgatgaagaggaacatggcatattataagagcctgcctggtgccgaggactacattaaagacctggaaaccaagtcatatgaaagcctgttcatccgagcagtgcgggcatacaacggtgagaactggagaacatccatcacagacatggagctggcccttcccgacttcttcaaagccttttacgagtgtctcgcagcctgcgagggttccagggagatcaaggacttcaaggatttctacctttccatagcagatcattatgtagaagttctggaatgcaaaatacagtgtgaagagaacctcaccccagttataggaggctatccggttgagaaatttgtggctaccatgtatcattacttgcagtttgcctattataagttgaacgacctgaagaatgcagccccctgtgcagtcagctatctgctctttgatcagaatgacaaggtcatgcagcagaacctggtgtattaccagtaccacagggacacttggggcctctcggatgagcacttccagcccagacctgaagcagttcagttctttaatgtgaccacactccagaaggagctgtatgactttgctaaggaaaatataatggatgatgatgagggagaagttgtggaatatgtggatgacctcttggaactggaggagaccagctagcccacagcaaccaaagagacttcctcttggcgttcaggaaacacagattctttgtccttttcccaacagcccaggctgttgatacctcagagccttctctttactctccaaagtgaaagggaagcccccgtctctctaactgcatgtcatcaggggtgagcctgcctttcctatcttcacacctgccacctcatgttcacacctatctttctcaccttttttttgagatggagtctcgctctcttgcccaggctggagtgcaatggcacgttctcagctcactgcaacctccgcctcttgggttcaagcaattctgctgcatcagcctcccgagtacctgggattacaggcatgtgccaccacgcccggctaattttgtatttttagtagagacggggttttgccatgttggccaggctggtctcgaactcttgacttcagatgatccatctgccttggcctcccacagtgctgggattacaggcgtgagccaccatgcccggcctctttctcacctttacacctgtcttcttatcctcacatctgttttcacaccttcatccctgtcttcctcatgttcacacttgtcttccccatgttcatagctgcctttcttaccattttggtttgaagggcagtcttctctggcttgtttttttgtttttcccagaaaatcagtattattttttaaataagaaaaacattcctagaagatgataattgtgaaaacctcctttggcttatttgcttttccagattttagtctcctttctccccatccgggaaagatggtggaagacataggctaaatttctccagcctcacaatggtcttcacttggtctgacttgtaccaattctagcacccactgaaaaacaagttgagtagagagtgtagagtgcagaaatgtggcttttgccccactttgcatctccaaaattacaacggttggccgatcccatttgaggacaatgcttagttataagtctccgagttggaaaaggaagaaagccagagctgtctagtttcattcattctttcagtaaatatttattgagtacctactgtgtgctaggcattgacctgggaactagagatacttcacagaataacagggaaagttccctgtgctcatggagcttacattctacagggagaaagagatagccaatacataggaataaatatatacaaggtatcatgtagtgataattgctgtggagaaaaataaagcaggggagggagtaagaaatcctggagatgaggctgcagttttaaatggggcctcactgggaatgtgacgttgagcagagacgttagggaagtggatcctggacaaggcattccaggcagaggaacaggatgtgcactgccccaaagtgagaacttgctctacgtggtcaggaaagagcagggagaccaagcagagtcgtgggcaggggtagaatggaaggagaggcggctggggaggacaggtggtggagggccttggcttctgctaagtgagatgggaaccactggagggtttgaa

SEQ ID NO: 1576 - protein, 401 aa, Homosapiens; identical to SEQ ID NO: 121

SEQ ID NO: 1577 - DNA, 2729 bp, Homosapiens
gaggctggcgtccccgccccgaaagcactgggcccgccgcgtcgcaccgtcctctttcctttccttctccctccccttttcccttccttcgtcccttccttccttcctttcgccgggcgcgatggagccggggcgccggggggccgcggcgctgctagcgctgctgtgcgtggcctgcgcgctgcgcgccgggcgcgcccaatacgaacgctacagcttccgcagcttcccacgggacgagctgatgccgctcgagtcggcctaccggcacgcgctggacaagtacagcggcgagcactgggccgagagcgtgggctacctggagatcagcctgcggctgcaccgcttgctgcgcgacagcgaggccttctgccaccgcaactgcagcgccgcgccgcagcccgagcccgccgccggcctcgccagctatcccgagctgcgcctcttcgggggcctgctgcgccgcgcgcactgcctcaagcgctgcaagcagggcctgccagccttccgccagtcccagcccagccgcgaggtgctggcggacttccagcgccgcgagccctacaagttcctgcagttcgcttacttcaaggcaaataatctccccaaagccatcgccgctgctcacacctttctactgaagcatcctgatgacgaaatgatgaagaggaacatggcatattataagagcctgcctggtgccgaggactacattaaagacctggaaaccaagtcatatgaaagcctgttcatccgagcagtgcgggcatacaacggtgagaactggagaacatccatcacagacatggagctggcccttcccgacttcttcaaagccttttacgagtgtctcgcagcctgcgagggttccagggagatcaaggacttcaaggatttctacctttccatagcagtgaacgacctgaagaatgcagccccctgtgcagtcagctatctgctctttgatcagaatgacaaggtcatgcagcagaacctggtgtattaccagtaccacagggacacttggggcctctcggatgagcacttccagcccagacctgaagcagttcagttctttaatgtgaccacactccagaaggagctgtatgactttgctaaggaaaatataatggatgatgatgagggagaagttgtggaatatgtggatgacctcttggaactggaggagaccagctagcccacagcaaccaaagagacttcctcttggcgttcaggaaacacagattctttgtccttttcccaacagcccaggctgttgatacctcagagccttctctttactctccaaagtgaaagggaagcccccgtctctctaactgcatgtcatcaggggtgagcctgcctttcctatcttcacacctgccacctcatgttcacacctatctttctcaccttttttttgagatggagtctcgctctcttgcccaggctggagtgcaatggcacgttctcagctcactgcaacctccgcctcttgggttcaagcaattctgctgcatcagcctcccgagtacctgggattacaggcatgtgccaccacgcccggctaattttgtatttttagtagagacggggttttgccatgttggccaggctggtctcgaactcttgacttcagatgatccatctgccttggcctcccacagtgctgggattacaggcgtgagccaccatgcccggcctctttctcacctttacacctgtcttcttatcctcacatctgttttcacaccttcatccctgtcttcctcatgttcacacttgtcttccccatgttcatagctgcctttcttaccattttggtttgaagggcagtcttctctggcttgtttttttgtttttcccagaaaatcagtattattttttaaataagaaaaacattcctagaagatgataattgtgaaaacctcctttggcttatttgcttttccagattttagtctcctttctccccatccgggaaagatggtggaagacataggctaaatttctccagcctcacaatggtcttcacttggtctgacttgtaccaattctagcacccactgaaaaacaagttgagtagagagtgtagagtgcagaaatgtggcttttgccccactttgcatctccaaaattacaacggttggccgatcccatttgaggacaatgcttagttataagtctccgagttggaaaaggaagaaagccagagctgtctagtttcattcattctttcagtaaatatttattgagtacctactgtgtgctaggcattgacctgggaactagagatacttcacagaataacagggaaagttccctgtgctcatggagcttacattctacagggagaaagagatagccaatacataggaataaatatatacaaggtatcatgtagtgataattgctgtggagaaaaataaagcaggggagggagtaagaaatcctggagatgaggctgcagttttaaatggggcctcactgggaatgtgacgttgagcagagacgttagggaagtggatcctggacaaggcattccaggcagaggaacaggatgtgcactgccccaaagtgagaacttgctctacgtggtcaggaaagagcagggagaccaagcagagtcgtgggcaggggtagaatggaaggagaggcggctggggaggacaggtggtggagggccttggcttctgctaagtgagatgggaaccactggagggtttgaa

SEQ ID NO: 1578 - protein, 358 aa, Homosapiens; identical to SEQ ID NO: 1564

SEQ ID NO: 1579 - DNA, 2773 bp, Homosapiens
gaggctggcgtccccgccccgaaagcactgggcccgccgcgtcgcaccgtcctctttcctttccttctccctccccttttcccttccttcgtcccttccttccttcctttcgccgggcgcgatggagccggggcgccggggggccgcggcgctgctagcgctgctgtgcgtggcctgcgcgctgcgcgccgggcgcgcccaatacgaacgctacagcttccgcagcttcccacgggacgagctgatgccgctcgagtcggcctaccggcacgcgctggacaagtacagcggcgagcactgggccgagagcgtgggctacctggagatcagcctgcggctgcaccgcttgctctgcgcctcttcgggggcctgctgcgccgcgcgcactgcctcaagcgctgcaagcagggcctgccagccttccgccagtcccagcccagccgcgaggtgctggcggacttccagcgccgcgagccctacaagttcctgcagttcgcttacttcaaggcaaataatctccccaaagccatcgccgctgctcacacctttctactgaagcatcctgatgacgaaatgatgaagaggaacatggcatattataagagcctgcctggtgccgaggactacattaaagacctggaaaccaagtcatatgaaagcctgttcatccgagcagtgcgggcatacaacggtgagaactggagaacatccatcacagacatggagctggcccttcccgacttcttcaaagccttttacgagtgtctcgcagcctgcgagggttccagggagatcaaggacttcaaggatttctacctttccatagcagatcattatgtagaagttctggaatgcaaaatacagtgtgaagagaacctcaccccagttataggaggctatccggttgagaaatttgtggctaccatgtatcattacttgcagtttgcctattataagttgaacgacctgaagaatgcagccccctgtgcagtcagctatctgctctttgatcagaatgacaaggtcatgcagcagaacctggtgtattaccagtaccacagggacacttggggcctctcggatgagcacttccagcccagacctgaagcagttcagttctttaatgtgaccacactccagaaggagctgtatgactttgctaaggaaaatataatggatgatgatgagggagaagttgtggaatatgtggatgacctcttggaactggaggagaccagctagcccacagcaaccaaagagacttcctcttggcgttcaggaaacacagattctttgtccttttcccaacagcccaggctgttgatacctcagagccttctctttactctccaaagtgaaagggaagcccccgtctctctaactgcatgtcatcaggggtgagcctgcctttcctatcttcacacctgccacctcatgttcacacctatctttctcaccttttttttgagatggagtctcgctctcttgcccaggctggagtgcaatggcacgttctcagctcactgcaacctccgcctcttgggttcaagcaattctgctgcatcagcctcccgagtacctgggattacaggcatgtgccaccacgcccggctaattttgtatttttagtagagacggggttttgccatgttggccaggctggtctcgaactcttgacttcagatgatccatctgccttggcctcccacagtgctgggattacaggcgtgagccaccatgcccggcctctttctcacctttacacctgtcttcttatcctcacatctgttttcacaccttcatccctgtcttcctcatgttcacacttgtcttccccatgttcatagctgcctttcttaccattttggtttgaagggcagtcttctctggcttgtttttttgtttttcccagaaaatcagtattattttttaaataagaaaaacattcctagaagatgataattgtgaaaacctcctttggcttatttgcttttccagattttagtctcctttctccccatccgggaaagatggtggaagacataggctaaatttctccagcctcacaatggtcttcacttggtctgacttgtaccaattctagcacccactgaaaaacaagttgagtagagagtgtagagtgcagaaatgtggcttttgccccactttgcatctccaaaattacaacggttggccgatcccatttgaggacaatgcttagttataagtctccgagttggaaaaggaagaaagccagagctgtctagtttcattcattctttcagtaaatatttattgagtacctactgtgtgctaggcattgacctgggaactagagatacttcacagaataacagggaaagttccctgtgctcatggagcttacattctacagggagaaagagatagccaatacataggaataaatatatacaaggtatcatgtagtgataattgctgtggagaaaaataaagcaggggagggagtaagaaatcctggagatgaggctgcagttttaaatggggcctcactgggaatgtgacgttgagcagagacgttagggaagtggatcctggacaaggcattccaggcagaggaacaggatgtgcactgccccaaagtgagaacttgctctacgtggtcaggaaagagcagggagaccaagcagagtcgtgggcaggggtagaatggaaggagaggcggctggggaggacaggtggtggagggccttggcttctgctaagtgagatgggaaccactggagggtttgaa

SEQ ID NO: 1580 - protein, 222 aa, Homosapiens; identical to SEQ ID NO: 1566

SEQ ID NO: 1581 - DNA, 1124 bp, Homosapiens
tctccctccccttttcccttccttcgtcccttccttccttcctttcgccgggcgcgatggagccggggcgccggggggccgcggcgctgctagcgctgctgtgcgtggcctgcgcgctgcgcgccgggcgcgcccaatacgaacgctacagcttccgcagcttcccacgggacgagctgatgccgctcgagtcggcctaccggcacgcgctggacaagtacagcggcgagcactgggccgagagcgtgggctacctggagatcagcctgcggctgcaccgcttgctgcgcgacagcgaggccttctgccaccgcaactgcagcgccgcgccgcagcccgagcccgccgccggcctcgccagctatcccgagctgcgcctcttcgggggcctgctgcgccgcgcgcactgcctcaagcgctgcaagcagggcctgccagccttccgccagtcccagcccagccgcgaggtgctggcggacttccagcgccgcgagccctacaagttcctgcagttcgcttacttcaaggcaatgctctcagaaggaacctgtgaaagcctttatcagtcatttattggctgtgagaagttctctgggagtgtgggtacatttgaaggcaagtgacttcagttgagggcaagtctctggaaaagaggctgtaggcatctggcagctaccatgcatggtagtgtgttgggggtgggggtcctgggcactggctgtgtgaagggatctggcagggcaccacagcgccccctactgaaccatcagcatgtcagtggcatttaaagccatgcagctggaggggccactgagattgtctctgagtattactgagaagcaacagaaaagagccatggatggagcccttgggctctctgggaaatgggaaatcagccaaaggactgagaaggagttaccttaaggtcagagaaaaccaagagagtgtggtgttctggaagctgagctttctttattcaacctcattcccttctccaaataagccacttgtgtagttgggcccctccagggttgaaggcaagaggagaaaggcacagcgtttgggaaacaagacttttcctgcaatagcctgggaaggaataaaaggatagagtgtttgggttt

SEQ ID NO: 1582 - protein, 188 aa, Homosapiens
MEPGRRGAAALLALLCVACALRAGRAQYERYSFRSFPRDELMPLESAYRHALDKYSGEHWAESVGYLEISLRLHRLLRDSEAFCHRNCSAAPQPEPAAGLASYPELRLFGGLLRRAHCLKRCKQGLPAFRQSQPSREVLADFQRREPYKFLQFAYFKAMLSEGTCESLYQSFIGCEKFSGSVGTFEGK

SEQ ID NO: 1583 - DNA, 8192 bp, Homosapiens
ggttatggagtggtcattttgtgatgagtctggtcacagaaaagccatcattagcggtagtatttagagtatttgtttggaacaaactggaaaatgcttactgagaaagctggggacttgtcagctattggagctcgaagagagctgtgagcttgctctggtctgatccttcgctttatagatgaggagcatggggccagcaagtttcctgagcctccaggtctgctcttcctatacccgttttaggtgaagtacctctgaataagacatcttcgtggaatttgttttctgtctataaatatgtatgggatgaactcatcactggcattaaacaactgagtctcagttctttatctataaaatgggaataataatactgccctcccagggttgtgagaataaaatactgtgttgcatgtggaaatgctttctaaactggaaagtgatgcaatgcctatgtcttggtttgggtatccttgaagcagagcctgagacaggatcccaagatgccacaggggccattcccccattccctaaaggaaggaacaccagccagataccaacaagattggccactgtggtttacaaagtatagcagaggctgggtgtagtggctcacacctgtgatctcagcatttgggaggccaaagcaggtgattgcttgagaccaggagttcaagaccagcctgggcaacatggtaaaacctcgtctctacaaaaaatacaaaaaaattagctgggtatggtggagtgcacccgtagtcctagctacttggaaggctgaaggagtctggggagtttgaggctgatattgcgccattgcactccagactcggcaattggagtaagaccctgcctcaaaaaaaaaaaaaaggaaagtatagaaaaatatatttagaaaaggtaagagaagttgagttcccagttatctagaggcaagctaatatggatattttggtatatatctttccatttttttattattaaagaaaaaattttatagttttaaatttgtttttctacatatttattataaactcagctataattatgtctcatgactttttcactttatattattatgtgagcagtttctcttgttatatttttctaaaacagctttatttagatattattcacaaaaaatgaaattctcctttttaaagtatacaattcagttgtacttgttatatccacaaaattttgcatccatcactgttatttaactttagaacatttttattgcccccaaaagaaactccatagctaagtcacttcccatttctcctctgggccaacattcccactcctgcctccacctccagcccctggaagactctaatctactttctgtttctgtggatttgcctgttgtggacatttcatataaatggaaatatagggtatgtggtcttttgtgactggcttctttcactgagcatatgttttcaaagttcagccatgttgaacatgttgcctgtaaaatttcctctgtactaccaagtaatattcttcttttggatgtaccgcattctgtttatccattcttcagttgatggatgtttgggttggttccactttttggctattttgaataatgatgctatgaccatttgtgtacaaatttttgtttgaacataagctttccagttttttatacctaggagtatatacataggtattatgttaggccatttttgcatcactgtaaagaaatacctggctgggtgcagtggttcatgcctgtaatcccagcactttgggaggccaaggcaggaggattgcttgagcccaagactagcctgagtaacatagtgagactctgtctctacagaaaatttaaaagttagctgggcatggtggcacaggaagtgtggcaatggcatctgcttggcttctggtgaggtctcaggaagcttatggtcatggcaaagggggagctggcgtatgtcacatggcaagagcatgccacactcttttaaacaactagatcttgtgtgaactcagagtgagaactcacttattatcatgaggacagcaccaagacatttttgaggcatccgcccacctgacccaaataccttccaccaggccccacttccaacaccggagattacatttcaacatgagatttggaggggacatatatccaaaccatatcaggtacatacctaggaatggattgctgggccatatggtaatggtttaacctgttgagaaactgccagactgtttttcaaagtggctgcaccatttacattcccatcagcagtgtatgagagttccaactttgcaatatcttcaacaaaacttaatattgtcttttttttttaatagccatgctagtggatgcaagtagtatttcattgtggttctgacttccactttctgttgtttttcttttctttttgagacagagttttgctcttgttgcccaggctggagtgcaatggttgcagtgagccgagatcacaccactgtactgtagcctgggtggcacagtgagacactgtctaaaaaaaaaaattagctaagtatgatggtgcacatctgtaatcctagctactcaggaggctaaagtgggaggattgctggagctcaggagtgggagggtacagtgaaccataagcatgccactgcacactaggctaggtgacagagcaagaccctgtctctctggaaaaaaaaagaagtggagagagtgaacatccttgtcttgttcccagtcttaaaaggaaaaagcatacagtcgtctttcagcattaaatgtgaaagtacgttattagctgggggttttttgtaggtgccctttattaggttgaggaagttctatttttaattcgttgaattttttttttttttttttgagacggagtttcactcttgttgcctaggctggagtgcagtggtgtgatctctgctcactgcaacctccgcctcccaggttcaagtgattctcctgcctcgccctcccaagtagctggaattacaggcatgtgccaccacacccgggtaatttttctgtatttagtagagacgggggtttcaccatgttggccagtctggtctcgaactcctgacctcaggtgatcaacttgccttggcctcccaaagtgctgggattacaggcgtgagccaccgcacccggcctgaatgtttttatcatgaatttgtgttgaattttgtcaaatgctttttctgcatctattgagatggtcacatgatttttgtttcccttgttaatattcattataaaaatgacttttttgtgactaatattacatgatatagataattttaagaaatatagcctttttgtaggcatttagtttgcttccaactttttgcttttacaaatagcatagcagggactaaattgtttacttcttctctaatcatttccttagaaaaaattcccagtggtgaaattcctggcctaaggctgtgaacattttcaagacttctgatgtacaagaacaacatatatagaaagcaaatcatagatactagaacacgaagagatttttcacatgattcagtaaagctctctcatgtcacagataaggaaacaaactcagaaaggcagagtggcttgctcatagtcacacagagggttagtaatcatctaatgaacacgccaagcttattgcaggctttaaaattcctaggattcttggatttggcactttcaagataaaaggactttgttgaaggttctggagtagtttgcttattaattgaggctttagaattgtggaagaactaatccatctctaaagaatgaaccattttcttactatataccaaattatggcaagtaatactttgaaatgaaaatataaccaaaatcatcaaattcttagttagtccttccattttccaaaggacataatactcctttgaaacaaagcatcagtacactttagctgctgatatgtgtggcattcttccttattatctttctggtgttgaaatgtgtataagcactcctgaaagtttacgcactggttcagaattttgcagaggtttattacagtttcagaaactttttaaaacaggctgaaacagatgcttcaggtttcaagttctgatggttgtttgcttcagggaagtccaaaagaaatagaatataatttgttggaaggatgtattgagggagtgctctcaggtaggaacggaatgagggtcaggggaaggagctcaacaaatacgtggtctcagctggagtcaagcttcgcctgctcccatgggggactctggagcatgaattgcaccacagagttgttcttgccttttgtagtcccccttatcagtctgtcattcgttcttcgttgccaggaagggctggtgtgtaacctccctgtcaagactgctgtttttttttgtttttgtttttgtttttggccaaaggcaattgcccagagaaggggcagctgctagccattagcaagcagccctcacaggagttggggatgagtgcactgggaaggagatctgagtgaggccccaacagtattcactacaacagccatgcaggggatgcatttctttcgtctgtgctgcctcgggcacttattactagtgagctaaaagcaaacaataccatcatcccgcaagtcacaacagacacacagcaggatatagtaactccctaagcagaagtcatagctatacacataatccctctactatgctgtgttttccttttggggtctagaaagcaactgaaaaacaatttttccaagctgtagtgtctacagtttgagtttctaatctcaggcatgacatagtagaagtatttgatgataatactaagaccccccatttgtgtctcatgtacttgataggttttccagttattcccaaatgctgcaagatttttataaatttctctgtgttaaaacatcaaaaggagccaacaggctcttggcctgggatggtgagctcagtgaaggaggtcgagttttagcagggttggtggggccagtctgtgttgactcttatggaaggggcctcagccttggtcattcactcattctctgcagaaaagagaatgggtgtcatcagctggtggtccaggagggttatagaagagaagtcaatgtggagaaagaaattgggaagggtgctgggctgcttcaagttgaagtataaggctgattgcagaaggagggagcaggtgagctcctggtaccgacactgggcaagtggatcccactatccctgtgtgtctctcctgtaagaggagtgattgcttcagtcacaccagcagtatgtatgcaagcactcaatcattcatccttcaacacatgtattgagcaccttctgtgtgctggactctggggaagaaaaatcaacccagtcccctggtccttgagaagtttgggttctggtggtcaaggcagaaagggaacagatagaaaatgttcctgtgggagacctgcacacatgagaggggaggaaggggagtaggcagagatgcacacaggagggccacttagtagagctgttcacaggctgggctgtccgcctcacacagcatgttggcggatctcgcagagcacttgataccaagttcaaatggagtggaagccgaggtcccctccacagggagaaatcaggtcctctgggccccagaccagcagaaaaaacctgtttcagccaaagcagacagtggtgatggcctctcgggatactgtttctgctcatcagtacttttaaaagtccaatagcccatttaataaagttgtcctgttgtctcttacagggagaagttgtggaatatgtggatgacctcttggaactggaggagaccagctagcccacagcaaccaaagagacttcctcttggcgttcaggaaacacagattctttgtccttttcccaacagcccaggctgttgatacctcagagccttctctttactctccaaagtgaaagggaagcccccgtctctctaactgcatgtcatcaggggtgagcctgcctttcctatcttcacacctgccacctcatgttcacacctatctttctcaccttttttttgagatggagtctcgctctcttgcccaggctggagtgcaatggcacgttctcagctcactgcaacctccgcctcttgggttcaagcaattctgctgcatcagcctcccgagtacctgggattacaggcatgtgccaccacgcccggctaattttgtatttttagtagagacggggttttgccatgttggccaggctggtctcgaactcttgacttcagatgatccatctgccttggcctcccacagtgctgggattacaggcgtgagccaccatgcccggcctctttctcacctttacacctgtcttcttatcctcacatctgttttcacaccttcatccctgtcttcctcatgttcacacttgtcttccccatgttcatagctgcctttcttaccattttggtttgaagggcagtcttctctggcttgtttttttgtttttcccagaaaatcagtattattttttaaataagaaaaacattcctagaagatgataattgtgaaaacctcctttggcttatttgcttttccagattttagtctcctttctccccatccgggaaagatggtggaagacataggctaaatttctccagcctcacaatggtcttcacttggtctgacttgtaccaattctagcacccactgaaaaacaagttgagtagagagtgtagagtgcagaaatgtggcttttgccccactttgcatctccaaaattacaacggttggccgatcccatttgaggacaatgcttagttataagtctccgagttggaaaaggaagaaagccagagctgtctagtttcattcattctttcagtaaatatttattgagtacctactgtgtgctaggcattgacctgggaactagagatacttcacagaataacagggaaagttccctgtgctcatggagcttacattctacagggagaaagagatagccaatacataggaataaatatatacaaggtatcatgtagtgataattgctgtggagaaaaataaagcaggggagggagtaagaaatcctggagatgaggctgcagttttaaatggggcctcactgggaatgtgacgttgagcagagacgttagggaagtggatcctggacaaggcattccaggcagaggaacaggatgtgcactgccccaaagtgagaacttgctctacgtggtcaggaaagagcagggagaccaagcagagtcgtgggcaggggtagaatggaaggagaggcggctggggaggacaggtggtggagggccttggcttctgctaagtgagatgggaaccactggagggtttgaacagaggagtgccttgattgatttatattttgcaagggtcattctagctgccatattgtgaaaaactttagtggacaagggcagaaggaagagggaagacctgttaggaagctactgcaaggttccaggcttgggcctgggccacagcaacagcagtggtcaaatatctagatttattttgaaaagagccaataggatttgctgagagtttgaatgtggagtgtaagagaaggaagagttaatgatgacattaaggtttttggcctgaatagcaggaaagatggagttaccagttactgaaatagggaaggatgggctgggtaagtatggaatttggtgcaaagcaggctgtctgtggttggaatgggaggttctggctgcaaatcaaagtggagagttctctcaggtcaggtctgcagcagagctcgagacagggatctgaatgcacttggtttattgttgggggtgctctcagaaggaacctgtgaaagcctttatcagtcatttattggctgtgagaagttctctgggagtgtgggtacatttgaaggcaagtgacttcagttgagggcaagtctctggaaaagaggctgtaggcatctggcagctaccatgcatggtagtgtgttgggggtgggggtcctgggcactggctgtgtgaagggatctggcagggcaccacagcgccccctactgaaccatcagcatgtcagtggcatttaaagccatgcagctggaggggccactgagattgtctctgagtattactgagaagcaacagaaaagagccatggatggagcccttgggctctctgggaaatgggaaatcagccaaaggact

SEQ ID NO: 1584 - protein, 153 aa, Homosapiens [sequence omitted]

SEQ ID NO: 1585 - DNA, 638 bp, Homosapiens
agggagaagttgtggaatatgtggatgacctcttggaactggaggagaccagctagcccacagcaaccaaagagacttcctcttggcgttcaggaaacacagattctttgtccttttcccaacagcccaggctgttgatacctcagagccttctctttactctccaaagtgaaagggaagcccccgtctctctaactgcatgtcatcaggggtgagcctgcctttcctatcttcacacctgccacctcatgttcacacctatctttctcaccttttttttgagatggagtctcgctctcttgcccaggctggagtgcaatggcacgttctcagctcactgcaacctccgcctcttgggttcaagcaattctgctgcatcagcctcccgatgctgggattacaggcgtgagccaccatgcccggcctctttctcacctttacacctgtcttcttatcctcacatctgttttcacaccttcatccctgtcttcctcatgttcacacttgtcttccccatgttcatagctgcctttcttaccattttggtttgaagggcagtcttctctggcttgtttttttgtttttcccagaaaatcagtattattttttaaataagaaaaacattcctagaagatgat

SEQ ID NO: 1586 - protein, 100 aa, Homosapiens
MFTPIFLTFFLRWSLALLPRLECNGTFSAHCNLRLLGSSNSAASASRCWDYRREPPCPASFSPLHLSSYPHICFHTFIPVFLMFTLVFPMFIAAFLTILV

SEQ ID NO: 1587 - DNA, 707 bp, Homosapiens
agggagaagttgtggaatatgtggatgacctcttggaactggaggagaccagctagcccacagcaaccaaagagacttcctcttggcgttcaggaaacacagattctttgtccttttcccaacagcccaggctgttgatacctcagagccttctctttactctccaaagtgaaagggaagcccccgtctctctaactgcatgtcatcaggggtgagcctgcctttcctatcttcacacctgccacctcatgttcacacctatctttctcaccttttttttgagatggagtctcgctctcttgcccaggctggagtgcaatggcacgttctcagctcactgcaacctccgcctcttgggttcaagcaattctgctgcatcagcctcccgagtacctgggattacaggctggtctcgaactcttgacttcagatgatccatctgccttggcctcccacagtgctgggattacaggcgtgagccaccatgcccggcctctttctcacctttacacctgtcttcttatcctcacatctgttttcacaccttcatccctgtcttcctcatgttcacacttgtcttccccatgttcatagctgcctttcttaccattttggtttgaagggcagtcttctctggcttgtttttttgtttttcccagaaaatcagtattattttttaaataagaaaaacattcctagaagatgat

SEQ ID NO: 1588 - protein, 91 aa, Homosapiens
MARSQLTATSASWVQAILLHQPPEYLGLQAGLELLTSDDPSALASHSAGITGVSHHARPLSHLYTCLLILTSVFTPSSLSSSCSHLSSPCS

SEQ ID NO: 1589 - DNA, 1453 bp, Homosapiens
agggagaagttgtggaatatgtggatgacctcttggaactggaggagaccagctagcccacagcaaccaaagagacttcctcttggcgttcaggaaacacagattctttgtccttttcccaacagcccaggctgttgatacctcagagccttctctttactctccaaagtgaaagggaagcccccgtctctctaactgcatgtcatcaggggtgagcctgcctttcctatcttcacacctgccacctcatgttcacacctatctttctcaccttttttttgagatggagtctcgctctcttgcccaggctggagtgcaatggcacgttctcagctcactgcaacctccgcctcttgggttcaagcaattctgctgcatcagcctcccgagtacctgggattacaggcatgtgccaccacgcccggcctctttctcacctttacacctgtcttcttatcctcacatctgttttcacaccttcatccctgtcttcctcatgttcacacttgtcttccccatgttcatagctgcctttcttaccattttggtttgaagggcagtcttctctggcttgtttttttgtttttcccagaaaatcagtattattttttaaataagaaaaacattcctagaagatgataattgtgaaaacctcctttggcttatttgcttttccagattttagtctcctttctccccatccgggaaagatggtggaagacataggctaaatttctccagcctcacaatggtcttcacttggtctgacttgtaccaattctagcacccactgaaaaacaagttgagtagagagtgtagagtgcagaaatgtggcttttgccccactttgcatctccaaaattacaacggttggccgatcccatttgaggacaatgcttagttataagtctccgagttggaaaaggaagaaagccagagctgtctagtttcattcattctttcagtaaatatttattgagtacctactgtgtgctaggcattgacctgggaactagagatacttcacagaataacagggaaagttccctgtgctcatggagcttacattctacagggagaaagagatagccaatacataggaataaatatatacaaggtatcatgtagtgataattgctgtggagaaaaataaagcaggggagggagtaagaaatcctggagatgaggctgcagttttaaatggggcctcactgggaatgtgacgttgagcagagacgttagggaagtggatcctggacaaggcattccaggcagaggaacaggatgtgcactgccccaaagtgagaacttgctctacgtggtcaggaaagagcagggagaccaagcagagtcgtgggcaggggtagaatggaaggagaggcggctggggaggacaggtggtggagggccttggcttctgctaagtgagatgggaaccactggagggtttgaa

SEQ ID NO: 1590 - protein, 117 aa, Homosapiens
MSSGVSLPFLSSHLPPHVHTYLSHLFFEMESRSLAQAGVQWHVLSSLQPPPLGFKQFCCISLPSTWDYRHVPPRPASFSPLHLSSYPHICFHTFIPVFLMFTLVFPMFIAAFLTILV

SEQ ID NO: 1591 - DNA, 1451 bp, Homosapiens
agggagaagttgtggaatatgtggatgacctcttggaactggaggagaccagctagcccacagcaaccaaagagacttcctcttggcgttcaggaaacacagattctttgtccttttcccaacagcccaggctgttgatacctcagagccttctctttactctccaaagtgaaagggaagcccccgtctctctaactgcatgtcatcaggggtgagcctgcctttcctatcttcacacctgccacctcatgttcacacctatctttctcaccttttttttgagatggagtctcgctctcttgcccaggctggagtgcaatggcacgttctcagctcactgcaacctccgcctcttgggttcaagcaattctgctgcatcagcctcccgatgctgggattacaggcgtgagccaccatgcccggcctctttctcacctttacacctgtcttcttatcctcacatctgttttcacaccttcatccctgtcttcctcatgttcacacttgtcttccccatgttcatagctgcctttcttaccattttggtttgaagggcagtcttctctggcttgtttttttgtttttcccagaaaatcagtattattttttaaataagaaaaacattcctagaagatgataattgtgaaaacctcctttggcttatttgcttttccagattttagtctcctttctccccatccgggaaagatggtggaagacataggctaaatttctccagcctcacaatggtcttcacttggtctgacttgtaccaattctagcacccactgaaaaacaagttgagtagagagtgtagagtgcagaaatgtggcttttgccccactttgcatctccaaaattacaacggttggccgatcccatttgaggacaatgcttagttataagtctccgagttggaaaaggaagaaagccagagctgtctagtttcattcattctttcagtaaatatttattgagtacctactgtgtgctaggcattgacctgggaactagagatacttcacagaataacagggaaagttccctgtgctcatggagcttacattctacagggagaaagagatagccaatacataggaataaatatatacaaggtatcatgtagtgataattgctgtggagaaaaataaagcaggggagggagtaagaaatcctggagatgaggctgcagttttaaatggggcctcactgggaatgtgacgttgagcagagacgttagggaagtggatcctggacaaggcattccaggcagaggaacaggatgtgcactgccccaaagtgagaacttgctctacgtggtcaggaaagagcagggagaccaagcagagtcgtgggcaggggtagaatggaaggagaggcggctggggaggacaggtggtggagggccttggcttctgctaagtgagatgggaaccactggagggtttgaa

SEQ ID NO: 1592 - protein, 100 aa, Homosapiens; identical to SEQ ID NO: 1586

SEQ ID NO: 1593 - DNA, 667 bp, Homosapiens
agggagaagttgtggaatatgtggatgacctcttggaactggaggagaccagctagcccacagcaaccaaagagacttcctcttggcgttcaggaaacacagattctttgtccttttcccaacagcccaggctgttgatacctcagagccttctctttactctccaaagtgaaagggaagcccccgtctctctaactgcatgtcatcaggggtgagcctgcctttcctatcttcacacctgccacctcatgttcacacctatctttctcaccttttttttgagatggagtctcgctctcttgcccaggctggagtgcaatgtggcatttaaagccatgcagctggaggggccactgagattgtctctgagtattactgagaagcaacagaaaagagccatggatggagcccttgggctctctgggaaatgggaaatcagccaaaggactgagaaggagttaccttaaggtcagagaaaaccaagagagtgtggtgttctggaagctgagctttctttattcaacctcattcccttctccaaataagccacttgtgtagttgggcccctccagggttgaaggcaagaggagaaaggcacagcgtttgggaaacaagacttttcctgcaatagcctgggaaggaataaaaggatagagtgtttgggttt

SEQ ID NO: 1594 - protein, 72 aa, Homosapiens
MFTPIFLTFFLRWSLALLPRLECNVAFKAMQLEGPLRLSLSITEKQQKRAMDGALGLSGKWEISQRTEKELP

SEQ ID NO: 1595 - DNA, 3403 bp, Homosapiens
agggagaagttgtggaatatgtggatgacctcttggaactggaggagaccagctagcccacagcaaccaaagagacttcctcttggcgttcaggaaacacagattctttgtccttttcccaacagcccaggctgttgatacctcagagccttctctttactctccaaagtgaaagggaagcccccgtctctctaactgcatgtcatcaggggtgagcctgcctttcctatcttcacacctgccacctcatgttcacacctatctttctcaccttttttttgagatggagtctcgctctcttgcccaggctggagtgcaatgtggcatttaaagccatgcagctggaggggccactgagattgtctctgagtattactgagaagcaacagaaaagagccatggatggagcccttgggctctctgggaaatgggaaatcagccaaaggactgagaaggagttaccttaaggtcagagaaaaccaagagagtgtggtgttctggaagctgagctttctttattcaacctcattcccttctccaaataagccacttgtgtagttgggcccctccagggttgaaggcaagaggagaaaggcacagcgtttgggaaacaagacttttcctgcaatagcctgggaaggaataaaaggatagagtgtttgggtttttgtgtaatggtggttaattggggtggaacactcacacgttgtgctttttctgggcttcccttatcccccagaacactctaccaacctcggggaactcgggcacatccttctgtttctccttcagctctatcctgctttcctcatcccttctgacaccacgtcctcactcacctgcacaagaatccctgcatcaggttctcctttgagggtacccacccaggacagtcccctaccacttctgtcttgggctgaagttgcccacgtccacaaaatctgtactcccagcgggggtgtttggcccgaggagtcagtgttattactggtggatgcaccgtgtccacagcagcccccaatcccagcgatgcgtcagatcttacgtggcttcctgctgggggagatggccttcacccacgggatgccgggttctcctttctttcctcaccccaacctttactccaccagagaaacttccttttgaactcagtggggaagagggtgatgagacaggactagaaagtagtgggggacccagcgagtggacgccctgctccgggattcctgagtctgtaaatagtgtgcccagcagctgtgaactccccttatagcctcaggctgcagtgtccttcccagctgtgtgagaaaatgaaagccgacgtccacagggacccaggcagggttgggtgttgtgactcactccacctctgtgccctgcagaggtactgttgggtccttgtcttgtgagcctggggtgagctctctgtacatgttgttgttccacgtatgggttgacttggcatgctggggggtcctcgttcactctctgaagttggcctcctttcactggggattgaaaagcacctccacccctaccctagtgatgtcccctgaggacccgggtgatagtacagtcaatattgtcagtactttgctttgattgaaggctgtagagctgagttaccaaaatttctatttcaaaggaaaccaaaccttaaaaaaaaaaaacaaaaactgggctgggtcttccaaacctaccatgaaaccctggtgtgcaggctgcactcaatgacctcaacccaacacctccctgagtgtgcttcttggaagagcctagaagattcctggatggagaccccattggttcagcctcaagtctggcccgtcttcgaaaaaacaaacacatttgtaagctttgtgggagcttccaggcctgctctaagatgccttgcttgtcctttgacccatcagcatggagctcagtggttgctgtttggttctgcaggctggtggggaggccgcccatcgtggtggggcatctgtccagccccattgccactcagggcatccaaacaggaggcacccgctgggaagggtctaaagatactccttgtggccactgctactgttcacacttgacttgtggagaagcgaagggctgaggggaggtttgtgtacacccatgtatttaaaagtgactgactgactgaaatgagcacataccgacatatgcaacatactaataccttcctgattttcgagactttctaattactacaactaacctgttgtgctcacctctggaattcagaaagagagccactgcgagcactgaccacaagggctgccttaggaaggaaatgtgtgctttcaggagttcttattaggggaattttaagagcacaaaaattttattgaacccaccttagtgacaaacagaaaatgatttgttagattgtcagttggaaggggtttattatgactgctggtgaaataaacagtgaccagtttctgccaacatttatggaaataacgtttctaggttttaaatgtgagccgtaaactgaagctacttcagttaaaaaaaaaaaaatcaatacttaaactgtagggaaaaggtggattggtgccagagaaaacattatttaatagtgtcagaacatggaactgcaacacagtttgtagcaaggcactgagaaaaacccacaactaatccttcatcgcagctgtctgaactcttgatcatctgccatcccccaaacagtgacttctttttttctggtgactccaggcctgaatgacctagtgtggagagtttaaactatgtacaagggaggaaagaaaaaaaggaaaggaaccttaagtaagcctcagccaaaggttttatgcattggacttcctgtgcctgcccccaggggcaagactgatccccatgcctgtgcccatgacatctccctgaaagaggacaccatgacagcccggctttgccttgactgacccactgctaccccagaaataagaatcaagagcagctattgttatccttagagtgttttccgtctagggccggctcgtgaacagccacatatccttgcacctgacactgtccccacacaaatagctggctttcgttgcttgttgaatgaatgagtgagttggctctatatccccttggagctggccggtaagatattagtgcctcattttacaagaagagaataggaaggaattaagcaatttggccaacagatacaagatagattccagagttttatctcccactttagggtggcagccagtaggccaaactccaaagaccgttgctgatgtctttttctgcctcccctctttgggttagtgtggtatgtacaagctcactcttgttgaaaattagaaaatagttgaaaacaaaaggtttttgtttttctttttaaatcacattaaatgttttacattgctta

SEQ ID NO: 1596 - protein, 72 aa, Homosapiens; identical to SEQ ID NO: 1594

SEQ ID NO: 1597 - DNA, 354 bp, Homosapiens
caggcttgggcctgggccacagcaacagcagtggtcaaatatctagatttattttgaaaagagccaataggatttgctgagagtttgaatgtggagtgtaagagaaggaagagttaatgatgacattaaggtttttggccaacagatacaagatagattccagagttttatctcccactttagggtggcagccagtaggccaaactccaaagaccgttgctgatgtctttttctgcctcccctctttgggttagtgtggtatgtacaagctcactcttgttgaaaattagaaaatagttgaaaacaaaaggtttttgtttttctttttaaatcacattaaatgttttacattgc

SEQ ID NO: 1598 - protein, 45 aa, Homosapiens
MMTLRFLANRYKIDSRVLSPTLGWQPVGQTPKTVADVFFCLPSLG

SEQ ID NO: 1599 - DNA, 5070 bp, Homosapiens
atgaggataatcatctgcccctttagcaccaatcactttttcaattactgcgtcaccctctcgccaagggtcccccagacgggcgggggctccttgcggccggctagctactctccccgcctccctgcgccctcgccctccgccccgctgtacccgcagagcgcgcggcccagcgcagccccttttggcaccgaggtttccaggtgcccagcgcgaaggcggagccgggttacagccgcctcctcggcgccacagagaagacccccgggagttcggcggcccaggcgctccggctctgcgtcccgagcctcccccggctctccgcgctcctccctctcggcgcgcccggcgcgaagcctgcgattcgtgagccgagcgcagagcgcagagccgagtggcgcacgctgggcagtggcctgggcaaccccaaacgcagccagagccctcacccgagtccgctggcccgcgcactcccggaccatgactgccgagggacccagcccgcctgcccgttggcacagacgcctccccgggctctgggcggcggcgctgctcctgctcggtctgccgcgcctttcggtgcgggcggatggaaagttctttgtgctggagtctcagaatggctctcagggcctacaactggaggctgctcggctttcctgcaagagcaggggcgctcacctggcatctgcagacgagctgcggagagtggtacaggattgctcctttgcggtgtgcaccactggctggctagcagatggtactcttggaacaactgtgtgtagcaaaggaagtggagaacagcaaatcatgagagctgtcgatgtgagaattgagagcaacccagttcctggtggcacatacagtgccctttgtattaaggatgaagagaagccgtgtggagacccgccttcgttcccacacaccatcctgcagggccgcaccggcttggaaatgggggatgaactgctgtacgtgtgtgccccaggccacatcatgggccaccgggagaccgccttcaccttgctatgtaacagctgtggggagtggtacggcctggtgcaggcctgtgggaaagatgaggctgaggcacacattgactatgaagataacttccctgatgacagatctgtgtcattcagagagctcatggaggattcccggacagaggcagatgaggacaggggtcagggagactcctctgaggaggctccaaaacaggaccgtctggtctccatttctgtggggagagaaaacatagcccgggataaagtctttgtgccaaccacaggcttgcctggtgctgggagcagtgtccccgcagattcaccaggatcacggctgctccagaagcacttgttctggtttcctgctgaggctttccacaagcctgggttggaaaaggaggtggatgatgacaccaaaaagcagttttctgctggagacaaccacagtggtgtaaaattggtcccaggtgaacctgaaaccaaggtgatctacggcaacactgatggtccctcggggccatttgtgggcaagaatgacagcaaggcaggagatccagtggtgagcagcagtgatgagtcctggttagatggctaccctgtgacagagggggcttggaggaagacagaggcagaagaggaagaagatggggacagaggggatgggtcagtagggctggatgaaaacgtcctagttactcctgatcagcccattcttgtggaagttaagaagcccaagagtagcaccctcacaccaagcgagggcatgacccatagttcagttcttccatctcaaatgctagatgtggaagctttggcgctcagacccgtgaatgcttccgagactgagggcattggggatggtgacttgacgaagtaccagtcaactctaccctggagattcatcacagaggaatctcccatggccaccctgtcctatgagctcaccagctccaccctggagatattaacagtgaacactgtcaagcagacacctaaccacatcccctcaacgatcatggcaaccacccagcctccagtagaaaccactgttcctgagatccaggatagcttcccatacctgctgtctgaagacttctttggacaggaaggccccgggccaggtgcaagtgaggagcttcatcccaccttggagtcgtgtgtgggggacggatgtcctggcctcagcagaggccctgtgatcgccaccattgtcaccgtcctgtgcctactgctgctcctggcaggtgtggggatggtgtggggctaccgcaagtgccagcacaagagctctgtgtacaagctgaatgttggccagcggcaggctcggcactaccaccagcagatcgagatggagaaggtctaggcacctttggagtgggttctcccaaagccacttgggaggaaaataactgtgacacatcacacgataattcactagagcatgacgcaggtggactgaggctcatcattttttcctcagccctttgttttataggctgagaagtgtctctggagcacctgggagggcagggaggctttggtgacatcatcactcatgtcaatgtctcctccaccatctgccctggaattgactacactaatcccagacctgtgcttgggccctgtttccagtgtgaggtcaaaaatcgcctcttccttcatcacagtattatctttttttttttgagacagagtctcatgctgttgcccaggctggagtgcagtgtcccgatctgagctcactgcaacctctgcctcccaagttcaagcaattctcctgcctcagcctcccaagtaggtgggattacaggcatgcaccaccatgcccagctaatttttttatatttttagtagagatggagtttcaccatgttggccaggctggtcaagaactcctgacctcaagtgatctgccctccttagcctcccaaagtgctaggattccaggtgtgagccacatcacagtattacctttttgaagaaagaaaatcaccagcttcatgccctgaaattttataaatagtcatgataaaccaagtgtatgagagcagtattatctaggacatggatattgaattattgggagaggaatatggaagaataatgggttgtttccttttaatgttgtgatgttgctgagggcagatgaaccaagagccaggacacagtctagaagctttgaggtttcttttttcattgtttcttgaaattagaatttaagactgacattttgttgggggagttgaggagtgaagaaacacacatccccctctgttccctccattctgtgggacagtctgtcatttattttattttattttcaatatttcatggttaaggatttgccattattttttaaaaacaaagttagctttgtaccagtaagtaccatttcctctcagaagcagtggcctagttgtccttgaccagtctgtgcctaggaatgtcttggaatttttgccaggactaacaaaactcagtccttggtttcctctctcaggattaaccatttctctgaactccagtaagagagaatgacacgggagaaaaaaaaaagaaatgttttcagagggccgaacaccaggttatcaagtatgggcacatacttgatggagaagcagaagaatctgtgaaagaatatgaaatgatctgtgctgatctgttctctagtgtggaaactgggagctctgtggaaacagaatccatcctgtctgttgggtaacccatttcgtagcatctaaatcatcttagggtggctcagcgaggatggtttatggcagtggttctcaaagtgtggtcctcagaccagtagcatcagcgtcacctgggaatttgttggagatgcaaattctctagtcccaccctggactcaggaaacaggaaccctgggagtagggcccagttctgtttttaacaagccctccaggtgattttgatatgcactcaagtttgagagcctgttggtttataataatctcaaatgtgaacttcgaggccagctgaagccctaaaggcacagatgagtatgtggtgtgtgttgtgtggaagtcaggcatggctgtgtgcagctgaggtggcatttgaagctgcctaaatgccacctgcaatagtctcctgtatgttggcacagaaatgaaacatgttatatttttctaatatgaatcaccttcttagaaatagttatcagtggtaaaaagtgatgaatgcaacacatttattttgagacaccatagcagtctaagtgtttttgtgtggtagagggaaatcctgatcttttttatgattgaaaaattgttggtggtgttttacctaaggaaaaaaaacattcgcaacatgttttctaccctgccacctcttttcagcaagctttggaaaagtaataggcgaagtagctgtaaagagaggcagcataatcaaagatcttattccccatagttgggtaaaataaagcctgaaggtaccaactagaatacctgtgcatcagacgaagtcaagaacaataggaataaaatgctttctgcatgtagccaaagcaaaacataatagaataaaagccagagactgtatatatttataaattagatcctaatctactgcaagataacttttctatttttaactatataaaataacctctgtctcagcattgggactgtgttagcaactattattgtggaataacccagaacattggatttataccaacaaataggcaatattaatacagtgtattaataaatttattacaaattattaatacagtgtattaataaatttattacaaattattaatacaggtaaatgttttatttgtagacatggactgtgaaataaacccaacacatcagtttttaagttcttattggtgtggtatcctctaaattaatgttatagaatctaaaaattcatgttgaaagggaatgattaaaacaatgtaaatctaaattgtatgtcatgcatgttttgagaatggtgaatgtttaatgctcatgaaaattgggggagggggttctattaacacaaagcttctgagatatttaaaataaataattattgccccaac

SEQ ID NO: 1600 - protein, 789 aa, Homosapiens
MRIIICPFSTNHFFNYCVTLSPRVPQTGGGSLRPASYSPRLPAPSPSAPLYPQSARPSAAPFGTEVSRCPARRRSRVTAASSAPQRRPPGVRRPRRSGSASRASPGSPRSSLSARPARSLRFVSRAQSAEPSGARWAVAWATPNAARALTRVRWPAHSRTMTAEGPSPPARWHRRLPGLWAAALLLLGLPRLSVRADGKFFVLESQNGSQGLQLEAARLSCKSRGAHLASADELRRVVQDCSFAVCTTGWLADGTLGTTVCSKGSGEQQIMRAVDVRIESNPVPGGTYSALCIKDEEKPCGDPPSFPHTILQGRTGLEMGDELLYVCAPGHIMGHRETAFTLLCNSCGEWYGLVQACGKDEAEAHIDYEDNFPDDRSVSFRELMEDSRTEADEDRGQGDSSEEAPKQDRLVSISVGRENIARDKVFVPTTGLPGAGSSVPADSPGSRLLQKHLFWFPAEAFHKPGLEKEVDDDTKKQFSAGDNHSGVKLVPGEPETKVIYGNTDGPSGPFVGKNDSKAGDPVVSSSDESWLDGYPVTEGAWRKTEAEEEEDGDRGDGSVGLDENVLVTPDQPILVEVKKPKSSTLTPSEGMTHSSVLPSQMLDVEALALRPVNASETEGIGDGDLTKYQSTLPWRFITEESPMATLSYELTSSTLEILTVNTVKQTPNHIPSTIMATTQPPVETTVPEIQDSFPYLLSEDFFGQEGPGPGASEELHPTLESCVGDGCPGLSRGPVIATIVTVLCLLLLLAGVGMVWGYRKCQHKSSVYKLNVGQRQARHYHQQIEMEKV

SEQ ID NO: 1601 - DNA, 2373 bp, Homosapiens
ggcgtcaccaggacaacgggcgtcgccggcgccgtgtgacttcgggctgtgggctcgctcgcggctcttcggccatggttttctcaaacaatgatgaaggccttattaacaaaaagttacccaaagaacttctgttaagaatattttccttcttggatatagtaactttgtgccgatgtgcacagatttccaaggcttggaacatcttagccctggatggaagcaactggcaaagaatagatctttttaactttcaaacagatgtagagggtcgagtggtggaaaatatctcgaagcgatgcggtggattcctgaggaagctcagcttgcgaggctgcattggtgttggggattcctccttgaagacctttgcacagaactgccgaaacattgaacatttgaacctcaatggatgcacaaaaatcactgacagcacgtgttatagccttagcagattctgttccaagctgaaacatctggatctgacctcctgtgtgtctattacaaacagctccttgaaggggatcagtgagggctgccgaaacctggagtacctgaacctctcttggtgtgatcagatcacgaaggatggcatcgaggcactggtgcgaggttgtcgaggcctgaaagccctgctcctgaggggctgcacacagttagaagatgaagctctgaaacacattcagaattactgccatgagcttgtgagcctcaacttgcagtcctgctcacgtatcacggatgaaggtgtggtgcagatatgcaggggctgtcaccggctacaggctctctgcctttcgggttgcagcaacctcacagatgcctctcttacagccctgggtttgaactgtccgcgactgcaaattttggaggctgcccgatgctcccatttgactgacgcaggttttacacttttagctcggaattgccacgaattggagaagatggatcttgaagaatgcatcctgataaccgacagcacactcatccagctctccattcactgtcctaaactgcaagccctgagcctgtcccactgtgaactcatcacagatgatgggatcctgcacctgagcaacagtacctgtggccatgagaggctgcgggtactggagttggacaactgcctcctcatcactgatgtggccctggaacacctagagaactgccgaggcctggagcgcctcgagctgtacgactgccagcaggttacccgtgcaggcatcaagcggatgcgggctcagctccctcatgtcaaagtccacgcctactttgctcccgtcaccccaccgacagcagtggcaggaagtggacagcgactgtgcaggtgctgtgtcattctctgacagcagctgcctgggcccaaggggtgatgaggcatcctttcctctagaagacctgagtcttcctgaccgactccaccatcacccaatctgttgattctccattgggaaaggcatttacaggtaaaagacttctgtatggattgcagttactctggtgatagttttcacctttattctgctgtgaaacaatcaaatcaaagccttgtgtcagttaacacatgacaagtggtctcaatgcagctaggaccatgccagaaacctggatctcttaagagattggtacctacctaggtacgaaagttctacccttggcatactcagcattcctcaaaaagaccatcagtgttagcacaaactgagcagaaaaaataagctgttgattttctacctgatacttaagccagtggcctactttaattcacaattccattttgattagcaggacttttccactttgaagataaatagcaactttatcaaagtgactgtactgcaaattaattcataatgcctgatagttttatatatagagacttatgtggaaggcatgttaataggtttccatgagacaccaaagaaaagaggactctatactgggtggagcagggtcttcacctttttgtttctgtcaacttgtcatatacacctccagggaccaaaaacaaaagcagctcggagtctgtgttgcctgattggaaagtagaagctctggtgtatgctacagcacataacacatttttactaaaggaaaaaagctaattatgtccatgcctctcgtaaaactggggggaaccttaaagagaaagaactaaggcttaagttatctgtagtataatcaattagaagtaatgaatggatgcatgtaaaatggatgtgattttttttcaagcttattttgaaatcttaaaaatcaggttacaccatagctactcaaaagttttacacacttaaaactcagatcagtaagtgttggtaccttttagactcataaaattgaataaaccattgcaatgctttaaaaaaaatt

SEQ ID NO: 1602 - protein, 423 aa, Homosapiens
MVFSNNDEGLINKKLPKELLLRIFSFLDIVTLCRCAQISKAWNILALDGSNWQRIDLFNFQTDVEGRVVENISKRCGGFLRKLSLRGCIGVGDSSLKTFAQNCRNIEHLNLNGCTKITDSTCYSLSRFCSKLKHLDLTSCVSITNSSLKGISEGCRNLEYLNLSWCDQITKDGIEALVRGCRGLKALLLRGCTQLEDEALKHIQNYCHELVSLNLQSCSRITDEGVVQICRGCHRLQALCLSGCSNLTDASLTALGLNCPRLQILEAARCSHLTDAGFTLLARNCHELEKMDLEECILITDSTLIQLSIHCPKLQALSLSHCELITDDGILHLSNSTCGHERLRVLELDNCLLITDVALEHLENCRGLERLELYDCQQVTRAGIKRMRAQLPHVKVHAYFAPVTPPTAVAGSGQRLCRCCVIL

SEQ ID NO: 1603 - DNA, 3002 bp, Homosapiens
ggcgtcaccaggacaacgggcgtcgccggcgccgtgtgacttcgggctgtgggctcgctcgcggctcttcggccatggttttctcaaacaatgatgaaggccttattaacaaaaagttacccaaagaacttctgttaagaatattttccttcttggatatagtaactttgtgccgatgtgcacagatttccaaggcttggaacatcttagccctggatggaagcaactggcaaagaatagatctttttaactttcaaacagatgtagagggtcgagtggtggaaaatatctcgaagcgatgcggtggattcctgaggaagctcagcttgcgaggctgcattggtgttggggattcctccttgaagacctttgcacagaactgccgaaacattgaacatttgaacctcaatggatgcacaaaaatcactgacagcacgtgttatagccttagcagattctgttccaagctgaaacatctggatctgacctcctgtgtgtctattacaaacagctccttgaaggggatcagtgagggctgccgaaacctggagtacctgaacctctcttggtgtgatcagatcacgaaggatggcatcgaggcactggtgcgaggttgtcgaggcctgaaagccctgctcctgaggggctgcacacagttagaagatgaagctctgaaacacattcagaattactgccatgagcttgtgagcctcaacttgcagtcctgctcacgtatcacggatgaaggtgtggtgcagatatgcaggggctgtcaccggctacaggctctctgcctttcgggttgcagcaacctcacagatgcctctcttacagccctgggtttgaactgtccgcgactgcaaattttggaggctgcccgatgctcccatttgactgacgcaggttttacacttttagctcggaattgccacgaattggagaagatggatcttgaagaatgcatcctgataaccgacagcacactcatccagctctccattcactgtcctaaactgcaagccctgagcctgtcccactgtgaactcatcacagatgatgggatcctgcacctgagcaacagtacctgtggccatgagaggctgcgggtactggagttggacaactgcctcctcatcactgatgtggccctggaacacctagagaactgccgaggcctggagcgcctcgagctgtacgactgccagcaggttacccgtgcaggcatcaagcggatgcgggctcagctccctcatgtcaaagtccacgcctactttgctcccgtcaccccaccgacagcagtggcaggaagtggacagcgactgtgcaggtgctgtgtcattctctgacagcagctgcctgggcccaaggggtgatgaggcatcctttcctctagaagacctgagtcttcctgaccgactccaccatcacccaatctgttgattctccattgggaaaggcatttacaggtaaaagacttctgtatggattgcagttactctggtgatagttttcacctttattctgctgtgaaacaatcaaatcaaagccttgtgtcagttaacacatgacaagtggtctcaatgcagctaggaccatgccagaaacctggatctcttaagagattggtacctacctaggtacgaaagttctacccttggcatactcagcattcctcaaaaagaccatcagtgttagcacaaactgagcagaaaaaataagctgttgattttctacctgatacttaagccagtggcctactttaattcacaattccattttgattagcaggacttttccactttgaagataaatagcaactttatcaaagtgactgtactgcaaattaattcataatgcctgatagttttatatatagagacttatgtggaaggcatgttaataggtttccatgagacaccaaagaaaagaggactctatactgggtggagcagggtcttcacctttttgtttctgtcaacttgtcatatacacctccagggaccaaaaacaaaagcagctcggagtctgtgttgcctgattggaaagtagaagctctggtgtatgctacagcacataacacatttttactaaaggaaaaaagctaattatgtccatgcctctcgtaaaactggggggaaccttaaagagaaagaactaaggcttaagttatctgtagtataatcaattagaagtaatgaatggatgcatgtaaaatggatgtgattttttttcaagcttattttgaaatcttaaaaatcaggttacaccatagctactcaaaagttttacacacttaaaactcagatcagtaagtgttggtaccttttagactcataaaattgaataaaccattgcaatgctttaaaaaaaattaagtcagagggttttattgctatgattttatggcagacacatccaagcaaaaccattttccaaatgcagaccttcctgatgttatctgaaatctgataaaatgaccctactctctgctgtggttcattcttgctccatgctgtccatatttatgatctttattaagaacctgtcaatcagtcatcaccaccttcattgtaaacttaggtgttcatggtggctggcccttccaaacaaccactcccccaaactgaagggccagagctcatgagaaacttaaaagtgaaacggcaaaagcaagatgtgttcccatgactaccaatacctttattaggcagttttagaagtgtttttaaggatatattatgtcagctgcattctaggaagagaagcagattatatatatatataatctccccataaacggacttagcacaattatcatcagagtaagcattaaagtcattttattgccttatgatatattccagtattccttggtctaaaaattgtgtggataccatagcagttagttaaatatacatttatacccactgtttgttgtggaagagatgatgggggaggaggactgatgcaggaagcaacttcaataaatgagcatataacag

SEQ ID NO: 1604 - protein, 423 aa, Homosapiens; identical to SEQ ID NO: 1602

SEQ ID NO: 1605 - DNA, 699 bp, Homosapiens
ggcttttctcacatataacatattacagtaaattactgcaatatttgaaacacttatatcttcataaaattcagtttctgaaactcttgccagctccattaatttgtcacttaaaaagcaattcgcaatttaaaaaagaaacatacacaaaataaaggcattacatggtactgtgatttatgggtgatgtttttctcctgccagcaataatgccacacatttggaagttgcttttccagagtcaatgagagccagctggcactcggggagcaccctgcattctcagctcatcagcacttccactaaactcctgcagataaggagaaaatctccacttaattactcatggttaaaacaaaactaagtatttccctattacctacacctaccgccatacctcctcaagtattctataccaagggtgtgtccccaagcaaggagtctagctcctctcttctcttacaccccgtgaaggcctctggagaattatgccttcggttggcaattctctgaacttgtctgttcaagccagcacctccgccgagtgaaaccgagcaacgtttttaaaacgagcttaaagggggccaggtgttatgcccacgccgtctgaagttaactgaacaaaggtaatgatttaagacgtttacaatgcactaattatgaattaattaaatcccttagtgagggtgcggcactcag

SEQ ID NO: 1606 - protein, 39 aa, Homosapiens
MRASWHSGSTLHSQLISTSTKLLQIRRKSPLNYSWLKQN

SEQ ID NO: 1607 - DNA, 979 bp, Homosapiens
gagacagggtctcactttgtcacccagactggagtgcaatggtgcaatcatagctcactacagcctcgacttcctgagctcaaaccatccacctgccccagcctcctaagtagatgggaccacaggagcgtgccaccacacctggctaatttttaaatttttttgtagagacagggtctcatcatattgcccaggctggtctccaactcctgggaacagaacgagactctgtcacacacacacaaacacacacacacacaaacacacacacacacacaaatatatctatatcatataaagtatatattataaaatattctatgttgtatatatataatatatatatcttacatgtacctgaaaatatgtacatctgttatgtatcaataaaaggtttttaaatactttaaatgaactagctaatgcacccggtttcatttgctataataatggaagtacagggtagttgatattctaacctatagaccagactatgtaccatactattaattgtcataaaagaaaaaaacacctgaatttaggattctgtaactttggaatgggactagcatgaaagcataaatagaaaaaatggttacaatcaagtaaaacagagaagtaaatatgttgttaaagaaagtcatcttaggatacctgtaacattccagttacaggtatcctaagattaggcaaagcagataccaggctgtctgtaatggctagtggccctcacagagaaaggagatgaggtctttgagcctgaggaattggatatgtgaccactacaccatgcagggaccctggaaaggctccctccccctgttcttcttaaacagagaaatccctgtttcttctcagggctctgggtgaagcgggggaagtttgtcttgagaaatctagtggtatttatagatgattcagaaattccaagctaagaaattaaattaaaactgatgctagaaggatgaaacctttggga

SEQ ID NO: 1608 - protein, 41 aa, Homosapiens
MRSLSLRNWICDHYTMQGPWKGSLPLFFLNREIPVSSQGSG

SEQ ID NO: 1609 - DNA, 5019 bp, Homosapiens
gccgacgccgctgcgctcccgcctcctgtcggttcccgggttcccgctgcggctgcggttctggcagccgagcccccgcggtgctgcagcccagctttagcgcgcagaccgacccgcgccccttcttcgccgccggcagcctctaatccacgcggcgcgttgcggcaggtgccctgggcgtactgaggcgcggtggcctgagcccggccgccatcgatgaccccggtcgcggacttgcttcaggctggccaccccccgtcttgtttcatcatctgtgttgagtaaccatggggaggaagctggacctgtctggtttgactgatgatgaaacagagcatgttcttcaggtggttcaaagagacttcaatcttcgcaaaaaagaagaagaacgactaagtgagctgaagcagaagctggatgaggaaggcagcaagtgcagcatcctctcgaagcaccagcagtttgtggagcactgctgcatgcgctgctgctcgcccttcaccttcctcgtcaacaccaagcgccagtgtggagattgcaaattcaatgtctgcaagagctgctgctcctaccagaagcacgaaaaggcctgggtctgctgcgtctgccagcaagcgaggcttctgagggcccaatctctggaatggttctacaataatgtgaagagccgcttcaagcgctttggcagtgccaaggttctgaagaacctgtacaggaagcaccggctggagagtggcgcgtgcttcgacattctaggaggaagcctttttgagtcaaacctggagaatgaaggaagcatttctggcagtgattcaacattttataggcagtcagaaggacatagtgtgatggacaccttggctgtggccctacgggtggctgaagaggccattgaggaagcaatttccaaagcagaggcatatggggacagcctggacaagcaaaatgaggccagttacctgcgggaccacaaggaggagctaactgaggaactggccacgacaatcctgcagaagattatacgaaaacagaagagcaaaagtgagcagcaagtggaagaagagccaggatggccacatccccagagttgcagcacaaaggtggcagatgaggggacctcagcatcccctggaggctaccgtgctcccgctgccctctggaggtcccagtctgccttctcaatcactggagaagaagccctgaagacccctccagtggaggctccatcgaggcagccaagggaccaaggccaacacccgagagcagagtctgctctgcccagctggaagagtgtggacaggctggatgaaacaaacctggccccagttttgcagagccccgacgggaactgggtggccctgaaggatggcgctccaccccccacccgactactggccaaacctaagagcgggacgtttcaggccctggaggtggcctccagtgtggcatctgcctacgatgagatgggctccgatagcgaggaagactttgactggagtgaggccttgagcaagctgtgtcccaggtcccgggccctgcccaggaacccccagcctcagcccacacaggcccagagctctgaccaaggccccatagctgcctccccatcctctgcactctcccccaaccctgaggccatgtgctctgactcggagacctcctccgcaggctcttcccgagaagttgggcaccaggccagactgtcctggttgcagaggaaggcccccaggaaccctgcagctgagaagatgcgcttgcatggagagctggacgtgaacttcaacccccagttggccagcagggagacctcggacagcagcgagccggaggaggccccccacaccacagaccggcgggccaggaggtggagaagagcccgactgggctcagaagagccaagcaaagaaccatcttcccccagcgcccagctccgggatctagacacacatcaggtgtcggatgatttatcagagacagacatcagcaatgaggctcgggatccccagactctcacagacaccacagaggagaaacggagaaacaggctgtacgagttagcaatgaaaatgagtgaaaaggagacttcttcaggggaggatcaggagtctgagcccaagacagaatctgagaaccagaaggaaagtctgtcctctgaagacaacagccagagtgtccaggaagagctgaagaagaagttttctgctgtttctctctgcaacatctccacagaagtcctgaaagtcatcaatgccacagaggagttgatagcaggatctacagggccctgggagtccccacaagtccctcctgacagacagaaggggatgtttcctcgtgggacagaccaagtgagactggatgagcagctgacttccctggaagaaaatgtatacctggcagcaggcactgtgtatggactggagacccagctgactgagctagaagatgccgcccgctgcatccacagtggcactgatgagacccatctggcggatctggaggaccaggtggccacggctgcagcccaagtccaccatgctgaactccagatttcagatattgagagccggatttcagccctgaccattgcaggattaaacatagcaccatgtgtgcgcttcacaagaagacgggatcagaagcaaaggacccaggtacaaaccatagatacatcaaggcagcaaaggaggaaactgcctgctccaccggtgaaagctgaaaaaattgagacatcttcagtgactaccattaaaacatttaaccacaacttcattctccaaggctcctcaacaaacaggactaaggaaaggaaaggcaccaccaaggatttgatggagcctgctctggagtcagctgtgatgtactgacaccatggaattccactgccagtgacccactgcctccggccgtacacgacagtgccttgacccaacagccatcgagtactgtatgtatttccacctgaggagaaggcctggggaggccacagtgcaccattgcacagggctgtcctgatacctcatccagaaagccgtctcagacttcagcactgcggtcttgcccactctctgccttaggctcccaggggaatccaagacagaaaatgaagacactggcttccaacagcagcgctccatgtttaagatacatattttccctgtttgctttgctactgtatgttgactttaagatctttttttaaatacatttgattcagctagtattccatgtcaacaatttgtccaaaggaaaactgctggagggaggtggagggaggaaggtgggaattattatttaatacatcattaatgcttattaatctctcacaagcatctttgtcttgcaaatcctaagggaaaagcaagtccctgcagtgagcactagggacagtctaatttggggattgctcaaccatcaagactgcaggtctcccttcagccacctccttcctgctaaaagcttagcctaccacactaccagtcattcccatcgctttgcaatcacaagccacaggatgagaagttctgactcactcatgccatgcccagggctatctgaaacaatgtctcattaagaatttagggttcttccatgggcttactgacagttgcccagatctgaaggggaaagggtcttgagaaagaccatcactggctcaactttagggcactgtccagagtcaacatgatgtggtttagcagtgatcacatctaaacaaagtttaggtaaatgaattatcgcagagaaaaaccacatgagaaaatttttgtactccaaatttacttcccaataaatattcagcaaagtagtaaaatgaccttaaagataaaaatgattagggaatagccttagaaaatttataggtataaaaaattcaaggacaaactgtgcatttaatggacacaagaattgactctaactccatgtctgtggtttctttgaacccatatcaaatgtatgactatttagagtgtttataagagataatggaactgaactttcactcaattaattgggcattaacaaccttcttttatgtttgttcctgatatagtctgaatcttaggaagaaggtaaaagaaaggaggcaagagaatagttatgatgaatatgtgttaagtgcctgctctgaaggaggcaatgttcttctcatttgaatccttatggcaaccttattcaataggttttcccatatttcagatttaataactgaaggccagagagattaatttgccaaagccacacctttatgctaattatgattggaatgcatcacaaaagcctaactctgttgttttcaacctctacgttattttgctgctatgtgcatttccagatctgattttctgctaacttgtgtgctatgatccactcctgatgggggtctacattaatcttccagtactccttgctgatgctgtgttatgtgtcatctaacagaaatgactcctttgaaataagtaaatctttggctttttgttctgttggtgtgattcaaagcaaaacaaacaaacaaaaacaaattttaagaacacaacaaaaaagatttgacttccgaatagaatgttttctttaagaggcatgaaaagcaactattgttgtgttacagtgttaaaaatattcagttttctttgacaaaaatgtgtactgtgtaagccttgcaaacaaaaaacaacaaaaaagaagcagcagcagcagcctgctgtgtggcatctgaacttttataaaggtttccttgtgccaaataagtgcaaagatttaatttactattaaaaaccataagcatatgttatagttccagaagaattattttgtcatcaagtgattttgatctttagtgtcaatatttatatttagattaatttttataaatgaaaatattttaatggtttaagaaaatgaggacaacaggataatatctttgatgacttctgaaagttatgcttcccttcatgttatatgcacattgccaagaattactgtcaagagaaatgataagtaaaagtcatttatgaaaat

SEQ ID NO: 1610 - protein, 859 aa, Homosapiens; identical to SEQ ID NO: 127

SEQ ID NO: 1611 - DNA, 4824 bp, Homosapiens
gccgacgccgctgcgctcccgcctcctgtcggttcccgggttcccgctgcggctgcggttctggcagccgagcccccgcggtgctgcagcccagctttagcgcgcagaccgacccgcgccccttcttcgccgccggcagcctctaatccacgcggcgcgttgcggcaggtgccctgggcgtactgaggcgcggtggcctgagcccggccgccatcgatgaccccggtcgcggacttgcttcaggctggccaccccccgtcttgtttcatcatctgtgttgagtaaccatggggaggaagctggacctgtctggtttgactgatgatgaaacagagcatgttcttcaggtggttcaaagagacttcaatcttcgcaaaaaagaagaagaacgactaagtgagctgaagcagaagctggatgaggaaggcagcaagtgcagcatcctctcgaagcaccagcagtttgtggagcactgctgcatgcgctgctgctcgcccttcaccttcctcgtcaacaccaagcgccagtgtggagattgcaaattcaatgtctgcaagagctgctgctcctaccagaagcacgaaaaggcctgggtctgctgcgtctgccagcaagcgaggcttctgagggcccaatctctggaatggttctacaataatgtgaagagccgcttcaagcgctttggcagtgccaaggttctgaagaacctgtacaggaagcaccggctggagagtggcgcgtgcttcgacattctaggaggaagcctttttgagtcaaacctggagaatgaaggaagcatttctggcagtgattcaacattttataggcagtcagaaggacatagtgtgatggacaccttggctgtggccctacgggtggctgaagaggccattgaggaagcaatttccaaagcagaggcatatggggacagcctggacaagcaaaatgaggccagttacctgcgggaccacaaggaggagctaactgaggaactggccacgacaatcctgcagaagattatacgaaaacagaagagcaaaagtgagcagcaagtggaagaagagccaggatggccacatccccagagttgcagcacaaaggtggcagatgaggggacctcagcatcccctggaggctaccgtgctcccgctgccctctggaggtcccagtctgccttctcaatcactggagaagaagccctgaagacccctccagtggaggctccatcgaggcagccaagggaccaaggccaacacccgagagcagagtctgctctgcccagctggaagagtgtggacaggctggatgaaacaaacctggccccagttttgcagagccccgacgggaactgggtggccctgaaggatggcgctccaccccccacccgactactggccaaacctaagagcgggacgtttcaggccctggaggtggcctccagtgtggcatctgcctacgatgagatgggctccgatagcgaggaagactttgactggagtgaggccttgagcaagctgtgtcccaggtcccgggccctgcccaggaacccccagcctcagcccacacaggcccagagctctgaccaaggccccatagctgcctccccatcctctgcactctcccccaaccctgaggccatgtgctctgactcggagacctcctccgcaggctcttcccgagaagttgggcaccaggccagactgtcctggttgcagaggaaggcccccaggaaccctgcagctgagaagatgcgcttgcatggagagctggacgtgaacttcaacccccagttggccagcagggagacctcggacagcagcgagccggaggaggccccccacaccacagaccggcgggccaggaggtggagaagagcccgactgggctcagaagagccaagcaaagaaccatcttcccccagcgcccagctccgggatctagacacacatcaggtgtcggatgatttatcagagacagacatcagcaatgaggctcgggatccccagactctcacagacaccacagaggagaaacggagaaacaggctgtacgagttagcaatgaaaatgagtgaaaaggagacttcttcaggggaggatcaggagtctgagcccaagacagaatctgagaaccagaaggaaagtctgtcctctgaagacaacagccagagtgtccaggaagagctgaagaaggtatacctggcagcaggcactgtgtatggactggagacccagctgactgagctagaagatgccgcccgctgcatccacagtggcactgatgagacccatctggcggatctggaggaccaggtggccacggctgcagcccaagtccaccatgctgaactccagatttcagatattgagagccggatttcagccctgaccattgcaggattaaacatagcaccatgtgtgcgcttcacaagaagacgggatcagaagcaaaggacccaggtacaaaccatagatacatcaaggcagcaaaggaggaaactgcctgctccaccggtgaaagctgaaaaaattgagacatcttcagtgactaccattaaaacatttaaccacaacttcattctccaaggctcctcaacaaacaggactaaggaaaggaaaggcaccaccaaggatttgatggagcctgctctggagtcagctgtgatgtactgacaccatggaattccactgccagtgacccactgcctccggccgtacacgacagtgccttgacccaacagccatcgagtactgtatgtatttccacctgaggagaaggcctggggaggccacagtgcaccattgcacagggctgtcctgatacctcatccagaaagccgtctcagacttcagcactgcggtcttgcccactctctgccttaggctcccaggggaatccaagacagaaaatgaagacactggcttccaacagcagcgctccatgtttaagatacatattttccctgtttgctttgctactgtatgttgactttaagatctttttttaaatacatttgattcagctagtattccatgtcaacaatttgtccaaaggaaaactgctggagggaggtggagggaggaaggtgggaattattatttaatacatcattaatgcttattaatctctcacaagcatctttgtcttgcaaatcctaagggaaaagcaagtccctgcagtgagcactagggacagtctaatttggggattgctcaaccatcaagactgcaggtctcccttcagccacctccttcctgctaaaagcttagcctaccacactaccagtcattcccatcgctttgcaatcacaagccacaggatgagaagttctgactcactcatgccatgcccagggctatctgaaacaatgtctcattaagaatttagggttcttccatgggcttactgacagttgcccagatctgaaggggaaagggtcttgagaaagaccatcactggctcaactttagggcactgtccagagtcaacatgatgtggtttagcagtgatcacatctaaacaaagtttaggtaaatgaattatcgcagagaaaaaccacatgagaaaatttttgtactccaaatttacttcccaataaatattcagcaaagtagtaaaatgaccttaaagataaaaatgattagggaatagccttagaaaatttataggtataaaaaattcaaggacaaactgtgcatttaatggacacaagaattgactctaactccatgtctgtggtttctttgaacccatatcaaatgtatgactatttagagtgtttataagagataatggaactgaactttcactcaattaattgggcattaacaaccttcttttatgtttgttcctgatatagtctgaatcttaggaagaaggtaaaagaaaggaggcaagagaatagttatgatgaatatgtgttaagtgcctgctctgaaggaggcaatgttcttctcatttgaatccttatggcaaccttattcaataggttttcccatatttcagatttaataactgaaggccagagagattaatttgccaaagccacacctttatgctaattatgattggaatgcatcacaaaagcctaactctgttgttttcaacctctacgttattttgctgctatgtgcatttccagatctgattttctgctaacttgtgtgctatgatccactcctgatgggggtctacattaatcttccagtactccttgctgatgctgtgttatgtgtcatctaacagaaatgactcctttgaaataagtaaatctttggctttttgttctgttggtgtgattcaaagcaaaacaaacaaacaaaaacaaattttaagaacacaacaaaaaagatttgacttccgaatagaatgttttctttaagaggcatgaaaagcaactattgttgtgttacagtgttaaaaatattcagttttctttgacaaaaatgtgtactgtgtaagccttgcaaacaaaaaacaacaaaaaagaagcagcagcagcagcctgctgtgtggcatctgaacttttataaaggtttccttgtgccaaataagtgcaaagatttaatttactattaaaaaccataagcatatgttatagttccagaagaattattttgtcatcaagtgattttgatctttagtgtcaatatttatatttagattaatttttataaatgaaaatattttaatggtttaagaaaatgaggacaacaggataatatctttgatgacttctgaaagttatgcttcccttcatgttatatgcacattgccaagaattactgtcaagagaaatgataagtaaaagtcatttatgaaaat

SEQ ID NO: 1612 - protein, 794 aa, Homosapiens
MGRKLDLSGLTDDETEHVLQVVQRDFNLRKKEEERLSELKQKLDEEGSKCSILSKHQQFVEHCCMRCCSPFTFLVNTKRQCGDCKFNVCKSCCSYQKHEKAWVCCVCQQARLLRAQSLEWFYNNVKSRFKRFGSAKVLKNLYRKHRLESGACFDILGGSLFESNLENEGSISGSDSTFYRQSEGHSVMDTLAVALRVAEEAIEEAISKAEAYGDSLDKQNEASYLRDHKEELTEELATTILQKIIRKQKSKSEQQVEEEPGWPHPQSCSTKVADEGTSASPGGYRAPAALWRSQSAFSITGEEALKTPPVEAPSRQPRDQGQHPRAESALPSWKSVDRLDETNLAPVLQSPDGNWVALKDGAPPPTRLLAKPKSGTFQALEVASSVASAYDEMGSDSEEDFDWSEALSKLCPRSRALPRNPQPQPTQAQSSDQGPIAASPSSALSPNPEAMCSDSETSSAGSSREVGHQARLSWLQRKAPRNPAAEKMRLHGELDVNFNPQLASRETSDSSEPEEAPHTTDRRARRWRRARLGSEEPSKEPSSPSAQLRDLDTHQVSDDLSETDISNEARDPQTLTDTTEEKRRNRLYELAMKMSEKETSSGEDQESEPKTESENQKESLSSEDNSQSVQEELKKVYLAAGTVYGLETQLTELEDAARCIHSGTDETHLADLEDQVATAAAQVHHAELQISDIESRISALTIAGLNIAPCVRFTRRRDQKQRTQVQTIDTSRQQRRKLPAPPVKAEKIETSSVTTIKTFNHNFILQGSSTNRTKERKGTTKDLMEPALESAVMY

SEQ ID NO: 1613 - DNA, 640 bp, Homosapiens
gctaggacaggaatctccccatctgggagaaggagaagaagctcattataagtcaccctgacagtcagggagaggttgttgatgaatttccttctgcaggtatcaggttcagaaacggaccaggaggtggatctgttggcttcagaagctgagtaaggaggggaaggcagccctttaaccctgaggcaggaaactgcccccaggcactgaaggagcctgtgagaacaagccagaagaggagctgacacatcatagctgctgggctgtggcagctgcgcctgggaaagacacagcaggaagtgctatctcacactcactgccctctgctctcccttccttcccctggcccagcctaggcgccagtcgcagttacagaaaataattgcatccagtctaacccctgctactccacagaccaagtccattagagcaccagcaacctttggaagttatccaaatgctaactagcttttggcaagcacatagtaaatgagaaattttaaagcctgtggctatctcatcaatgactccaagactcagtttgaacaccagaggattgtacaattaacagtcatttttaaaaccactttgtaaatgttcctgatgatataaaatcatagtgcataaactgtgattccag

SEQ ID NO: 1614 - protein, 34 aa, Homosapiens
MRNFKACGYLINDSKTQFEHQRIVQLTVIFKTTL

SEQ ID NO: 1615 - DNA, 4501 bp, Homosapiens
gatgtcctcaactgcagtaggagccatctccctgacttgttctgacctgacttgttccctaccgtaatctcctggatgcagaagtccctcaggcccatcgggcttctgagggcccaatctctggaatggttctacaataatgtgaagagccgcttcaagcgctttggcagtgccaaggttctgaagaacctgtacaggaagcaccggctggagagtggcgcgtgcttcgacattctaggaggaagcctttttgagtcaaacctggagaatgaaggaagcatttctggcagtgattcaacattttataggcagtcagaaggacatagtgtgatggacaccttggctgtggccctacgggtggctgaagaggccattgaggaagcaatttccaaagcagaggcatatggggacagcctggacaagcaaaatgaggccagttacctgcgggaccacaaggaggagctaactgaggaactggccacgacaatcctgcagaagattatacgaaaacagaagagcaaaagtgagcagcaagtggaagaagagccaggatggccacatccccagagttgcagcacaaaggtggcagatgaggggacctcagcatcccctggaggctaccgtgctcccgctgccctctggaggtcccagtctgccttctcaatcactggagaagaagccctgaagacccctccagtggaggctccatcgaggcagccaagggaccaaggccaacacccgagagcagagtctgctctgcccagctggaagagtgtggacaggctggatgaaacaaacctggccccagttttgcagagccccgacgggaactgggtggccctgaaggatggcgctccaccccccacccgactactggccaaacctaagagcgggacgtttcaggccctggaggtggcctccagtgtggcatctgcctacgatgagatgggctccgatagcgaggaagactttgactggagtgaggccttgagcaagctgtgtcccaggtcccgggccctgcccaggaacccccagcctcagcccacacaggcccagagctctgaccaaggccccatagctgcctccccatcctctgcactctcccccaaccctgaggccatgtgctctgactcggagacctcctccgcaggctcttcccgagaagttgggcaccaggccagactgtcctggttgcagaggaaggcccccaggaaccctgcagctgagaagatgcgcttgcatggagagctggacgtgaacttcaacccccagttggccagcagggagacctcggacagcagcgagccggaggaggccccccacaccacagaccggcgggccaggaggtggagaagagcccgactgggctcagaagagccaagcaaagaaccatcttcccccagcgcccagctccgggatctagacacacatcaggtgtcggatgatttatcagagacagacatcagcaatgaggctcgggatccccagactctcacagacaccacagaggagaaacggagaaacaggctgtacgagttagcaatgaaaatgagtgaaaaggagacttcttcaggggaggatcaggagtctgagcccaagacagaatctgagaaccagaaggaaagtctgtcctctgaagacaacagccagagtgtccaggaagagctgaagaagaagttttctgctgtttctctctgcaacatctccacagaagtcctgaaagtcatcaatgccacagaggagttgatagcaggatctacagggccctgggagtccccacaagtccctcctgacagacagaaggggatgtttcctcgtgggacagaccaagtgagactggatgagcagctgacttccctggaagaaaatgtatacctggcagcaggcactgtgtatggactggagacccagctgactgagctagaagatgccgcccgctgcatccacagtggcactgatgagacccatctggcggatctggaggaccaggtggccacggctgcagcccaagtccaccatgctgaactccagatttcagatattgagagccggatttcagccctgaccattgcaggattaaacatagcaccatgtgtgcgcttcacaagaagacgggatcagaagcaaaggacccaggtacaaaccatagatacatcaaggcagcaaaggaggaaactgcctgctccaccggtgaaagctgaaaaaattgagacatcttcagtgactaccattaaaacatttaaccacaacttcattctccaaggctcctcaacaaacaggactaaggaaaggaaaggcaccaccaaggatttgatggagcctgctctggagtcagctgtgatgtactgacaccatggaattccactgccagtgacccactgcctccggccgtacacgacagtgccttgacccaacagccatcgagtactgtatgtatttccacctgaggagaaggcctggggaggccacagtgcaccattgcacagggctgtcctgatacctcatccagaaagccgtctcagacttcagcactgcggtcttgcccactctctgccttaggctcccaggggaatccaagacagaaaatgaagacactggcttccaacagcagcgctccatgtttaagatacatattttccctgtttgctttgctactgtatgttgactttaagatctttttttaaatacatttgattcagctagtattccatgtcaacaatttgtccaaaggaaaactgctggagggaggtggagggaggaaggtgggaattattatttaatacatcattaatgcttattaatctctcacaagcatctttgtcttgcaaatcctaagggaaaagcaagtccctgcagtgagcactagggacagtctaatttggggattgctcaaccatcaagactgcaggtctcccttcagccacctccttcctgctaaaagcttagcctaccacactaccagtcattcccatcgctttgcaatcacaagccacaggatgagaagttctgactcactcatgccatgcccagggctatctgaaacaatgtctcattaagaatttagggttcttccatgggcttactgacagttgcccagatctgaaggggaaagggtcttgagaaagaccatcactggctcaactttagggcactgtccagagtcaacatgatgtggtttagcagtgatcacatctaaacaaagtttaggtaaatgaattatcgcagagaaaaaccacatgagaaaatttttgtactccaaatttacttcccaataaatattcagcaaagtagtaaaatgaccttaaagataaaaatgattagggaatagccttagaaaatttataggtataaaaaattcaaggacaaactgtgcatttaatggacacaagaattgactctaactccatgtctgtggtttctttgaacccatatcaaatgtatgactatttagagtgtttataagagataatggaactgaactttcactcaattaattgggcattaacaaccttcttttatgtttgttcctgatatagtctgaatcttaggaagaaggtaaaagaaaggaggcaagagaatagttatgatgaatatgtgttaagtgcctgctctgaaggaggcaatgttcttctcatttgaatccttatggcaaccttattcaataggttttcccatatttcagatttaataactgaaggccagagagattaatttgccaaagccacacctttatgctaattatgattggaatgcatcacaaaagcctaactctgttgttttcaacctctacgttattttgctgctatgtgcatttccagatctgattttctgctaacttgtgtgctatgatccactcctgatgggggtctacattaatcttccagtactccttgctgatgctgtgttatgtgtcatctaacagaaatgactcctttgaaataagtaaatctttggctttttgttctgttggtgtgattcaaagcaaaacaaacaaacaaaaacaaattttaagaacacaacaaaaaagatttgacttccgaatagaatgttttctttaagaggcatgaaaagcaactattgttgtgttacagtgttaaaaatattcagttttctttgacaaaaatgtgtactgtgtaagccttgcaaacaaaaaacaacaaaaaagaagcagcagcagcagcctgctgtgtggcatctgaacttttataaaggtttccttgtgccaaataagtgcaaagatttaatttactattaaaaaccataagcatatgttatagttccagaagaattattttgtcatcaagtgattttgatctttagtgtcaatatttatatttagattaatttttataaatgaaaatattttaatggtttaagaaaatgaggacaacaggataatatctttgatgacttctgaaagttatgcttcccttcatgttatatgcacattgccaagaattactgtcaagagaaatgataagtaaaagtcatttatgaaaat

SEQ ID NO: 1616 - protein, 757 aa, Homosapiens
MQKSLRPIGLLRAQSLEWFYNNVKSRFKRFGSAKVLKNLYRKHRLESGACFDILGGSLFESNLENEGSISGSDSTFYRQSEGHSVMDTLAVALRVAEEAIEEAISKAEAYGDSLDKQNEASYLRDHKEELTEELATTILQKIIRKQKSKSEQQVEEEPGWPHPQSCSTKVADEGTSASPGGYRAPAALWRSQSAFSITGEEALKTPPVEAPSRQPRDQGQHPRAESALPSWKSVDRLDETNLAPVLQSPDGNWVALKDGAPPPTRLLAKPKSGTFQALEVASSVASAYDEMGSDSEEDFDWSEALSKLCPRSRALPRNPQPQPTQAQSSDQGPIAASPSSALSPNPEAMCSDSETSSAGSSREVGHQARLSWLQRKAPRNPAAEKMRLHGELDVNFNPQLASRETSDSSEPEEAPHTTDRRARRWRRARLGSEEPSKEPSSPSAQLRDLDTHQVSDDLSETDISNEARDPQTLTDTTEEKRRNRLYELAMKMSEKETSSGEDQESEPKTESENQKESLSSEDNSQSVQEELKKKFSAVSLCNISTEVLKVINATEELIAGSTGPWESPQVPPDRQKGMFPRGTDQVRLDEQLTSLEENVYLAAGTVYGLETQLTELEDAARCIHSGTDETHLADLEDQVATAAAQVHHAELQISDIESRISALTIAGLNIAPCVRFTRRRDQKQRTQVQTIDTSRQQRRKLPAPPVKAEKIETSSVTTIKTFNHNFILQGSSTNRTKERKGTTKDLMEPALESAVMY

SEQ ID NO: 1617 - DNA, 643 bp, Homosapiens
gtgtgctctcttgctcttctgctttctgccatggaatgactcagcaagaaggccctcaccagatgcactcttcttgaccttggacttcccagtttccggaactgcctaatctggtcagctgctgtgagctgcaggagaaggagaaaggttcgcttgggagcactgctgaggaactgatggcagtacgagatggagctaagattggaactgaggtctggctataaagctgcctttatgtccatcgcatcctaagggctgctgttgctcttctgcctctacactgatggactacgtcagaacatcaatatgctgtattgatgataatggatgatattttcttagttgtgccaatattactcttgagggaagaaatgatgccaagccaggccaactcctactcctcatctgattcagcccagtgatgagctctgtcaagaagacctccaagatcagccccctctatgctctcatagtcccctctgctgattcctattaagtcctgttcttgccagtgagacgcctgctccagctttgccttccaccatgagtaaaggctccctaaggcctcccaagaaacagatgccaccatgcttcctgtacagcctgcagaaccatgagccaattaaacctcttctctttataa

SEQ ID NO: 1618 - protein, 34 aa, Homosapiens
MIMDDIFLVVPILLLREEMMPSQANSYSSSDSAQ

SEQ ID NO: 1619 - DNA, 945 bp, Homosapiens
ggcatatggggacagcctggacaagcaaaatgaggccagttacctgcgggaccacaaggaggagctaactgaggaactggccacgacaatcctgcagaagatgatattagaacccacctcaaaaggtgttcatgacaagtgaaagagatgtttataaagagctaagctctgtctgagatgtgacactaggtctcagtaaacattatttcaatattctgtgattctttagtctacatcagaccccttctctggatcctcagtagttcttcccacatggtttagttcaagaaaaatgtgattaaagccatgaattttctccctttaaaaatgcacttgtatacacacacatactcacacatgcacactcacacatgcacaaacatactcacaattttgcttttgcttacaatttcagataattcatgggctcccaaccagactaactttatattctctaaatacaccctgctcattcccagccctgtgactttgattgtgctatgcccttgcccttgcccccacctcttctggtgaagacctgcacatcactgtcaactcaataccaaaccttgtggagcccagctgccatgccctatactcttagtttggccagatagtgtcccctatggctgcagacaactcacgtaggtccaaagatatggtccaagatttcaccagtgtcttctacaagatcttctatgaatgcctcagccacatccctggtcctgaggcccccatgaagacaattgaggactcaggtcctcaagtcatagaatttggtatcagtcctgattgacctgctaacatattgcctagaaaaggtattttatttagtccaagcttcgttttctcctctgtaaaacagaagatcattaaaaatctgtctcatgggattgttatggtcttagaataaaattaaaaactttggttcaagtgtgaatcatt

SEQ ID NO: 1620 - protein, 75 aa, Homosapiens
MNFLPLKMHLYTHTYSHMHTHTCTNILTILLLLTISDNSWAPNQTNFIFSKYTLLIPSPVTLIVLCPCPCPHLFW

SEQ ID NO: 1621 - DNA, 2346 bp, Homosapiens
aggccggtgaggggataaaattcctgcggggcccgcccggatcaccttgtcaggaggctgtagtggcgagaaaacggaaataaataagaaaacgcttcgccctggggttgggattaggctggagtggcggcggcggaagccgggaggaggcaggaagaggcgaaggaggaggcggaggaagaggcgagggcgcgagagaagaggcggcgctgcggcttctcgcacaaaatggccgatggagactatttagccgcgcccgcggcccctcccacgtgaccgtcccgcgccgagcatcctgggacttgtagttttctggaggcagcagagcccggaaagcctgaggccgggggcggccgagaccgcaattcccgtcacggagtgcgtcctctagcgcggggcggaagacccgcgaagtgttcaagcggccgcagagcggcccagagttcgcaggtctggggctctcttcccagagagctcgtaggggaggacagtcaagggactcaagcgtctctcttgactccccttctctcgctgtgcagtggcggcgccgaggggtcgacgctcagggctaatctctatgagtcaccctcgaggccccgggtaatattgggtggatcacaagaactaatctttcatgatttggaaaccggaaggaaagaagcacttttgtagctgacttacctcaatgacatgaccagtgtctgagcctacaactgcgctatcttccctggatttttcttcaccttttccttactcatgagccaggtatcccggaagcctgaagggaaaggttcaagtccaggcttccattaaaaccccactaatagacttgttctgccatcaatcagccacagacctgtactgcaagatgcctactacacacccagtgctgagctgtggaaaatccagaacacacgtgaccacagacaatcatgaaggcgctgataatagcagcttctcaaagggaaaattgtgtccgggacccgctgggtacataacagatttctctttattctcagattcaggcttctttgcttggggcagctccccaggagtataagtatgaatgggggggaagatagagcatatacttcttccttcctgatattgttgacaaaagtatgctgtttacatattgaaaatcatgggatggtgtgaactcacagggagaggacaggagggagcctccttgatcaaatgtctaagataaaaatgaaggttgcagtaacaaagagccagctgataaccttgttcctcctgtaaggtgcctgcacccctgccaggcatatgatctgggtggttacactgttaagccaggagaggtgctcacccaagggtatgtgtcagtatccttgatggtgtttcccaaactacagccacacggttctctcccaactccttccctaaaaggtagattcaagccgggggaaggtggacatatcttgtgaagtgttgaatatggaaattcaaaacatatgttacattcagggaggggcttccattaggccctatttttatataaaaatctagaaataaataatattcttctatttgcttcaaaaaaacaaagaaatgcttaagttctctttacattgatgtcaaagcatagccatgagttatgctgtgcaggaggcaggtgtttggcaagacagatttttttctgacaaaacaaataaaatcctgagaggtatttgttttagtaaaccaaagggaaatcctatgagactctggcttgtgcctctaaatgtcttcctcagtgaaaacagcccatggtcatgcctgtgtcctgggtggactgagttcgttccagtgagctgatgagccaggcgggagattccccttgggaagggtcatggttgtttatttgaagctgctttcagccagtacttggccgaggagtgtggatgaatgaaacgcctctgttgtcctgctgctgaaacgggaacactattgcctgtcatcactgttgtgcccactgttttggcttatgatacaagagcccactgtcctacatctctaatgatacacagagcatctctggtctctaggaggtgggagggacactacttccagctttaaccatatgcatgacaaggagatccagtgaccatctggtggggaagcaggcattccatctccggagcttcccaaggaaacaggagacaatggagtgcaggaaatgctcagaaccaggaaacctgcaaccacttagttccagtggcttggggtagctaggattccgtttattcctttgtaaaatggggataatgcagggtgctctcatgtggagctaaggaaacaatatgtgaaagcccgttgcatataaaatttatataaagaaaaggt

SEQ ID NO: 1622 - protein, 68 aa, Homosapiens [sequence omitted]

SEQ ID NO: 1623 - DNA, 397 bp, Homosapiens
cccagagttcgcaggtctggggctctcttcccagagagctcgtaggggaggacagtcaagggactcaagcgtctctcttgactccccttctctcgctgtgcagtggcggcgccgaggggtcgacgctcagggctaatctctatgagtcaccctcgaggccccgggtaatattgggtggatcacaagaactaatctttcatgatttggaaaccggaaggaaagaagcacttttgtagctgacttacctcaatgacatgaccagtgtctgagcctacaactgcgctatcttccctggatttttcttcaccttttccttactcatgagccagcaacctgacatggttgatattttaatcccatctttagagacaagaaaactgtggctcagtgaagaaga

SEQ ID NO: 1624 - protein, 77 aa, Homosapiens
QSSQVWGSLPRELVGEDSQGTQASLLTPLLSLCSGGAEGSTLRANLYESPSRPRVILGGSQELIFHDLETGRKEALL

SEQ ID NO: 1625 - DNA, 526 bp, Homosapiens
ggtctggggctctcttcccagagagctcgtaggggaggacagtcaagggactcaagcgtctctcttgactccccttctctcgctgtgcagtggcggcgccgaggggtcgacgctcagggctaatctctatgagtcaccctcgaggccccgggtaatattgggtggatcacaagaactaatctttcatgatttggaaaccggaaggaaagaagcacttttgtagctgacttacctcaatgacatgaccagtgtctgagcctacaactgcgctatcttccctggatttttcttcaccttttccttactcatgagccaggacccatgtgggcagagaggagagttctcacctggagttcagcatggtggacttgggctgcagccgtggccacctggtcctccagatccgccagatgggtctcatcagtgccactgtggatgcagcgggcggcatcttctagctcagtcagctgggtctccagtccatacacagtgcctgctgccaggtatacctgtagagacagtgcta

SEQ ID NO: 1626 - protein, 72 aa, Homosapiens
MSQDPCGQRGEFSPGVQHGGLGLQPWPPGPPDPPDGSHQCHCGCSGRHLLAQSAGSPVHTQCLLPGIPVETV

SEQ ID NO: 1627 - DNA, 2866 bp, Homosapiens
aggccggtgaggggataaaattcctgcggggcccgcccggatcaccttgtcaggaggctgtagtggcgagaaaacggaaataaataagaaaacgcttcgccctggggttgggattaggctggagtggcggcggcggaagccgggaggaggcaggaagaggcgaaggaggaggcggaggaagaggcgagggcgcgagagaagaggcggcgctgcggcttctcgcacaaaatggccgatggagactatttagccgcgcccgcggcccctcccacgtgaccgtcccgcgccgagcatcctgggacttgtagttttctggaggcagcagagcccggaaagcctgaggccgggggcggccgagaccgcaattcccgtcacggagtgcgtcctctagcgcggggcggaagacccgcgaagtgttcaagcggccgcagagcggcccagagttcgcaggtctggggctctcttcccagagagctcgtaggggaggacagtcaagggactcaagcgtctctcttgactccccttctctcgctgtgcagtggcggcgccgaggggtcgacgctcagggctaatctctatgagtcaccctcgaggccccgggtaatattgggtggatcacaagaactaatctttcatgatttggaaaccggaaggaaagaagcacttttgtagctgacttacctcaatgacatgaccagtgtctgagcctacaactgcgctatcttccctggatttttcttcaccttttccttactcatgagccaggacatgaacctggagcctgcccggatgcgaaaggagctgtaacactgaatccctctcaccctatgccagtgctggatggctgtcccatgtgatgggaagtggtggtggggccaggccagcccaggagccatcatgggccagagtggggcagcaggaccaaacaagctataacacaaataagctgaaacatgttcctggctggcctgccaagctgccagcagtgacatgttcccattcgccagactacaagacaagagagctgtgacccttctggggacccagacctcgggactccctgagtcagagctgtgacatgctgtaacacccccttggggctctgtggttgctggtgtctctgagtttttgggcaccactgcattccccctgtccagatgctgctgcctggcccagctacagcccctcacaaaactcacgcctgtgctggtgcctggagctgcccaccccactgcagcagctggcacacctggctgtgcatcatggctggaccctacacttgctcactcacacaccccttgccattctgtgcctggcttgtccacagtgggcatgggatctgggccagtagcgcaagctcagtacagcctgccaggccgagtgggtggagccagctcagcagtcaaaagtgaaactcaggcagaggcaccactggccacagaggttaccgaaagaatcgtgtgtcactactgttagcggtgcctaatttatacaggtctgcagcaacttcagttcttgccttctaagaagagagaattcaactgaggtgggtcataaggcagagtcagagactgaggcaagttttaagcaggaatgaaagtttattaaaaagttttaagtaggaatgagaggaagtaaagtacacttggaagagggccaagcaggtgatgtgagagagtcaagtgcccagtttgacctttgacttacagttttgtatgttccagcatcttctgtcccttctcacctgattcttcctttgaagtgggctgtctgcatgcacagtggcctgctagcacatgggagggaccacaggcacagtgagtttactggagttgtatgcatgctcaggtgaggcattcttcccttaccagttgagtgttcctagaggaaggtcatataccagttaaactctgccattttggctcttaacgcacatgcttgagaccactcacccaattcctgagatcttatcggaaagctgctgatcaccagtttcagttttttccatctattgggagactgcctttctctggtgccggctgcgacccattagtattttggagagacagttaactacctgactatcacctgatggttgcctaatgttagtaggggggcatctctcctaccctgctcatgtctgcctgactacctaatgtaacactactttaaattattattctggttgatttcttagccccaaagatgaatcatccctcctcctttcttatttcccaaaacattactaacacagggttattttgtgtagtactttttaaaaaattagagataacctaagaggccacagcactgcacaaaatggggatcaccttaaagttcagtgttaggcagcattgcccctggctatttccatcataagtaaacagccttctttctccagagccccctcctgctggcttgttgctggcccctcctcttcttcttgtttattgtacaacaaaaccgcacaggcaaagcttaaaatttgctggtactttaacttgcagagaaatttaactgcttccctcaacctcctgcccatatcagaatagaggcctttgtatgctagagtttccaataccaaataatggcaacaataataaatagtgacaacattttacattatatattactttaagttatagcaaagcaaattttgagtagggctctctccccaccagcaagattcttgggatcttatcgtttgtggggaggaatctggaaactgtattataatagacacccttttatctgatattattgaattgttagtagggtaactattaacaattaattgaaaagtcagttaatacaaagattcataaaatgatatgttttatattttattaaaatgtgtaacctgttc

SEQ ID NO: 1628 - protein, 84 aa, Homosapiens
MLLPGPATAPHKTHACAGAWSCPPHCSSWHTWLCIMAGPYTCSLTHPLPFCAWLVHSGHGIWASSASSVQPARPSGWSQLSSQK

SEQ ID NO: 1629 - DNA, 985 bp, Homosapiens
agtctccatcggccattttgtgcgagaagccgcagcgccgcctcttctctcgcgccctcgcctcttcctccgcctcctccttcgcctcttcctgcctcctcccggcttccgccgccgccactccagcctaatcccaaccccagggcgaagcgttttcttatttatttccgttttctcgccactacagcctcctgacaaggtgatccgggcgggccccgcaggaattttatcccctcaccggcctcacactagtatcgcatgtccactatccagaacctccaatctttcgacccctttgctgatgcaactaagggtgacgacttactcccggcagggactgaggattacattcatataagaatccagcaacggaacggcagaaagacactgactactgttcagggcattgcagatgattatgacaaaaagaaacttgtgaaagctttcaaaaagaaatttgcctgtaatggtactgtgattgaacatcctgaatacggagaggttattcagcttcaaggtgaccaaagaaaaaacatctgccagtttctcttggaggttggcattgtaaaggaggaacagcttaaggttcatggattctaaaatgaacctaaatacgtggagaatttcttgaatagttttgttctctaaacccggtttggctgccttgtgaaatgattccctgcagtaaacggacttttcatttatttaatcattcaaacttccattcacatctgcatgattacagaaaacatggggtatgtagactagtaacacataagaaaattgcagtaagatggtaacaaaacctcatattgtctttacatgtttccaatggaaaatgttttgagtgtttattgttcagtttattacgtttcacttgattaaatttttttgttgttgtattaaaccatgtacgttgcagcttaacaataaaaaaaaatctatgaatctttgtgagcaattatgctcccaaatctaagcaagt

SEQ ID NO: 1630 - protein, 113 aa, Homosapiens; identical to SEQ ID NO: 129

SEQ ID NO: 1631 - DNA, 1010 bp, Homosapiens
agtctccatcggccattttgtgcgagaagccgcagcgccgcctcttctctcgcgccctcgcctcttcctccgcctcctccttcgcctcttcctgcctcctcccggcttccgccgccgccactccagcctaatcccaaccccagggcgaagcgttttcttatttatttccgttttctcgccactacagcctcctgacaaggtgatccgggcgggccccgcaggaattttatcccctcaccggcctcacactagtatcgcatgtccactatccagaacctccaatctttcgacccctttgctgatgcaactaagggtgacgacttactcccggcagggactgaggattacattcatataagaatccagcaacggaacggcagaaagacactgactactgttcagggcattgcagatgattatgacaaaaagaaacttgtgaaagctttcaaaaagaaatttgcctgtaatggtactgtgattgaacatcctgaatacggagaggttattcagcttcaaggtgaccaaagaaaaaacatctgccagtttctcttggaggttggcattgtaaaggaggaacagcttaaggttcatggattctaaaatgaacctaaatacgtggagaatttcttgaatagttttgttctctaaacccggtttggctgccttgtgaaatgattccctgcagtaaacggacttttcatttatttaatcattcaaacttccattcacatctgcatgattacagaaaacatggggtatgtagactagtaacacataagaaaattgcagtaagatggtaacaaaacctcatattgtctttacatgtttccaatggaaaatgttttgagtgtttattgttcagtttattacgtttcacttgattaaatttttttgttgttgtattaaaccatgtacgttgcagcttaacaataaaaaaaaatctatgaatctttgtgagcaattatgctcccaaatctaagcaagtaaaatacacattttgtctttcttaa

SEQ ID NO: 1632 - protein, 113 aa, Homosapiens; identical to SEQ ID NO: 129

SEQ ID NO: 1633 - DNA, 1376 bp, Homosapiens
atcggccattttgtgcgagaagccgcagcgccgcctcttctctcgcgccctcgcctcttcctccgcctcctccttcgcctcttcctgcctcctcccggcttccgccgccgccactccagcctaatcccaaccccagggcgaagcgttttcttatttatttccgttttctcgccactacagcctcctgacaaggtgatccgggcgggccccgcaggaattttatcccctcaccggcctcacactagtatcgcatgtccactatccagaacctccaatctttcgacccctttgctgatgcaactaagggtgacgacttactcccggcagggactgaggattacattcatataagaatccagcaacggaacggcagaaagacactgactactgttcagggcattgcagatgattatgacaaaaagaaacttgtgaaagctttcaaaaagaaatttgcctgtaatggtactgtgattgaacatcctgaatacggagaggttattcagcttcaaggtgaccaaagaaaaaacatctgccagtttctcttggaggtgagtgattgggtgctttatgtgtaaccttgagattgcttttaaaattgtatttaaaggcaacatgatttgttttctactaagtaaaaaatcatacgaatgaaggaaattaggtgaaataaagacatggtagttatttggaaagcaaagacctttatctggtttattttgtcattagagtattctgatcatttctttatatacacacacaggctatttcttggcatgtaaagtattcaaatacgtgttgaattgttggctatcagcagtgcatgccacagacaacagtgttgcagtaagctgttgatagtgattctttttaattactcttccatgttttcttaatgaatttttatatttctcagagttattttgctaaattagattttattttacaggttggcattgtaaaggaggaacagcttaaggttcatggattctaaaatgaacctaaatacgtggagaatttcttgaatagttttgttctctaaacccggtttggctgccttgtgaaatgattccctgcagtaaacggacttttcatttatttaatcattcaaacttccattcacatctgcatgattacagaaaacatggggtatgtagactagtaacacataagaaaattgcagtaagatggtaacaaaacctcatattgtctttacatgtttccaatggaaaatgttttgagtgtttattgttcagtttattacgtttcacttgattaaatttttttgttgttgtattaaaccatgtacgttgcagcttaacaataaaaaaaaatctatgaatctttgtgagcaattatgctcccaaatctaagcaagt

SEQ ID NO: 1634 - protein, 107 aa, Homosapiens
MSTIQNLQSFDPFADATKGDDLLPAGTEDYIHIRIQQRNGRKTLTTVQGIADDYDKKKLVKAFKKKFACNGTVIEHPEYGEVIQLQGDQRKNICQFLLEVSDWVLYV

SEQ ID NO: 1635 - DNA, 700 bp, Homosapiens
gttttctaaatctttttctcattagaggaccatattgaacgataacattatttatctataacagcgtttttctacaatggacatagctgttcaaatgtttctctttttgtgagagtatcttgggggttttattaatactccacccccatctccattcctaccggcaaaaacagcaaaggcactagaaccttcattgatgactgtctggattggtagtataatgtatttctggaaagtacttcttaaaaaatatttttctactttggattttttttttttttttatccattcgcagacccctttgctgatgcaactaagggtgacgacttactcccggcagggactgaggattacattcatataagaatccagcaacggaacggcagaaagacactgactactgttcagggcattgcagatgattatgacaaaaagaaacttgtgaaagctttcaaaaaggtaaagggattaggaagaaaggattagagttactgatgcacacctctgaactggattatgattcacacctttatatcggcgtggatgaaaataactagaccaagaaagttgttctcatttttgtaattaacatgtaaatatttagttattctcccagtgtggtctctcattttaaaagaagattcgcgttgttttaaaattgtatttaaaggcaacatgatttgttttctactaagtaaaa

SEQ ID NO: 1636 - protein, 55 aa, Homosapiens
MTVWIGSIMYFWKVLLKKYFSTLDFFFFFIHSQTPLLMQLRVTTYSRQGLRITFI

SEQ ID NO: 1637 - DNA, 2800 bp, Homosapiens
gagctgacacctccttagcgctggccgcgggccgcctctgcggcagcgctagtcgccttctccgaatcggctccgcacagctaggagaaaagatgttcactgtgctgacccgccaaccatgtgagcaagcaggcctcaaggccctctaccgaactccaaccatcattgccttggtggtcttgcttgtgagtattgtggtacttgtgagtatcactgtcatccagatccacaagcaagaggtcctccctccaggactgaagtatggtattgtgctggatgccgggtcttcaagaaccacagtctacgtgtatcaatggccagcagaaaaagagaataataccggagtggtcagtcaaaccttcaaatgtagtgtgaaaggctctggaatctccagctatggaaataacccccaagatgtccccagagcctttgaggagtgtatgcaaaaagtcaaggggcaggttccatcccacctccacggatccacccccattcacctgggagccacggctgggatgcgcttgctgaggttgcaaaatgaaacagcagctaatgaagtccttgaaagcatccaaagctacttcaagtcccagccctttgactttaggggtgctcaaatcatttctgggcaagaagaaggggtatatggatggattacagccaactatttaatgggaaatttcctggagaagaacctgtggcacatgtgggtgcacccgcatggagtggaaaccacgggtgccctggacttaggtggtgcctccacccaaatatccttcgtggcaggagagaagatggatctgaacaccagcgacatcatgcaggtgtccctgtatggctacgtatacacgctctacacacacagcttccagtgctatggccggaatgaggctgagaagaagtttctggcaatgctcctgcagaattctcctaccaaaaaccatctcaccaatccctgttaccctcgggattatagcatcagcttcaccatgggccatgtatttgatagcctgtgcactgtggaccagaggccagaaagttataaccccaatgatgtcatcacttttgaaggaactggggacccatctctgtgtaaggagaaggtggcttccatatttgacttcaaagcttgccatgatcaagaaacctgttcttttgatggggtttatcagccaaagattaaagggccatttgtggcttttgcaggattctactacacagccagtgctttaaatctttcaggtagcttttccctggacaccttcaactccagcacctggaatttctgctcacagaattggagtcagctcccactgctgctccccaaatttgatgaggtatatgcccgctcttactgcttctcagccaactacatctaccacttgtttgtgaacggttacaaattcacagaggagacttggccccaaatacactttgaaaaagaagtggggaatagcagcatagcctggtctcttggctacatgctcagcctgaccaaccagatcccagctgaaagccctctgatccgtctgcccatagaaccacctgtctttgtgggcaccctcgctttcttcacagcggcagccttgctgtgtctggcatttcttgcatacctgtgttcagcaaccagaagaaagaggcactccgagcatgcctttgaccatgcagtggattctgactgagccttcaaagcagctcctggagtccaatggctgcttagagtcagcctgggtggcaccaggcaatgcaggtgaagtggctgccttcaggaaatacaactaactaaaatcaaacacctaggtcacgtgcctctcaaatactgatttctgccacagcacctcttgaggcatcccttggctattctgtgcatattgttcttcagagacctcactacccacatgctgatctattggggaacagagaagagacaggccacgaaggtcaggctctttatattaagttccccagaggaagagtaagttgagaaggtatcagtttaatgttgaagaattgacctcagggctcagtttccatttccctccctcagtattcttcctggcaagatacccattaagcatttcgccaatcagaatctcattttatagtttttcccattggtctttaactaagactttcttgtagcaatctcgtaagcagtgaaccccctcagatcagtagaatatagtatctgggggagaagacttacttccttcagggcagcagccacagccaggcttctgtcatacaggtagatcccgaagcacagagacataaaaaaggtctcccagaaaactatagaccattctccaagtggaattcccacttagggctctggtcactagattgcaacctgtgtgtttgtcatcatcctcatctcaccattgtattgctatgccctcccataaaaacacattgatccctagcaagattattgcattccagattttactgcctttgctaggcttttgcttagcaaagggctgactttccattgttatcatggtgtatatatttttgtcaccattcccacaagtatacttgatgttgtcatagaacgaacatcctactctatgatttactaaccaattactttcccagatcatagacctctctgcatagtagtcataggtcttgactttggggaaagaaaaggaagctgcaggaatatttatctccaaagtcgaatgagaaagaactccagcaaatccaatggctacaaactaaaaatcagcattatttcatattgctgtttcttagctgaatatggaataaagaactattattttattttgacttgcaa

SEQ ID NO: 1638 - protein, 529 aa, Homosapiens
MFTVLTRQPCEQAGLKALYRTPTIIALVVLLVSIVVLVSITVIQIHKQEVLPPGLKYGIVLDAGSSRTTVYVYQWPAEKENNTGVVSQTFKCSVKGSGISSYGNNPQDVPRAFEECMQKVKGQVPSHLHGSTPIHLGATAGMRLLRLQNETAANEVLESIQSYFKSQPFDFRGAQIISGQEEGVYGWITANYLMGNFLEKNLWHMWVHPHGVETTGALDLGGASTQISFVAGEKMDLNTSDIMQVSLYGYVYTLYTHSFQCYGRNEAEKKFLAMLLQNSPTKNHLTNPCYPRDYSISFTMGHVFDSLCTVDQRPESYNPNDVITFEGTGDPSLCKEKVASIFDFKACHDQETCSFDGVYQPKIKGPFVAFAGFYYTASALNLSGSFSLDTFNSSTWNFCSQNWSQLPLLLPKFDEVYARSYCFSANYIYHLFVNGYKFTEETWPQIHFEKEVGNSSIAWSLGYMLSLTNQIPAESPLIRLPIEPPVFVGTLAFFTAAALLCLAFLAYLCSATRRKRHSEHAFDHAVDSD

SEQ ID NO: 1639 - DNA, 2036 bp, Homosapiens
atcaagatggccgcctgggaccgctctcagccccttcggcctctacctgaagagccacgccccgtctgctacacccaactgattggttcctcaatcacagagaggaaaggcaacatgaggatgacgtcagttacaaatatggcgttttggacgggctcgatagtttgcttggcctctactcaaggaatgctgatggtatagcaagaaggtattctgagcattatatcaatggggaagttctagatcttttgcaaagcaggagagtcatcctagggcatccagaggccttcagggtggcctgaagtctcccaccgcaccacctttgggttaacctagcctgtcccacagaagatgatgaagttgggtctggaggcaagctgactcagatggattctcgattttatgatgctggactggagatgggtttcaccatgttgcccaagctagtctcgaactcgtggactcaagcaatccacctgcctcagcctcccaaagtgccttacaggcgtgagccaccgcacctggctgaactggtaaatctttgatagctatctgcaactcttggttacaaattttagctttgaagtcagaagtcaaagcaagactacacagtccttggagaaggtgtcagtcactaccctcaatttgtagcctcaaatatcacaaacccagcatgtccagaccttctcccttgcgtcttacactaacttctcctggcttcagccagagatggggggaaaggattttctgctcttctaactcatggttttggaataattgatttcttcccctttatgctcatttcttccctttgttgccagtcccttcacacttaccttcagtcctggagggaggacctcttgcttgtggatctggatgacagtgatactcacaagtaccacaatactcacaagcaagaccaccaaggcaatgatggttggagttcggtagagggccttgaggcctaaaatgagaagacccagaagacacttgagggggaggtaaaaaccaggcactggtattctttgtagaattgatggactggccccataatcaggtgcataaaccaccttctctggtgttagcgagacccacacttctaagatggagtagcaaataagctccccttctccccagttttggggaagcacaaacaatacctatttgcccttcctcacaaattgtgtactaaaacagtgttgcagggagggtatgcatggtctagttttctgatattttggttatccctgagatgaattacaataacatttgttttacttttttctttttcttttctttttttttttttttgagatggagtctcactctatcgcccaggttagagtgctgtgccgtgatcttggctcactgcagcttccaactcccaggttcaagcgattcttctgcctctgcctcctgaatagctgagattacaggtgcctgctaccacggcagccaatttttgtatttttaatagagacagggtttcaccatgttggccaggctggtctcgaactcctgggctcaagtgatctgcctgtctcggtctcccaaagtgctgggattacaggtgtgagccaccacgcccagctaacattagttttaatggagattcaaaaaatctatttttaaaaaattaaaccaggtgatagaatatttcacttaaaaataatctcatagaatatttcatttaaaaataatctcagttaaagaaaaagaaattaggctgggcagatggctgacccctgtaatcccagcactttgggaggccgaagtgggtggatcacttgaggtcaggagttcaagaccagcctggccaatatggtgaaaccatgtctctaccaagaaatacaaaaattagccaggtgtgatcatatgcgcctgtagtcccagctactcgggagactgaggtgggagaattgcttgaagccaggaggtggaggttgcaatgagttgagatcaaactactacacaccagcctgggtgacagaataagaccttgtctcaataaaataaaataaaaataaaaaaattag

SEQ ID NO: 1640 - protein, 64 aa, Homosapiens
MAAWDRSQPLRPLPEEPRPVCYTQLIGSSITERKGNMRMTSVTNMAFWTGSIVCLASTQGMLMV

SEQ ID NO: 1641 - DNA, 863 bp, Homosapiens
gtcagttacaaatatggcgttttggacgggctcgatagtttgcttggcctctactcaaggaatgctgatggtatagcaagaaggtattctgagcattatatcaatggggaagttctagatcttttgcaaagcaggagagtcatcctagggcatccagaggccttcagggtggcctgaagtctcccaccgcaccacctttgggttaacctagcctgtcccacagaagatgatgaagttgggtctggaggcaagctgactcagatggattctcgattttatgatgctggactggagatgggtttcaccatgttgcccaagctagtctcgaactcgtggactcaagcaatccacctgcctcagcctcccaaagtgccttacaggcgtgagccaccgcacctggctgaactgtcccttcacacttaccttcagtcctggagggaggacctcttgcttgtggatctggatgacagtgatactcacaagtaccacaatactcacaagcaagaccaccaaggcaatgatggttggagttcggtagagggccttgaggcctaaaatgagaagacccagaagacacttgagggggaggtaaaaaccaggcactggtattctttgtagaattgatggactggccccataatcaggtgcataaaccaccttctctggtgttagcgagacccacacttctaagatggagtagcaaataagctccccttctccccagttttggggaagcacaaacaatacctatttgcccttcctcacaaattgtgtactaaaacagtgttgcagggagggtatgcatggtctagttttctgatattttggttatccctgagatgaattacaataacatttgtttt

SEQ ID NO: 1642 - protein, 97 aa, Homosapiens
MDSRFYDAGLEMGFTMLPKLVSNSWTQAIHLPQPPKVPYRREPPHLAELSLHTYLQSWREDLLLVDLDDSDTHKYHNTHKQDHQGNDGWSSVEGLEA

SEQ ID NO: 1643 - DNA, 1602 bp, Homosapiens
ggcacgttgagagtgatgccaggaatcaagatggccgcctgggaccgctctcagccccttcggcctctacctgaagagccacgccccgtctgctacacccaactgattggttcctcaatcacagagaggaaaggcaacatgaggatgacgtcagttacaaatatggcgttttggacgggctcgatagtttgcttggcctctactcaaggaatgctgatggtatagcaagaaggtattctgagcattatatcaatggggaagttctagatcttttgcaaagcaggagcaagctgccctgttgtgagctctccggtggagagccccacatggcaagaaaatgagaagccccctgaacagacaagagctgaggcccaggatacaatatcctgaaaaaaactgaatcctgctgacagttgcccaagtgaagctggaagtggatctttctgcagtggatccttgagatgactgtagccctggctgacaacttgattgctgcctgtgaaggaccctgaaccagaggactcagcgaaattgtgcccagattcctgacctacagaggcagtgagataataaatgctgttgaggtcacaaagttttgaggtatttgttaatacagcaatggatacttaatacagcttcctacatggtctccctccttcgacctttacactacaatctgtcgtccacacagcagtcagagatccttttaaaacataagtcagatcatcatgacactcacctccctgctaagtgtcctgcaaggcctttcacggtctgatcccctatcctttctctttcctcatctcctatcactcttgcccttgcaaattttcttccagcactctggcctccttgctgttcttcagtatggcaagcaacctgctgcccggagcccacacactgactgtcccctctcctaggacactcttccctcaagggctcccatatcttgcctgctggctcctgcatcttcttcaagtctgctcaaatgtcaccttctcagtgaggcccatcctggctatcctctttcagttctgacagaaaataatttattgctttattacatcattattttgttgtcttccctccgtctgttcctactaaaatttaatctctgagaaagcagaaaacgttgtcttgttctttcctgtaacccaagtgccttgaacattgcctcattaattgcttgcgctcagtaatatgtgttgaataaatgggttaagtagtttattaattgtgaaactaaatcctgtctgaaaggtttggagcagcttgttgaaatagcaaatggagattctgtgttttaagttgtggctaaggtagaatcatccatgatgtatgtggagccagctcctgtgtcctggacttaaacatctgtatctgacgtgtgggtaattatattgctatcctacacctttgacccattcatctcggctcacctgtgatccaggctatgctactaaagttgggtgagagagtctgcaacacaaggaaaacatagagccatcatttagtaaatcaaacccataataatacattttgttgttaaatgtagccaatctctgagtattttttattaaagtatctctaatgtttaaaaac

SEQ ID NO: 1644 - protein, 69 aa, Homosapiens
MPGIKMAAWDRSQPLRPLPEEPRPVCYTQLIGSSITERKGNMRMTSVTNMAFWTGSIVCLASTQGMLMV

SEQ ID NO: 1645 - DNA, 825 bp, Homosapiens
gggcgggtcttcttccttctcgcctaacgccgccaacatggtgttcaggcgcttcgtggaggttggccgggtggcctatgtctcctttggacctcatgccggaaaattggtcgcgattgtagatgttattgatcagaacagggctttggtcgatggaccttgcactcaagtgaggagacaggccatgcctttcaagtgcatgcagctcactgatttcatcctcaagtttccgcacagtgcccaccagaagtatgtccgacaagcctggcagaaggcagacatcaatacaaaatgggcagccacacgatgggccaagaagattgaagccagagaaaggaaagccaagatgacagattttgatcgttttaaagttatgaaggcaaagaaaatgaggaacagaataatcaagaatgaagttaagaagcttcaaaaggcagctctcctgaaagcttctcccaaaaaagcacctggtactaagggtactgctgctgctgctgctgctgctgctgctgctaaagttccagcaaaaaagatcaccgccgcgagtaaaaaggctccagcccagaaggttcctgcccagaaagccacaggccagaaagcagcgcctgctccaaaagctcagaagggtcaaaaagctccagcccagaaagcacctgctccaaaggcatctggcaagaaagcataagtggcaatcataaaaagtaataaaggttctttttgacctgttgacaaatgtatttaagcctttggatttaaagcctgttgaggctggagttaggaggcagattgatagtaggattataataaacattaaataatcagttc

SEQ ID NO: 1646 - protein, 215 aa, Homosapiens [sequence omitted]

SEQ ID NO: 1647 - DNA, 771 bp, Homosapiens
ctgagcactacaggcactgtgggacgtgtattaacacataatggattttgaagtactggtagttgaaaacatgccacttgaacaacctcgagtgaacatagccatgctgctactactgtgacataccaattaggggtgaagcttgaggatacttgtcaaagttcaaagcagtagaaaatacttggtaacttagatttttcactaggtactcttgtaattctgccttggatccctggacaccctggattttatttttaggatgtttggccacaaattgttactgtaaatttttttttaaaaaaaagcctaacagttaatattaattaccttgtttgttacgagaatgaatggctcggatgtgtgagccactgcgcctggtcaagaggtagtttttaaattcataaaatgggctgggctgggtgcagtggctcatacctgtaatcccagcacttcaggaggccaaggtggagggttgcttgagcccaggagttggagaccagcctgggcaacgtagcaagaccctgtctctacaaaaaatataaaaattagctgggtgtgctggtatgcacctgtagtcccagctacttgggaggctgaggcaggaggatggcttgagcctagaaggttgaggctacagtgagccatgatcatactattgcattccagcctgggtggcaagcaagatcctctctcaaaaaaaaaaagggactggattacagttttgattaaaatatgcttgaagttaataacctattctggcttactgaacac

SEQ ID NO: 1648 - protein, 41 aa, Homosapiens
MIILLHSSLGGKQDPLSKKKRDWITVLIKICLKLITYSGLL

SEQ ID NO: 1649 - DNA, 536 bp, Homosapiens
agctgatttcttaatctgtggtcttggctcgttctagtgcccaccagaagtatgtccgacaagcctggcagaaggcagacatcaatacaaaatgggcagccacacgatgggccaagaagattgaagccagagaaaggaaagccaagatgacagattttgatcgttttaaagttatgaaggcaaagaaaatgaggaacagaataatcaagaatgaagttaagaagcttcaaaaggcagctctcctgaaagcttctcccaaaaaagcacctggtactaagggtactgctgctgctgctgctgctgctgctgctgctaaagttccagcaaaaaagatcaccgccgcgagtaaaaaggctccagcccagaaggttcctgcccagaaagccacaggccagaaagcagcgcctgctccaaaagctcagaagggtcaaaaagctccagcccagaaagcacctgctccaaaggcatctggcaagaaagcataagtggcaatcataaaaagtaataaaggttctttttgacctgttgacaaatgt

SEQ ID NO: 1650 - protein, 112 aa, Homosapiens
MTDFDRFKVMKAKKMRNRIIKNEVKKLQKAALLKASPKKAPGTKGTAAAAAAAAAAKVPAKKITAASKKAPAQKVPAQKATGQKAAPAPKAQKGQKAPAQKAPAPKASGKKA

SEQ ID NO: 1651 - DNA, 354 bp, Homosapiens
gccaagaagattgaagccagagaaaggaatgaagttaagaagcttcaaaaggcagctctcctgaaagcttctcccaaaaaagcacctggtactaagggtactgctgctgctgctgctgctgctgctgctgctaaagttccagcaaaaaagatcaccgccgcgagtaaaaaggctccagcccagaaggttcctgcccagaaagccacaggccagaaagcagcgcctgctccaaaagctcagaagggtcaaaaagctccagcccagaaagcacctgctccaaaggcatctggcaagaaagcataagtggcaatcataaaaagtaataaaggttctttttgacctgttgacaaatgt

SEQ ID NO: 1652 - protein, 100 aa, Homosapiens
AKKIEARERNEVKKLQKAALLKASPKKAPGTKGTAAAAAAAAAAKVPAKKITAASKKAPAQKVPAQKATGQKAAPAPKAQKGQKAPAQKAPAPKASGKKA

SEQ ID NO: 1653 - DNA, 443 bp, Homosapiens
gccaagaagattgaagccagagaaaggaatgaagttaagaagcttcaaaaggcagctctcctgaaagcttctcccaaaaaagcacctggtactaagggtactgctgctgctgctgctgctgctgctgctgctaaagttccagcaaaaaagatcaccgccgcgagtaaaaaggctccagcccagaaggttcctgcccagaaagccacaggccagaaagcagcgcctgctccaaaagctcagaagggtcaaaaagctccagcccagaaagcacctgctccaaaggcatctggcaagaaagcataagtggcaatcataaaaagtaataaaggttctttttgacctgttgacaaatgtatttaagcctttggatttaaagcctgttgaggctggagttaggaggcagattgatagtaggattataataaacattaaataatcagttc

SEQ ID NO: 1654 - protein, 100 aa, Homosapiens; identical to SEQ ID NO: 1652

SEQ ID NO: 1655 - DNA, 400 bp, Homosapiens
gaaagccaagatgacagattttgatcgttttaaagttatgaaggcaaagaaaatgaggaacagaataatcaagaatgaagttaagaagcttcaaaaggcagctctcctgaaagcttctcccaaaaaagcacctggtactaagggtactgctgctgctgctgctgctgctgctgctgctaaagttccagcaaaaaagatcaccgccgcgagtaaaaaggctccagcccagaaggttcctgcccagaaagccacaggccagaaagcagcgcctgctccaaaagctcagaagggtcaaaaagctccagcccagaaagcacctgctccaaaggcatctggcaagaaagcataagtggcaatcataaaaagtaataaaggttctttttgacctgttgacaaatgt

SEQ ID NO: 1656 - protein, 112 aa, Homosapiens; identical to SEQ ID NO: 1650

SEQ ID NO: 1657 - DNA, 489 bp, Homosapiens
gaaagccaagatgacagattttgatcgttttaaagttatgaaggcaaagaaaatgaggaacagaataatcaagaatgaagttaagaagcttcaaaaggcagctctcctgaaagcttctcccaaaaaagcacctggtactaagggtactgctgctgctgctgctgctgctgctgctgctaaagttccagcaaaaaagatcaccgccgcgagtaaaaaggctccagcccagaaggttcctgcccagaaagccacaggccagaaagcagcgcctgctccaaaagctcagaagggtcaaaaagctccagcccagaaagcacctgctccaaaggcatctggcaagaaagcataagtggcaatcataaaaagtaataaaggttctttttgacctgttgacaaatgtatttaagcctttggatttaaagcctgttgaggctggagttaggaggcagattgatagtaggattataataaacattaaataatcagttc

SEQ ID NO: 1658 - protein, 112 aa, Homosapiens; identical to SEQ ID NO: 1650

SEQ ID NO: 1659 - DNA, 254 bp, Homosapiens
aatcaagaatgaagttaagaagcttcaaaaggcagctctcctgaaagcttctcccaaaaaagcacctggtactaagggtactgctgctgctgctgctgctgctgctgctgctaaagttccagcaaaaaagatcaccgccgcgaggtcaaaaagctccagcccagaaagcacctgctccaaaggcatctggcaagaaagcataagtggcaatcataaaaagtaataaaggttctttttgacctgttgacaaatgt

SEQ ID NO: 1660 - protein, 73 aa, Homosapiens
IKNEVKKLQKAALLKASPKKAPGTKGTAAAAAAAAAAKVPAKKITAARSKSSSPESTCSKGIWQESISGNHKK

SEQ ID NO: 1661 - DNA, 339 bp, Homosapiens
aatcaagaatgaagttaagaagcttcaaaaggcagctctcctgaaagcttctcccaaaaaagcacctggtactaagggtactgctgctgctgctgctgctgctgctgctgctaaagttccagcaaaaaagatcaccgccgcgaggtcaaaaagctccagcccagaaagcacctgctccaaaggcatctggcaagaaagcataagtggcaatcataaaaagtaataaaggttctttttgacctgttgacaaatgtatttaagcctttggatttaaagcctgttgaggctggagttaggaggcagattgatagtaggattataataaacattaaataatca

SEQ ID NO: 1662 - protein, 73 aa, Homosapiens; identical to SEQ ID NO: 1660

SEQ ID NO: 1663 - DNA, 769 bp, Homosapiens
tttttttttttttttttttgagatggagtctcgttctgttgctcaggccggactgcagtggcgctatctcggctcactgtaagttccacctcccgggttcatgccattctccctgtctctactaaaaatcaaaaaaaaaaaaaaaaaaatggctgatttcagagtcatattcaggtttaaattctgtcattcagcccaaactcattactttatgttacttatgggaacctcatctaaaaagcaaggatcctgatacctgcctcatattgtggcaaggatcaaatgagtcaaataagatgcttgtgaaagtgaggacaggatctatcctcaacacctagtgcaattctttttacacattaggtacttagtaatttgggttgaattgtgttgaactaacctggcggtataggcaaaatttggaagtttggttttcagaaagtcttgacttcctcttatctctaagtaattggcatgtcctctaattcatattttcccccctcatctgttgggtgaaatactgtttatcctttagtactaaaattaaaagttacctcattcttctagctagctgatttttttttttaatctaggctaaatcatgaatacatttacatttaaataaaatattacagttgaaagtaaagggtcctttcattatctccacttccaattccagtaccctgtgtaaaggaaaacatatacatcttgcagacattttttaatgtgtttgtaatataggtacataaaaatatatgtgcttgttttaagc

SEQ ID NO: 1664 - protein, 50 aa, Homosapiens [sequence omitted]

SEQ ID NO: 1665 - DNA, 2268 bp, Homosapiens
aatgcttccgtcttggccaccttgcgagcgctcgggttgagtttcccgggcttccctgactcggctacctgttctggaggtcaggctttgggcccttgcagaggtcgccgaggggcccgcgccgccgccagagcctgggcccagtccccagtcttcagagacgccctcgaccttcctgctccgaggagctggcctgatgtcctcgggtcgcgctccgcaggttcttactttttcaaacctagagggcagtgcatgaagccaggggtcatcagccatgctccagacagtgtggttccagggcttgggcaggaacctgttgtttcaggagccagtaacctttgaggatgtggctgtgtacttcacccagaatgaatgggccagcctgcaccctacgcagagggccctatacagggaggtgatgctggagaattatgcaaatgtgacttccttgtcagcatttccattccccaaaccagatctgatattccagctggagcaaggagaagcagcatggggcccagatccctggacacttgctgggggagaggccctgagaggcatgtgcacaggctggagtgcaatggcgtgatcttcactcaccgcaacctctgccttccaggtggtaaaaccaagactgagaatgaggaaaaaactgcacagctaaacatttctaaagaatcagagtcccacagactgatagtggagggactgctgatggacgttccccagcaccctgacttcaaggacaggttagagaagtcacagctacatgatacagggaataaaacaaagataggggattgcacagatttgacagtccaggatcatgaatcttccaccactgaaagggaggagatagccaggaaattggaagaaagtagtgtcagcacacatctcattacaaagcagggttttgccaaagaacaggtgttttataaatgtggtgagtgtggcagttactacaacccacattcagactttcacctgcatcagagagttcacactaatgagaagccctacacatgcaaagaatgtgggaaaaccttcagatataactcaaaactgtcacggcatcagaaaatccacactggagagaaaccatactcatgtgaggaatgtggacaagccttcagtcaaaattcccaccttcttcagcatcagaagctccatggtggacagaggccctatgaatgtactgactgtggtaaaaccttcagttataattcaaaactgattcggcatcagagaatccatactggggagaagccctttaaatgtaaggaatgtgggaaagccttcagttgtagctatgactgcatcatccatgaacgaattcacaatggggagaagccctatgaatgtaaggagtgtgggaagagtttgagttctaattcagttctgattcagcatcagagaatccacactggggagaaaccttatgaatgtaaagagtgtggcaaggccttccaccgcagttcggtatttcttcagcaccagaggttccacactggggaacaactctacaaatgtaatgaatgttggaaaactttcagctgtagctcccgcttcatagtgcatcagagaatccacaatggggagaaaccctatgaatgccaggaatgtgggaagacattcagtcaaaagatcactctggttcagcatcagcgagttcacactggggagaaaccttatgagtgtaaggagtgcgggaaagccttcagatggaatgcaagtttcatccagcatcagaagtggcatactaggaagaaactcatcaatggaacagggctatccgcagttaagccctactgtccctgcgccatcctctctcctctgcctccccaacatacctgctctgccctagccccaccagggcctcccttatcttcttcacatgcagtggtacttcctccctctgtgcctttcttcctgctgcttccctcatctgaaaaggccaacccttcacctgtccaaatagcacatttttttcaggatctcgcttttcctgggaagtcatcccttcagagcccgaatcctttgtctcactccctgtaagccccgtcacgttctcaaaatcctttgcacctcaagttagggattccactggtctcctgattgtgtctattgatattcctctggtcttgtcttgtataagttgttactgttttcctaacttcattttaaattctcacgcttaaggaccatgtttgattagtttcttttatcccccggtaggaaatggcagtacttattctttatcgtgtccac

SEQ ID NO: 1666 - protein, 560 aa, Homosapiens; identical to SEQ ID NO: 137

SEQ ID NO: 1667 - DNA, 530 bp, Homosapiens
acctttgaggatgtggctgtgtacttcacccagaatgaatgggccagcctgcaccctacgcagagggccctatacagggaggtgatgctggagaattatgcaaatgtgacttcctttcacttctccgaaccctgaggcagtgtgtgaagctgggacgccagccatgttccagaccgcttggcgccagatggagtcttgctctatcgacaggctggagtgcagtggcgcgatcctggttcactgcaccctccacctctggggttcaagcgattctcctgcctcagcctcccgagtagctgggactacaagcacgcgccaccacacccagctaatttttgtatttttagtagagaccaggtttcaccatgttggccaggatggtctcgatcccttgacctcgtgattcccccaccttggcttcccaaagtgctgggattacaggcgtgagccaccgtgcccagcctctctttgttaatgtggtgaattacatgatttttctttcaaatattaaaccaactctgcggtgggat

SEQ ID NO: 1668 - protein, 85 aa, Homosapiens
MGQPAPYAEGPIQGGDAGELCKCDFLSLLRTLRQCVKLGRQPCSRPLGARWSLALSTGWSAVARSWFTAPSTSGVQAILLPQPPE

SEQ ID NO: 1669 - DNA, 520 bp, Homosapiens
ttgaggatgtggctgtgtacttcacccagaatgaatgggccagcctgcaccctacgcagagggccctatacagggaggtgatgctggagaattatgcaaatgtgacttccttgtcagcatttccattccccaaaccagatctgatattccagctggagcaaggagaagcagcatggggcccagatccctggacacttgctgggggagaggccctgagaggcatgtgcacaggtggtaaaaccaagactgagaatgaggaaaaaactgcacagctaaacatttctaaagaatcagagtcccacagactgatagtggagggactgctgatggacgttccccagcaccctgacttcaaggacaggttagagaagtcacagctacatgatacagggaataaaacaaagataggggattgcacagatttgacagtccaggatcatgaatcttccaccactgaaagggaggagatagccaggaaattggaagaaagtagtgtcagcacacatctcattacaaagca

SEQ ID NO: 1670 - protein, 145 aa, Homosapiens
MLENYANVTSLSAFPFPKPDLIFQLEQGEAAWGPDPWTLAGGEALRGMCTGGKTKTENEEKTAQLNISKESESHRLIVEGLLMDVPQHPDFKDRLEKSQLHDTGNKTKIGDCTDLTVQDHESSTTEREEIARKLEESSVSTHLIT

SEQ ID NO: 1671 - DNA, 1561 bp, Homosapiens
attagagactaggagaaatgcaaagcctatgggagaacataatcagataaagtgtccaatgattgctttcaagagcttttttttttttagggggtggggggtggtgccggagtttcactcttgtcacccaggctgtttgcagtggtgtgatcttggctcactgcaacctctgcctccagggttcaagtgattctcatgcctcagcctcccgagtagctgggaccacaggcatgcaccaccacgccccgctaattttgtatttttagtagagacagggtttcaccatgttggccaggctggtctcaaaatcctgacctcaggtgattcacctgcctcagtctcccaagtgctgggattacaggcatgagccactgcatctggcctgctttcaggagttaaggagggccatttggtggaccaggggcaaggctcactgaaagaatgtaagacttggaattttttattaccttgatagtataaaaaattatgagggtccttttatgcaaaaagaaaatgaagtgatgagttggcattgatagcaataatgtaaaattatgtctttgagctttattggaaggggatatggtttttcaatttgggttccttctctattttcattttccttttttttttgagacaggttcttgttctgtcatccaggctggattgcagtagtgcgatcatggatcactgcagattgcttgagccctgggggcatacaccaccacacccagctaatttttgtattttttgtagagacagagttttgccatgttgcccaggctggtctcaaaactcctggactcaaatgatcctcccacttcagcctcccaaagtgctgggattacaggcttgagccaccatgtccagcctctattccttttcatatctgttgaatttcagtacccactcatatatgtaggtacaaaaagtgacttggacttgtaccctttagggtagatgcctgagtatagtaatctctaaagctgtacatggatggaacttgttggcatcacactggtgagcaccagaggcaaagaagagaaacctgaccatgacttgctgtagtttctcagaagtgagtccattcctgatgagttactatgcaggcccttggatatgtcctcacacctactccagatttccctatgattaaatctgaattttattggtggcacttttaaattagttttataaagaactgttttgatgacaccaagaaatgttttcagtgtgcagattgctattgtttgaatatccccagcaaaattcttgttgaaacttaatccccattgtaacagtactgggtggggggtctttaagaggtgatcaggattagccaagttcatcagggtggagcctccatgatgggactggtggctttatgaggagaggaagagcaactggaactgggacacatgcttgctctgtcttgccttttgatgcctcctgccatgtcatgatgcagcaagtaagcccttaccagatgcctgcacctttatattggacttcttagccttcagaactgtgaactaaataaacctctattctgtataaatta

SEQ ID NO: 1672 - protein, 57 aa, Homosapiens [sequence omitted]

SEQ ID NO: 1673 - DNA, 557 bp, Homosapiens
gttaaaagttatacatggcatgggggttggtgcccatatgatgggactgatggctttataagaagaggaagggagacctgagctgacatgcatgctcttgccatcttgccatgtgatgctttccatcatgttatgacacagcaagaaggccagatacggcccctccacagttcccagccctcggaaccatgagctaaataaacttcttttctttataaattacccaatctgtgatattctgttatagtaacagaaaacagactgacactgatcttaccagacattatgatctcactggtttggcctactgcctagagactgacccttctcagaatcactgcttcagggcagtataacaacatgcaaaggtttatttatttatttattattttttgagacgaagtttcactcttgttgcccaggctggagtgcaatggcgcgatcttggctcaccacaacctttgcctcccaggttcaagtaattctcctgcctcagcctcccaaagtgctgggattacaggcatgagccaccgcgcccggccacaaaggttttttaa

SEQ ID NO: 1674 - protein, 30 aa, Homosapiens
MARSWLTTTFASQVQVILLPQPPKVLGLQA

SEQ ID NO: 1675 - DNA, 2158 bp, Homosapiens
tcctagagaggaggggcatggaaaacgcacttccggcggagggtctcaagctttccccggtgtcggcggcaggtggaatttccacgctttatctgcgcctgcgccgcgcgggattcgcggtccgagctgaagaggttcgcggtccggtttcacttctccgaaccctgaggcagtgtgtgaagctgggacgccagccatgttccagaccgcttggcgccaggaaccagtgacctttgaggatgtggctgtgtacttcacccagaatgaatgggccagcctggactctgtgcagagggccctgtacagggaagtgatgctggagaattatgcaaatgtggcttccctggcattcccattcaccacgcctgttctggtctcccagctggagcaaggggaactgccatggggcctcgatccctgggaacctatgggcagggaggctctcagaggtatctgtccaggggatgaggccagaactgagaaggaaggattaactccaaaggatcatgtgtccaaagaaacagagtccttcagactgatggtggggggcctgccagggaatgtttcccagcaccttgactttgggagcagcctagagcagccacaaggtcattggataattaagacaaagtcaaagaggagacatttcacagatacctcagccaggcaccatgaggcctatgaggtcaagaatggagagaagtttgagaaattaggaaaaaatattagcgtcagcacacaactcactacaaatcagacaaatcctagtggtcagatatcttatgaatgtggacaatgtggcagatatttcattcaaatggcagacttccaccgacatgagaaatgtcacactggtgaaaagtcttttgaatgcaaagaatgtggaaaatacttcagatataactcattacttattcggcatcagataattcacactggaaagaaaccatttaaatgtaaagaatgtggaaaaggtttaagttcagacacagccttgattcagcatcagagaatccacactggagaaaagccctatgaatgtaaggagtgcggcaaggccttcagtagcagctctgtcttcctccagcaccagaggttccacactggggagaagctctatgaatgtaacgaatgttggaaaactttcagttgcagctcaagtttcactgtccatcagcgaatgcacactggggagaaaccttatgaatgtaaagagtgtggaaaacgattaagctccaacacagccttgactcagcatcagcgaattcacactggggagaagccctttgaatgtaaggagtgtgggaaggcattcaatcagaaaataaccctgattcagcaccagcgagttcacactggcgagaaaccttatgagtgtaaagtgtgtggtaaaaccttcagctggtgtggaagattcattctgcatcagaaactacacactcagaagacacctgtccaagcatagggctatccatagttaggcccactgtgcctctccttttttctctttattttcatgctttttatcagtgtcctcgctgtccttcctggttagacacttggctttcatcatgaactcttctttaagttttttgaacctgtttccccaacatgaagtctctttatggttagagaagaccaaaaaacaaacaaacaaacttagaaacataaaaggaaatgtaagtttccagatttaaaggacatgctgggtgcccagcaggatggattcaagggaaacctacattaaggaaaattgctgtgaattatgaaaacaccaagtttgaataagaggatcatggagaaaaaatgagaccctaaaaagtttctagagagagaaaacaaaagatcagaaatgaaagcggggccaggcgcggtggctcgtgcctgtaatcccagcactttgggaggctgaggcgggtggatcatgaggtcaggagttcgagaccagcccgcccaatatggtgaaaccccgtctctcctgaaaaaaaaaaacacaaaaattagccaggcatggtggcgcatgcctgtaatcccagctactagagaggctgaggcaggagaatcacttgaatccctgaggcagaggttgcagtgagctgagatcgcaccactgcactccagcctgggcgacagagtgagactttgtctcaaaaacagt

SEQ ID NO: 1676 - protein, 422 aa, Homosapiens; identical to SEQ ID NO: 139

SEQ ID NO: 1677 - DNA, 2019 bp, Homosapiens
agctttccccggtgtcggcggcaggtggaatttccacgctttatctgcgcctgcgccgcgcgggattcgcggtccgagctgaagaggttcgcggtccggtttcacttctccgaaccctgaggcagtgtgtgaagctgggacgccagccatgttccagaccgcttggcgccaggggatgaggccagaactgagaaggaaggattaactccaaaggatcatgtgtccaaagaaacagagtccttcagactgatggtggggggcctgccagggaatgtttcccagcaccttgactttgggagcagcctagagcagccacaaggtcattggataattaagacaaagtcaaagaggagacatttcacagatacctcagccaggcaccatgaggcctatgaggtcaagaatggagagaagtttgagaaattaggaaaaaatattagcgtcagcacacaactcactacaaatcagacaaatcctagtggtcagatatcttatgaatgtggacaatgtggcagatatttcattcaaatggcagacttccaccgacatgagaaatgtcacactggtgaaaagtcttttgaatgcaaagaatgtggaaaatacttcagatataactcattacttattcggcatcagataattcacactggaaagaaaccatttaaatgtaaagaatgtggaaaaggtttaagttcagacacagccttgattcagcatcagagaatccacactggagaaaagccctatgaatgtaaggagtgcggcaaggccttcagtagcagctctgtcttcctccagcaccagaggttccacactggggagaagctctatgaatgtaacgaatgttggaaaactttcagttgcagctcaagtttcactgtccatcagcgaatgcacactggggagaaaccttatgaatgtaaagagtgtggaaaacgattaagctccaacacagccttgactcagcatcagcgaattcacactggggagaagccctttgaatgtaaggagtgtgggaaggcattcaatcagaaaataaccctgattcagcaccagcgagttcacactggcgagaaaccttatgagtgtaaagtgtgtggtaaaaccttcagctggtgtggaagattcattctgcatcagaaactacacactcagaagacacctgtccaagcatagggctatccatagttaggcccactgtgcctctccttttttctctttattttcatgctttttatcagtgtcctcgctgtccttcctggttagacacttggctttcatcatgaactcttctttaagttttttgaacctgtttccccaacatgaagtctctttatggttagagaagaccaaaaaacaaacaaacaaacttagaaacataaaaggaaatgtaagtttccagatttaaaggacatgctgggtgcccagcaggatggattcaagggaaacctacattaaggaaaattgctgtgaattatgaaaacaccaagtttgaataagaggatcatggagaaaaaatgagaccctaaaaagtttctagagagagaaaacaaaagatcagaaatgaaagcggggccaggcgcggtggctcgtgcctgtaatcccagcactttgggaggctgaggcgggtggatcatgaggtcaggagttcgagaccagcccgcccaatatggtgaaaccccgtctctcctgaaaaaaaaaaacacaaaaattagccaggcatggtggcgcatgcctgtaatcccagctactagagaggctgaggcaggagaatcacttgaatccctgaggcagaggttgcagtgagctgagatcgcaccactgcactccagcctgggcgacagagtgagactttgtctcaaaaacagtaaaaaatgaaaatggcattagatttttcaagagcaaccttcaaagtcagatgacaatgtgtatgccttcagacttctcatggaaaatgttttcccctgcaattctatactccaaagtataagtatagaataaaggcatttcagacccttt

SEQ ID NO: 1678 - protein, 308 aa, Homosapiens
MVGGLPGNVSQHLDFGSSLEQPQGHWIIKTKSKRRHFTDTSARHHEAYEVKNGEKFEKLGKNISVSTQLTTNQTNPSGQISYECGQCGRYFIQMADFHRHEKCHTGEKSFECKECGKYFRYNSLLIRHQIIHTGKKPFKCKECGKGLSSDTALIQHQRIHTGEKPYECKECGKAFSSSSVFLQHQRFHTGEKLYECNECWKTFSCSSSFTVHQRMHTGEKPYECKECGKRLSSNTALTQHQRIHTGEKPFECKECGKAFNQKITLIQHQRVHTGEKPYECKVCGKTFSWCGRFILHQKLHTQKTPVQA

SEQ ID NO: 1679 - DNA, 2183 bp, Homosapiens
gaaaggcggggcgggtctggccacggggcgaccgagatggcggcctccgggggcctagagggaccctgggcgtgcactcgcccttccggctcggcctttagttagtgaccagctcctcggcgttctgcagagcgtgggtttcagcgagttctacgtgccagctcttgaggatcttgcttgtccaaacccagaagacagtgcatgaagccaggggacatccgccatgctccaaacaacttggcctcaggagtcagtgacctttgaggatgtggctgtttacttcacccagaatcaatgggccagcctcgaccctgcgcagagggccctgtacggggaggtgatgctggagaattatgcaaatgtggcttctctggtagcgtttccattccccaaacctgctctgatctcccacctggagagaggggaagcaccatggggcccagatccctgggacaccgagattctgagaggcatcagtcaaggtggtgagtcctggatcaaaaatgaagggctagttataaagcaggaagcctctgaagaaacagagttgcacagaatgccagtaggaggacttctcaggaacgtttctcagcactttgattttaaaaggaaggcactgaagcagactttcaatctaaatccaaatctgatacttcgaggtggaatgaagttctatgaatgtaaagaatgtgggaaaatcttccgatataactcaaagcttattcggcatcagatgagtcatactggggaaaagccctttaagtgtaaggagtgtggcaaagctttcaagtccagctatgattgtattgtacatgagaaaaaccacattggagaagggccctatgaatgtaaggagtgtggcaaaggtttgagttccaacacagccttgactcaacatcagaggatccacactggagagaaaccctatgaatgtaaagagtgtggaaaggctttccgtaggagtgcggcatacctgcagcatcagagattacacacgggagagaaactctataaatgtaaggaatgttggaaagctttcggttgtaggtcactttttattgtccatcagagaattcatactggggagaaaccttatcaatgtaaggagtgtggcaaagccttcacccagaaaatagcctccattcagcatcagagagttcacactggggagaagccttatgaatgtaaggtgtgtgggaaagccttcaaatggtatggaagttttgttcagcatcagaaattgcaccctgtggagaagaagccagtcaaggtccttgggccatccctggtcagtccccagtgctcctctccagccatacctcctgttcttctccagggatcctgttctgcttcagccgtagctgtgccttcactgacctttccacatgctgtgctcattcctacctctgggaattttttcatgctgctgcctacatctggaataccttcttcatctgcccaaatagtgcgtgtcttccagggtcttactcccactgtgaaaccttccccagttattctcaccccttcttctcactcctcatgagctttatcttggcagtcttacggctcttatgcctagcaaatctccagcctaattttatatatttttttgagaaagggtcttgctctgtcacccaggctagagtgcggtggtgtgatcttggctcactgcaacctccccctcctgggttcaagcgattctcctccttcagactctcgaatagctgggattacaggcacgcctcaccacgcccagctaatttctgtatttttagaagagatggggtttcgccatcttggccaggctggtctcaaacacctgacctcaagtgatccgcctgccttggccccccaaagtgctgggattacaggagtgagccactgtgcccagcctccaacctaatttgagtttcatttgtatttttttcatcaccttacatgtgttaacagctgtttcaacataaactccattataataaacatacaagacctgtggctactggtagagaattggaataagcttccaacaatggactgtagagattaatggagattgtttagtgggcccatggctaggtggggtattaatacagttgaagttatgttgcccttggcacagatctttgagaatctcatacatctgtgaaaaagataatgtgaaataaacagtaaaaaaaaaaagt

SEQ ID NO: 1680 - protein, 439 aa, Homosapiens; identical to SEQ ID NO: 141

SEQ ID NO: 1681 - DNA, 1391 bp, Homosapiens
ccacggggcgaccgagatggcggcctccgggggcctagagggaccctgggcgtgcactcgcccttccggctcggcctttagttagtgaccagctcctcggcgttctgcagagcgtgggtttcagcgagttctacgtgccaggtccgcccggtgccggcttcctcgctgcccctggcggctcgtcagcccccactacccctgaacttggtcccaatggcggcccgcccctccttcacccggaccgtgggcatctgggcctcgccgaagccgtcaaggtggctgctcgggcttctagagcccgtgtccagccctttgccaccgaggcctgatcctcttttctgccctaaagaacttgccctgacagcctctggctcccgctcttgaggatcttgcttgtccaaacccagaagacagtgcatgaagccaggggacatccgccatgctccaaacaacttggcctcagtagcgtttccattccccaaacctgctctgatctcccacctggagagaggggaagcaccatggggcccagatccctgggacaccgagattctgagaggcatcagtcaaggtggtgagtcctggatcaaaaatgaagggctagttataaagcaggaagcctctgaagaaacagagttgcacagaatgccagtaggaggacttctcaggaacgtttctcagcactttgattttaaaaggaaggcactgaagcagactttcaatctaaatccaaatctgatacttcgaggtggaatgaagttctatgaatgtaaagaatgtgggaaaatcttccgatataactcaaagcttattcggcatcagatgagtcatactggggaaaagccctttaagtgtaaggagtgtggcaaagctttcaagtccagctatgattgtattgtacatgagaaaaaccacattggagaagggccctatgaatgtaaggagtgtggcaaaggtttgagttccaacacagccttgactcaacatcagaggatccacactggagagaaaccctatgaatgtaaagagtgtggaaaggctttccgtaggagtgcggcatacctgcagcatcagagattacacacgggagagaaactctataaatgtaaggaatgttggaaagctttcggttgtaggtcactttttattgtccatcagagaattcatactggggagaaaccttatcaatgtaaggagtgtggcaaagccttcacccagaaaatagcctccattcagcatcagagagttcacactggggagaagccttatgaatgtaaggtgtgtgggaaagccttcaaatggtatggaagttttgttcagcatcagaaattgcaccctgtggagaagaagccagtcaaggtccttgggccatccctggtcagtccccagtg

SEQ ID NO: 1682 - protein, 323 aa, Homosapiens
MKPGDIRHAPNNLASVAFPFPKPALISHLERGEAPWGPDPWDTEILRGISQGGESWIKNEGLVIKQEASEETELHRMPVGGLLRNVSQHFDFKRKALKQTFNLNPNLILRGGMKFYECKECGKIFRYNSKLIRHQMSHTGEKPFKCKECGKAFKSSYDCIVHEKNHIGEGPYECKECGKGLSSNTALTQHQRIHTGEKPYECKECGKAFRRSAAYLQHQRLHTGEKLYKCKECWKAFGCRSLFIVHQRIHTGEKPYQCKECGKAFTQKIASIQHQRVHTGEKPYECKVCGKAFKWYGSFVQHQKLHPVEKKPVKVLGPSLVSP

SEQ ID NO: 1683 - DNA, 1518 bp, Homosapiens
ccacggggcgaccgagatggcggcctccgggggcctagagggaccctgggcgtgcactcgcccttccggctcggcctttagttagtgaccagctcctcggcgttctgcagagcgtgggtttcagcgagttctacgtgccaggtccgcccggtgccggcttcctcgctgcccctggcggctcgtcagcccccactacccctgaacttggtcccaatggcggcccgcccctccttcacccggaccgtgggcatctgggcctcgccgaagccgtcaaggtggctgctcgggcttctagagcccgtgtccagccctttgccaccgaggcctgatcctcttttctgccctaaagaacttgccctgacagcctctggctcccgctcttgaggatcttgcttgtccaaacccagaagacagtgcatgaagccaggggacatccgccatgctccaaacaacttggcctcaggagtcagtgacctttgaggatgtggctgtttacttcacccagaatcaatgggccagcctcgaccctgcgcagagggccctgtacggggaggtgatgctggagaattatgcaaatgtggcttctctggtagcgtttccattccccaaacctgctctgatctcccacctggagagaggggaagcaccatggggcccagatccctgggacaccgagattctgagaggcatcagtcaaggtggtgagtcctggatcaaaaatgaagggctagttataaagcaggaagcctctgaagaaacagagttgcacagaatgccagtaggaggacttctcaggaacgtttctcagcactttgattttaaaaggaaggcactgaagcagactttcaatctaaatccaaatctgatacttcgaggtggaatgaagttctatgaatgtaaagaatgtgggaaaatcttccgatataactcaaagcttattcggcatcagatgagtcatactggggaaaagccctttaagtgtaaggagtgtggcaaagctttcaagtccagctatgattgtattgtacatgagaaaaaccacattggagaagggccctatgaatgtaaggagtgtggcaaaggtttgagttccaacacagccttgactcaacatcagaggatccacactggagagaaaccctatgaatgtaaagagtgtggaaaggctttccgtaggagtgcggcatacctgcagcatcagagattacacacgggagagaaactctataaatgtaaggaatgttggaaagctttcggttgtaggtcactttttattgtccatcagagaattcatactggggagaaaccttatcaatgtaaggagtgtggcaaagccttcacccagaaaatagcctccattcagcatcagagagttcacactggggagaagccttatgaatgtaaggtgtgtgggaaagccttcaaatggtatggaagttttgttcagcatcagaaattgcaccctgtggagaagaagccagtcaaggtccttgggccatccctggtcagtccccagtg

SEQ ID NO: 1684 - protein, 358 aa, Homosapiens
MLQTTWPQESVTFEDVAVYFTQNQWASLDPAQRALYGEVMLENYANVASLVAFPFPKPALISHLERGEAPWGPDPWDTEILRGISQGGESWIKNEGLVIKQEASEETELHRMPVGGLLRNVSQHFDFKRKALKQTFNLNPNLILRGGMKFYECKECGKIFRYNSKLIRHQMSHTGEKPFKCKECGKAFKSSYDCIVHEKNHIGEGPYECKECGKGLSSNTALTQHQRIHTGEKPYECKECGKAFRRSAAYLQHQRLHTGEKLYKCKECWKAFGCRSLFIVHQRIHTGEKPYQCKECGKAFTQKIASIQHQRVHTGEKPYECKVCGKAFKWYGSFVQHQKLHPVEKKPVKVLGPSLVSP

SEQ ID NO: 1685 - DNA, 2116 bp, Homosapiens
ccacggggcgaccgagatggcggcctccgggggcctagagggaccctgggcgtgcactcgcccttccggctcggcctttagttagtgaccagctcctcggcgttctgcagagcgtgggtttcagcgagttctacgtgccaggtccgcccggtgccggcttcctcgctgcccctggcggctcgtcagcccccactacccctgaacttggtcccaatggcggcccgcccctccttcacccggaccgtgggcatctgggcctcgccgaagccgtcaaggtggctgctcgggcttctagagcccgtgtccagccctttgccaccgaggcctgatcctcttttctgccctaaagaacttgccctgacagcctctggctcccgctcttgaggatcttgcttgtccaaacccagaagacagtgcatgaagccaggggacatccgccatgctccaaacaacttggcctcaggagtcagtgacctttgaggatgtggctgtttacttcacccagaatcaatgggccagcctcgaccctgcgcagagggccctgtacggggaggtgatgctggagaattatgcaaatgtggcttctctggtagcgtttccattccccaaacctgctctgatctcccacctggagagaggggaagcaccatggggcccagatccctgggacaccgagattctgagaggcatcagtcaaggtggtgagtcctggatcaaaaatgaagggctagttataaagcaggaagcctctgaagaaacagagttgcacagaatgccagtaggaggacttctcaggaacgtttctcagcactttgattttaaaaggaaggcactgaagcagactttcaatctaaatccaaatctgatacttcgaggtggatcagttgaggtcaggagtttgagaccagcctgaccaacatggagaaaccctatctctactaaaaatacaaaaattagctggatgtggtggtgtgtgcctgtaatcccagctacttgggaggctgaggcaggagaattgcttgaatccagaggcagaggttgcagtgagctgaggttgcaccactgtgcttcagcctgggtaacagagtgagactgtctcaaaaaaaaaaaaaatttagttccaaatattactgctcgttgataatgtgtctggtcacccaagagttctgatggagatgtacaaagagattaatgtttttatgtctgctaaacaacatccattctgcaggatccattactccatgggtcaaggagtaattttgactttcaagtattatttaaggaatacattttgtaaggctgtggctgccatagtggttgttctgtacaaagtaacttgaaaaccttctggaaaggattcatcattctagatgccattaaggacatttgtgattcatgggagaaggtcaaaatatcaacattaacaggagttcagaagacattgacctcaaccctgatggatgatcttgaggggttcaagacttcagtggacgaagtaactgcagatgtggtggaaatagcaagataactagacttagaagtggaacctgcatatgtgactgaattgctgcaatctcatgataaaacgtgaacaaatgaggagttgcttctaatataagagccacaaaagtggtttcttgagatggaaactactcctggtgaagatcctgtgaccattgttgaaatgacaacaaaggacttagaatattacataaacttagttgataaaacagcagcagagtttgagaggattgacttcaattttgaagaatgttccactgtgggtaaaaggctatccaacagcaacacatgctacagataaatctttcggaaaggaagagtcagttgatgttgcagccttccttgttgtctcatttaaagaaatctctagagccacactaaccttcagcaaccaccacaccgatcattcagcagccatcaacagtgaggcaagactgtcttccagcaacaaagactcactgaagacttagattatcgttaacatcttttagcaataaaatatttttaaattaaagtatgtacattgtcagatataatgctattgcaaacttaatagactataatatagattaaacataacttttataggtactgg

SEQ ID NO: 1686 - protein, 157 aa, Homosapiens
MLQTTWPQESVTFEDVAVYFTQNQWASLDPAQRALYGEVMLENYANVASLVAFPFPKPALISHLERGEAPWGPDPWDTEILRGISQGGESWIKNEGLVIKQEASEETELHRMPVGGLLRNVSQHFDFKRKALKQTFNLNPNLILRGGSVEVRSLRPA

SEQ ID NO: 1687 - DNA, 1003 bp, Homosapiens
ccacggggcgaccgagatggcggcctccgggggcctagagggaccctgggcgtgcactcgcccttccggctcggcctttagttagtgaccagctcctcggcgttctgcagagcgtgggtttcagcgagttctacgtgccaggtccgcccggtgccggcttcctcgctgcccctggcggctcgtcagcccccactacccctgaacttggtcccaatggcggcccgcccctccttcacccggaccgtgggcatctgggcctcgccgaagccgtcaaggtggctgctcgggcttctagagcccgtgtccagccctttgccaccgaggcctgatcctcttttctgccctaaagaacttgccctgacagcctctggctcccgctcttgaggatcttgcttgtccaaacccagaagacagtgcatgaagccaggggacatccgccatgctccaaacaacttggcctcaggagtcagtgacctttgaggatgtggctgtttacttcacccagaatcaatgggccagcctcgaccctgcgcagagggccctgtacggggaggtgatgctggagaattatgcaaatgtggcttctctggtagcgtttccattccccaaacctgctctgatctcccacctggagagaggggaagcaccatggggcccagatccctgggacaccgagattctgagaggcatcagtcaagttctgggttttcagccccctgaactacgcatgttaagaaacatttataaggagttatgtgtatttattatgcttaaagattcaactagcctgccttaaggtacgtaatatctctcaaccccaaataccctttcttctctttgtttaaaatgcatctttattcatatacccaatttttctttttattggtattagattttgactacaagagattggtctcattcccaggttaccatgaatatgcctgcatatcatcttttttgttcattaaaaacattttttccccattttagttttctattccaa

SEQ ID NO: 1688 - protein, 118 aa, Homosapiens
MLQTTWPQESVTFEDVAVYFTQNQWASLDPAQRALYGEVMLENYANVASLVAFPFPKPALISHLERGEAPWGPDPWDTEILRGISQVLGFQPPELRMLRNIYKELCVFIMLKDSTSLP

SEQ ID NO: 1689 - DNA, 1128 bp, Homosapiens
agagcgtgggtttcagcgagttctacgtgccagctcttgaggatcttgcttgtccaaacccagaagacagtgcatgaagccaggggacatccgccatgctccaaacaacttggcctcagatgttttggggattctagtagcccttgggtttgatgacttcagaggagagttttgcaatcagcagcctccagaaatactggtagcgtttccattccccaaacctgctctgatctcccacctggagagaggggaagcaccatggggcccagatccctgggacaccgagattctgagaggcatcagtcaaggtggtgagtcctggatcaaaaatgaagggctagttataaagcaggaagcctctgaagaaacagagttgcacagaatgccagtaggaggacttctcaggaacgtttctcagcactttgattttaaaaggaaggcactgaagcagactttcaatctaaatccaaatctgatacttcgaggtggaatgaagttctatgaatgtaaagaatgtgggaaaatcttccgatataactcaaagcttattcggcatcagatgagtcatactggggaaaagccctttaagtgtaaggagtgtggcaaagctttcaagtccagctatgattgtattgtacatgagaaaaaccacattggagaagggccctatgaatgtaaggagtgtggcaaaggtttgagttccaacacagccttgactcaacatcagaggatccacactggagagaaaccctatgaatgtaaagagtgtggaaaggctttccgtaggagtgcggcatacctgcagcatcagagattacacacgggagagaaactctataaatgtaaggaatgttggaaagctttcggttgtaggtcactttttattgtccatcagagaattcatactggggagaaaccttatcaatgtaaggagtgtggcaaagccttcacccagaaaatagcctccattcagcatcagagagttcacactggggagaagccttatgaatgtaaggtgtgtgggaaagccttcaaatggtatggaagttttgttcagcatcagaaattgcaccctgtggagaagaagccagtcaaggtccttgggccatccctggtcagtccccagtg

SEQ ID NO: 1690 - protein, 350 aa, Homosapiens
MKPGDIRHAPNNLASDVLGILVALGFDDFRGEFCNQQPPEILVAFPFPKPALISHLERGEAPWGPDPWDTEILRGISQGGESWIKNEGLVIKQEASEETELHRMPVGGLLRNVSQHFDFKRKALKQTFNLNPNLILRGGMKFYECKECGKIFRYNSKLIRHQMSHTGEKPFKCKECGKAFKSSYDCIVHEKNHIGEGPYECKECGKGLSSNTALTQHQRIHTGEKPYECKECGKAFRRSAAYLQHQRLHTGEKLYKCKECWKAFGCRSLFIVHQRIHTGEKPYQCKECGKAFTQKIASIQHQRVHTGEKPYECKVCGKAFKWYGSFVQHQKLHPVEKKPVKVLGPSLVSP

SEQ ID NO: 1691 - DNA, 1395 bp, Homosapiens
atgggcctgacggtaatgagaaatgagaaaagtgctgaaaaattgatggcgcctgcagattgcgcaggctggcacacagcggggggccccctgcagcaggcgcgcggggcgcagtatgctaatgccggcgcctgggccccgggaaagggaggaagaaaagcctgcacaaagaagagaaatgcaaatgacaggcacagagatcagtgccgagaatcccggattaactgcgtggagctgggtagtgacttcttcgaaaaaggtgctgggggaagtgaggaagcgatgtctggggataggaaaaggagcggcccagccgacagtggtggcctaacaagcaccccgggaacttctacaacgtgggccagtgggaaaggaggccaggaagaggaagcaccctgctggaatgtccagtccttcgtctgggctcagctcaggacagagtcagacatattggttcccagtactgaaatagaaactgagccatctcagaagatgctaacacctctgaaaaatagtgagaatcctattccctttaccagcagcagctctgaatcctcagctgaggaactcgggatcaccatggcagctgggaccctgtactcatatcctgaaaacctgagggccttcaaggtgttcattgctactcagtacagcgagtctcaggtccacgtgctctccgcaccaccccactcccactttggccaaaccaacaacacccctgaatttctctgcaagtttcttgccggcaagtttccagtattagagggtgatgatggattctgtgtgtttgagagcaatgccattgcctactatgaggagctgcagggaagtactccagcggcaacagcccaagtggtgcagtggctctataagcaggtcctggaggcttctttccaccaggccttccccaataccaaccgctggttcctcacctgcattaaccagccccaattccaggttgtttgtggggaagtgagtctgtgtgagaacatggcccagtttgatgctaaaaagtttgcagagagccaccctaaacaggacaccccatggaaaaggaagtgttcacaggaagggaagcagaagccccaggctgagcagaaagagggtaaaaaggcagctgcccctgcttctgaggaggagatggatgaatgtgagcaggaagatgcaaggctggcccctcccccagctgctgaagaccatgctgaggggcccaagggaagaggaggccagtggctgagcattgtagagcaaccaccgggctcagatgagagtctctcaacagatgcagggaagagagcagctgttcacggcagtggccctcctagtgctttgagactcctcacagccccacaaggttcctttgggccctctcagaagtctggccacccagcatga

SEQ ID NO: 1692 - protein, 464 aa, Homosapiens
MGLTVMRNEKSAEKLMAPADCAGWHTAGGPLQQARGAQYANAGAWAPGKGGRKACTKKRNANDRHRDQCRESRINCVELGSDFFEKGAGGSEEAMSGDRKRSGPADSGGLTSTPGTSTTWASGKGGQEEEAPCWNVQSFVWAQLRTESDILVPSTEIETEPSQKMLTPLKNSENPIPFTSSSSESSAEELGITMAAGTLYSYPENLRAFKVFIATQYSESQVHVLSAPPHSHFGQTNNTPEFLCKFLAGKFPVLEGDDGFCVFESNAIAYYEELQGSTPAATAQVVQWLYKQVLEASFHQAFPNTNRWFLTCINQPQFQVVCGEVSLCENMAQFDAKKFAESHPKQDTPWKRKCSQEGKQKPQAEQKEGKKAAAPASEEEMDECEQEDARLAPPPAAEDHAEGPKGRGGQWLSIVEQPPGSDESLSTDAGKRAAVHGSGPPSALRLLTAPQGSFGPSQKSGHPA

SEQ ID NO: 1693 - DNA, 709 bp, Homosapiens
aaatgagtttcttcacatgctgagagcagtgctcctcagacagtaacatgcacacgaaatatgtgaggatcctgttaaagcacagattctgattcagcaggtctggggtggggtctgaaaaactatgtttcttacaagcttctgggttattccagtggtgctgatccaaggaccatactttgtgtagcaaggacttagaagcctgcctcacttagtgaatgttacatgtggtagctataattatatgtgtttagtaattgatgagcaaaattgagctgaagtttttacagtctgataacagtatattcagggttttcatatctctcattttctttaatcctcataattcaacaccgtagggattcatgtccccatttacaagtaagagatttgaggctcagggggtaactcagagtgaccaactgtccaagtttgcttgggattttcctgggtctagcactggaagtcttgcatcccaagaatcccctcagccccagacaaactaaaaggggttggtcaccctagaactaataagtactctactggaattcaaagccaggtctctgaattccaaagatgtattctttcctggagactagcactgcctcgaggctaaacagaggagggatatatgctcatacactgtaagagattgtctccaaaggtgccccctcagcccccaatgaataatgcctctcagtacttatgt

SEQ ID NO: 1694 - protein, 46 aa, Homosapiens
MSPFTSKRFEAQGVTQSDQLSKFAWDFPGSSTGSLASQESPQPQTN

SEQ ID NO: 1695 - DNA, 1923 bp, Homosapiens
tccccttttgccttcaaccttcgagccgccacgtaatgccacgtccccgcgcatgcgcatcttggccgctgctggcggctgtttccgggcttagagggctggagtggccgccgagttggaggcggtggtggcagcagtaggagtgtgtagagtgcgggattggggcccaggccctgcggagggcgggggaagttgtcttcttttttttccggaggggccggtaaacctggtggctgaacggcaagatgaatttcctccgcggggtaatggggggtcagagtgccggaccccagcacacagaagccgagacgagaagaaaattccacaagacagagtgaagatttgggaagccaatttacagaaattttcattaagcagcaggaaaatgtcactcttctgttatctttattggaggagtttgatttccatgtccgctggcctggtgtgaagcttcttacttctcttttaaaacaactagggcctcaggtgcaacaaattattttagtcagtcctatgggtgtttcaagattgatggacttactagcggattccagggaagttatacgtaatgatggcgtcttactactgcaggcactaacaagaagcaatggtgcaatccagaaaattgttgcttttgaaaatgctttcgagagactactggacattatttcagaggaggggaacagtgatggaggtatagtagttgaagattgtttgattttgctccaaaacttattaaaaaacaacaactccaatcaaaatttttttaaagaaggctcatatattcaacgtatgaaaccttggtttgaagttggagatgaaaattctggctggtctgcacagaaagtgaccaatctacatctaatgctacagcttgttcgtgtattggtatctcccaccaaccctcctggtgctaccagtagctgccagaaggctatgttccagtgtgggttattgcagcagctttgtactatcctaatggctactggggttcctgctgatatcctgactgagaccataaatactgtatcagaagttattcgaggctgccaagtaaaccaagactactttgcatctgtaaatgcaccttcaaacccaccaagaccggcaattgtagtacttctcatgtccatggttaatgaaaggcagccatttgttttgcgctgtgctgttctctattgtttccagtgtttcttgtataaaaaccaaaaaggacaaggagaaatcgtgtcaacacttttaccttctaccattgatgcaacaggtaattcagtttcagctggccagttattatgtggaggtttgttttctactgattcactttcaaactggtgtgctgctgtggcccttgcccatgcgttgcaagaaaatgccacccagaaagaacagttgctcagggttcaacttgctacaagtattggcaaccctccagtttctttacttcaacagtgcaccaatattctttcacagggaagcaaaatacaaacaagagttggattattaatgttgctttgtacctggctaagcaattgtcccattgcagtaacgcattttcttcacaattcagccaatgttccatttcttacaggacaaattgcagaaaatcttggagaagaagagcagttggtccaaggcttatgtgcccttttgttgggcatttcgatttatttcaatgataactcacttgagagctacatgaaagagaagctaaaacaactgattgagaagaggattggcaaagagaatttcatagagaaactaggatttattagcaaacatgagttgtattccagagcatctcagaaaccccagccaaactttcccagtccagaatacatgatatttgatcatgagtttacgaagctggtaaaagaacttgaaggtgttataactaaggctatttataagtccagtgaagaagat

SEQ ID NO: 1696 - protein, 469 aa, Homosapiens
MGVSRLMDLLADSREVIRNDGVLLLQALTRSNGAIQKIVAFENAFERLLDIISEEGNSDGGIVVEDCLILLQNLLKNNNSNQNFFKEGSYIQRMKPWFEVGDENSGWSAQKVTNLHLMLQLVRVLVSPTNPPGATSSCQKAMFQCGLLQQLCTILMATGVPADILTETINTVSEVIRGCQVNQDYFASVNAPSNPPRPAIVVLLMSMVNERQPFVLRCAVLYCFQCFLYKNQKGQGEIVSTLLPSTIDATGNSVSAGQLLCGGLFSTDSLSNWCAAVALAHALQENATQKEQLLRVQLATSIGNPPVSLLQQCTNILSQGSKIQTRVGLLMLLCTWLSNCPIAVTHFLHNSANVPFLTGQIAENLGEEEQLVQGLCALLLGISIYFNDNSLESYMKEKLKQLIEKRIGKENFIEKLGFISKHELYSRASQKPQPNFPSPEYMIFDHEFTKLVKELEGVITKAIYKSSEE

SEQ ID NO: 1697 - DNA, 3823 bp, Homosapiens
tccccttttgccttcaaccttcgagccgccacgtaatgccacgtccccgcgcatgcgcatcttggccgctgctggcggctgtttccgggcttagagggctggagtggccgccgagttggaggcggtggtggcagcagtaggagtgtgtagagtgcgggattggggcccaggccctgcggagggcgggggaagttgtcttcttttttttccggaggggccggtaaacctggtggctgaacggcaagatgaatttcctccgcggggtaatggggggtcagagtgccggaccccagcacacagaagccgagacgagaagaaaattccacaagacagagtgaagatttgggaagccaatttacagaaattttcattaagcagcaggaaaatgtcactcttctgttatctttattggaggagtttgatttccatgtccgctggcctggtgtgaagcttcttacttctcttttaaaacaactagggcctcaggtgcaacaaattattttagtcagtcctatgggtgtttcaagattgatggacttactagcggattccagggaagttatacgtaatgatggcgtcttactactgcaggcactaacaagaagcaatggtgcaatccagaaaattgttgcttttgaaaatgctttcgagagactactggacattatttcagaggaggggaacagtgatggaggtatagtagttgaagattgtttgattttgctccaaaacttattaaaaaacaacaactccaatcaaaatttttttaaagaaggctcatatattcaacgtatgaaaccttggtttgaagttggagatgaaaattctggctggtctgcacagaaagtgaccaatctacatctaatgctacagcttgttcgtgtattggtatctcccaccaaccctcctggtgctaccagtagctgccagaaggctatgttccagtgtgggttattgcagcagctttgtactatcctaatggctactggggttcctgctgatatcctgactgagaccataaatactgtatcagaagttattcgaggctgccaagtaaaccaagactactttgcatctgtaaatgcaccttcaaacccaccaagaccggcaattgtagtacttctcatgtccatggttaatgaaaggcagccatttgttttgcgctgtgctgttctctattgtttccagtgtttcttgtataaaaaccaaaaaggacaaggagaaatcgtgtcaacacttttaccttctaccattgatgcaacaggtaattcagtttcagctggccagttattatgtggaggtttgttttctactgattcactttcaaactggtgtgctgctgtggcccttgcccatgcgttgcaagaaaatgccacccagaaagaacagttgctcagggttcaacttgctacaagtattggcaaccctccagtttctttacttcaacagtgcaccaatattctttcacagggaagcaaaatacaaacaagagttggattattaatgttgctttgtacctggctaagcaattgtcccattgcagtaacgcattttcttcacaattcagccaatgttccatttcttacaggacaaattgcagaaaatcttggagaagaagagcagttggtccaaggcttatgtgcccttttgttgggcatttcgatttatttcaatgataactcacttgagagctacatgaaagagaagctaaaacaactgattgagaagaggattggcaaagagaatttcatagagaaactaggatttattagcaaacatgagttgtattccagagcatctcagaaaccccagccaaactttcccagtccagaatacatgatatttgatcatgagtttacgaagctggtaaaagaacttgaaggtgttataactaaggctatttataagtccagtgaagaagataaaaaagaagaagaggtgaaaaaaacattagaacagcatgacaatattgtgactcactacaaaaatatgattcgagagcaggatctccaacttgaggaattaaggcagcaggtttctacattaaaatgtcaaaatgaacagctccagacggcagtcacacagcaagtatcacagatccagcagcacaaagaccagtataatcttcttaaaatacagctaggaaaagacaatcagcatcaaggttcttacagtgagggggctcagatgaatggcattcagccagaagaaattggtagattgcgagaagagatagaagaattaaaacgtaatcaggaacttttacaaagccagctgactgaaaaggactctatgattgaaaatatgaaatcttcccaaacatctggcacaaatgaacagtcttcagcaatagtttcagctagagattctgaacaagttgcagaattaaaacaggaactggcaactttaaagtctcagttaaactcacaatctgtggagatcaccaaactacagacagaaaagcaggaactgttacagaaaacagaagcgtttgcaaaatcagttgaggtacaaggagagaccgagactataatagccaccaaaactactgatgtagaaggaagactgtcagcattattacaagagaccaaagagttaaagaatgaaattaaagctctgtctgaggaaagaactgccattaaagagcagctggattcatctaatagtaccattgccattttacaaactgagaaagacaaactagagttggaaattacagattctaaaaaagaacaagatgatctcttggtgctcttggccgatcaagatcagaaaatactgtcattgaagaataaactcaaggatcttggtcatccagttgaagaagaggatgaacttgaatctggagaccaagaggatgaggatgatgaaagtgaagatcctggcaaggatctagatcatatctagttttcaaatctctaggaacaatagagattatatcataactctgaagatggactctaaactttggtttacctccatggaaaataaagatttagaaaccaggtggaaaacattcactattaagactattgatatatttttgtaatgttgccacccatgttgaaaaccttaaaactgaatttatgtagaacacacatcttttatttaaatccatctgaactgtcccaaaatgtaatttgcaaagagcttcaaacaccaaaaatataccattttaaggcatgtggtgacaatgctatttgccttagttcattcgttgtttactttgcaaaatttgtgacttttaagtactaacacatttgattgaatgtgtattgaattggaattattatttctaaattcagcatttgagtccttagttgatgattttcttttaaagaaattagtttatttaaaagcaagatagcctgggttgggagttagtgcatatcatcagccctccatctaatgtgattgctaagatgtgcaggataggacagcttagaatgagtgccttgacacctacatatggctgcattccatacctcagtgaagaagccgaaggatgctgacacacagtgatgtggagggcattccggagaaacttttgcaacagtgtattaatgtgattggttttctttttgttttaagctaaacatctaaaacaaatttcaagttaacagttcatacaactcagatttagtagtattgtttatcataaaacatattatgttcctagttttaaaaagacccaaagtatgattaatataatttattggcatttttgctgaataggtttaagtcagataatagattttaaaaaagcaaatgaggcaatgtgtcaaaatttaatgtttcataataaaaatagatacgttgactt

SEQ ID NO: 1698 - protein, 797 aa, Homosapiens
MGVSRLMDLLADSREVIRNDGVLLLQALTRSNGAIQKIVAFENAFERLLDIISEEGNSDGGIVVEDCLILLQNLLKNNNSNQNFFKEGSYIQRMKPWFEVGDENSGWSAQKVTNLHLMLQLVRVLVSPTNPPGATSSCQKAMFQCGLLQQLCTILMATGVPADILTETINTVSEVIRGCQVNQDYFASVNAPSNPPRPAIVVLLMSMVNERQPFVLRCAVLYCFQCFLYKNQKGQGEIVSTLLPSTIDATGNSVSAGQLLCGGLFSTDSLSNWCAAVALAHALQENATQKEQLLRVQLATSIGNPPVSLLQQCTNILSQGSKIQTRVGLLMLLCTWLSNCPIAVTHFLHNSANVPFLTGQIAENLGEEEQLVQGLCALLLGISIYFNDNSLESYMKEKLKQLIEKRIGKENFIEKLGFISKHELYSRASQKPQPNFPSPEYMIFDHEFTKLVKELEGVITKAIYKSSEEDKKEEEVKKTLEQHDNIVTHYKNMIREQDLQLEELRQQVSTLKCQNEQLQTAVTQQVSQIQQHKDQYNLLKIQLGKDNQHQGSYSEGAQMNGIQPEEIGRLREEIEELKRNQELLQSQLTEKDSMIENMKSSQTSGTNEQSSAIVSARDSEQVAELKQELATLKSQLNSQSVEITKLQTEKQELLQKTEAFAKSVEVQGETETIIATKTTDVEGRLSALLQETKELKNEIKALSEERTAIKEQLDSSNSTIAILQTEKDKLELEITDSKKEQDDLLVLLADQDQKILSLKNKLKDLGHPVEEEDELESGDQEDEDDESEDPGKDLDHI

SEQ ID NO: 1699 - DNA, 3900 bp, Homosapiens
tccccttttgccttcaaccttcgagccgccacgtaatgccacgtccccgcgcatgcgcatcttggccgctgctggcggctgtttccgggcttagagggctggagtggccgccgagttggaggcggtggtggcagcagtaggagtgtgtagagtgcgggattggggcccaggccctgcggagggcgggggaagttgtcttcttttttttccggaggggccggtaaacctggtggctgaacggcaagatgaatttcctccgcggggtaatggggggtcagagtgccggaccccagcacacagaagccgagacgagaagaaaattccacaagacagagtgaagatttgggaagccaatttacagaaattttcattaagcagcaggaaaatgtcactcttctgttatctttattggaggagtttgatttccatgtccgctggcctggtgtgaagcttcttacttctcttttaaaacaactagggcctcaggtgcaacaaattattttagtcagtcctatgggtgtttcaagattgatggacttactagcggattccagggaagttatacgtaatgatggcgtcttactactgcaggcactaacaagaagcaatggtgcaatccagaaaattgttgcttttgaaaatgctttcgagagactactggacattatttcagaggaggggaacagtgatggaggtatagtagttgaagattgtttgattttgctccaaaacttattaaaaaacaacaactccaatcaaaatttttttaaagaaggctcatatattcaacgtatgaaaccttggtttgaagttggagatgaaaattctggctggtctgcacagaaagtgaccaatctacatctaatgctacagcttgttcgtgtattggtatctcccaccaaccctcctggtgctaccagtagctgccagaaggctatgttccagtgtgggttattgcagcagctttgtactatcctaatggctactggggttcctgctgatatcctgactgagaccataaatactgtatcagaagttattcgaggctgccaagtaaaccaagactactttgcatctgtaaatgcaccttcaaacccaccaagaccggcaattgtagtacttctcatgtccatggttaatgaaaggcagccatttgttttgcgctgtgctgttctctattgtttccagtgtttcttgtataaaaaccaaaaaggacaaggagaaatcgtgtcaacacttttaccttctaccattgatgcaacaggtaattcagtttcagctggccagttattatgtggaggtttgttttctactgattcactttcaaactggtgtgctgctgtggcccttgcccatgcgttgcaagaaaatgccacccagaaagaacagttgctcagggttcaacttgctacaagtattggcaaccctccagtttctttacttcaacagtgcaccaatattctttcacagggaagcaaaatacaaacaagagttggattattaatgttgctttgtacctggctaagcaattgtcccattgcagtaacgcattttcttcacaattcagccaatgttccatttcttacaggacaaattgcagaaaatcttggagaagaagagcagttggtccaaggcttatgtgcccttttgttgggcatttcgatttatttcaatgataactcacttgagagctacatgaaagagaagctaaaacaactgattgagaagaggattggcaaagagaatttcatagagaaactaggatttattagcaaacatgagttgtattccagagcatctcagaaaccccagccaaactttcccagtccagaatacatgatatttgatcatgagtttacgaagctggtaaaagaacttgaaggtgttataactaaggctatttataagtccagtgaagaagataaaaaagaagaagaggtgaaaaaaacattagaacagcatgacaatattgtgactcactacaaaaatatgattcgagagcaggatctccaacttgaggaattaaggcagcaggtttctacattaaaatgtcaaaatgaacagctccagacggcagtcacacagcaagtatcacagatccagcagcacaaagaccagtataatcttcttaaaatacagctaggaaaagacaatcagcatcaaggttcttacagtgagggggctcagatgaatggcattcagccagaagaaattggtagattgcgagaagagatagaagaattaaaacgtaatcaggaacttttacaaagccagctgactgaaaaggactctatgattgaaaatatgaaatcttcccaaacatctggcacaaatgaacagtcttcagcaatagtttcagctagagattctgaacaagttgcagaattaaaacaggaactggcaactttaaagtctcagttaaactcacaatctgtggagatcaccaaactacagacagaaaagcaggaactgttacagaaaacagaagcgtttgcaaaatcagttgaggtacaaggagagaccgagactataatagccaccaaaactactgatgtagaaggaagactgtcagcattattacaagagaccaaagagttaaagaatgaaattaaagctctgtctgaggaaagaactgccattaaagagcagctggattcatctaatagtaccattgccattttacaaactgagaaagacaaactagagttggaaattacagattctaaaaaagaacaagatgatctcttggtgctcttggccgatcaagatcagaaaatactgtcattgaagaataaactcaaggatcttggtcatccagttgaagaagaggatgaacttgaatctggagaccaagaggatgaggatgatgaaagtgaagatcctggcaaggatctagatcatatctagttttcaaatctctaggaacaatagagattatatcataactctgaagatggactctaaactttggtttacctccatggaaaataaagatttagaaaccaggtggaaaacattcactattaagactattgatatatttttgtaatgttgccacccatgttgaaaaccttaaaactgaatttatgtagaacacacatcttttatttaaatccatctgaactgtcccaaaatgtaatttgcaaagagcttcaaacaccaaaaatataccattttaaggcatgtggtgacaatgctatttgccttagttcattcgttgtttactttgcaaaatttgtgacttttaagtactaacacatttgattgaatgtgtattgaattggaattattatttctaaattcagcatttgagtccttagttgatgattttcttttaaagaaattagtttatttaaaagcaagatagcctgggttgggagttagtgcatatcatcagccctccatctaatgtgattgctaagatgtgcaggataggacagcttagaatgagtgccttgacacctacatatggctgcattccatacctcagtgaagaagccgaaggatgctgacacacagtgatgtggagggcattccggagaaacttttgcaacagtgtattaatgtgattggttttctttttgttttaagctaaacatctaaaacaaatttcaagttaacagttcatacaactcagatttagtagtattgtttatcataaaacatattatgttcctagttttaaaaagacccaaagtatgattaatataatttattggcatttttgctgaataggtttaagtcagataatagattttaaaaaagcaaatgaggcaatgtgtcaaaatttaatgtttcataataaaaatagatacgttgacttaatccttggtcatggttccctttgtttacatcttaaaagtattttattcttaataaaagatgaggcaagtgaaaatg

SEQ ID NO: 1700 - protein, 797 aa, Homosapiens; identical to SEQ ID NO: 1698

SEQ ID NO: 1701 - DNA, 3921 bp, Homosapiens
tccccttttgccttcaaccttcgagccgccacgtaatgccacgtccccgcgcatgcgcatcttggccgctgctggcggctgtttccgggcttagagggctggagtggccgccgagttggaggcggtggtggcagcagtaggagtgtgtagagtgcgggattggggcccaggccctgcggagggcgggggaagttgtcttcttttttttccggaggggccggtaaacctggtggctgaacggcaagatgaatttcctccgcggggtaatggggggtcagagtgccggaccccagcacacagaagccgagacgagaagaaaattccacaagacagagtgaagatttgggaagccaatttacagaaattttcattaagcagcaggaaaatgtcactcttctgttatctttattggaggagtttgatttccatgtccgctggcctggtgtgaagcttcttacttctcttttaaaacaactagggcctcaggtgcaacaaattattttagtcagtcctatgggtgtttcaagattgatggacttactagcggattccagggaagttatacgtaatgatggcgtcttactactgcaggcactaacaagaagcaatggtgcaatccagaaaattgttgcttttgaaaatgctttcgagagactactggacattatttcagaggaggggaacagtgatggaggtatagtagttgaagattgtttgattttgctccaaaacttattaaaaaacaacaactccaatcaaaatttttttaaagaaggctcatatattcaacgtatgaaaccttggtttgaagttggagatgaaaattctggctggtctgcacagaaagtgaccaatctacatctaatgctacagcttgttcgtgtattggtatctcccaccaaccctcctggtgctaccagtagctgccagaaggctatgttccagtgtgggttattgcagcagctttgtactatcctaatggctactggggttcctgctgatatcctgactgagaccataaatactgtatcagaagttattcgaggctgccaagtaaaccaagactactttgcatctgtaaatgcaccttcaaacccaccaagaccggcaattgtagtacttctcatgtccatggttaatgaaaggcagccatttgttttgcgctgtgctgttctctattgtttccagtgtttcttgtataaaaaccaaaaaggacaaggagaaatcgtgtcaacacttttaccttctaccattgatgcaacaggtaattcagtttcagctggccagttattatgtggaggtttgttttctactgattcactttcaaactggtgtgctgctgtggcccttgcccatgcgttgcaagaaaatgccacccagaaagaacagttgctcagggttcaacttgctacaagtattggcaaccctccagtttctttacttcaacagtgcaccaatattctttcacagggtgataagatcgacagacggggaagcaaaatacaaacaagagttggattattaatgttgctttgtacctggctaagcaattgtcccattgcagtaacgcattttcttcacaattcagccaatgttccatttcttacaggacaaattgcagaaaatcttggagaagaagagcagttggtccaaggcttatgtgcccttttgttgggcatttcgatttatttcaatgataactcacttgagagctacatgaaagagaagctaaaacaactgattgagaagaggattggcaaagagaatttcatagagaaactaggatttattagcaaacatgagttgtattccagagcatctcagaaaccccagccaaactttcccagtccagaatacatgatatttgatcatgagtttacgaagctggtaaaagaacttgaaggtgttataactaaggctatttataagtccagtgaagaagataaaaaagaagaagaggtgaaaaaaacattagaacagcatgacaatattgtgactcactacaaaaatatgattcgagagcaggatctccaacttgaggaattaaggcagcaggtttctacattaaaatgtcaaaatgaacagctccagacggcagtcacacagcaagtatcacagatccagcagcacaaagaccagtataatcttcttaaaatacagctaggaaaagacaatcagcatcaaggttcttacagtgagggggctcagatgaatggcattcagccagaagaaattggtagattgcgagaagagatagaagaattaaaacgtaatcaggaacttttacaaagccagctgactgaaaaggactctatgattgaaaatatgaaatcttcccaaacatctggcacaaatgaacagtcttcagcaatagtttcagctagagattctgaacaagttgcagaattaaaacaggaactggcaactttaaagtctcagttaaactcacaatctgtggagatcaccaaactacagacagaaaagcaggaactgttacagaaaacagaagcgtttgcaaaatcagttgaggtacaaggagagaccgagactataatagccaccaaaactactgatgtagaaggaagactgtcagcattattacaagagaccaaagagttaaagaatgaaattaaagctctgtctgaggaaagaactgccattaaagagcagctggattcatctaatagtaccattgccattttacaaactgagaaagacaaactagagttggaaattacagattctaaaaaagaacaagatgatctcttggtgctcttggccgatcaagatcagaaaatactgtcattgaagaataaactcaaggatcttggtcatccagttgaagaagaggatgaacttgaatctggagaccaagaggatgaggatgatgaaagtgaagatcctggcaaggatctagatcatatctagttttcaaatctctaggaacaatagagattatatcataactctgaagatggactctaaactttggtttacctccatggaaaataaagatttagaaaccaggtggaaaacattcactattaagactattgatatatttttgtaatgttgccacccatgttgaaaaccttaaaactgaatttatgtagaacacacatcttttatttaaatccatctgaactgtcccaaaatgtaatttgcaaagagcttcaaacaccaaaaatataccattttaaggcatgtggtgacaatgctatttgccttagttcattcgttgtttactttgcaaaatttgtgacttttaagtactaacacatttgattgaatgtgtattgaattggaattattatttctaaattcagcatttgagtccttagttgatgattttcttttaaagaaattagtttatttaaaagcaagatagcctgggttgggagttagtgcatatcatcagccctccatctaatgtgattgctaagatgtgcaggataggacagcttagaatgagtgccttgacacctacatatggctgcattccatacctcagtgaagaagccgaaggatgctgacacacagtgatgtggagggcattccggagaaacttttgcaacagtgtattaatgtgattggttttctttttgttttaagctaaacatctaaaacaaatttcaagttaacagttcatacaactcagatttagtagtattgtttatcataaaacatattatgttcctagttttaaaaagacccaaagtatgattaatataatttattggcatttttgctgaataggtttaagtcagataatagattttaaaaaagcaaatgaggcaatgtgtcaaaatttaatgtttcataataaaaatagatacgttgacttaatccttggtcatggttccctttgtttacatcttaaaagtattttattcttaataaaagatgaggcaagtgaaaatg

SEQ ID NO: 1702 - protein, 804 aa, Homosapiens
MGVSRLMDLLADSREVIRNDGVLLLQALTRSNGAIQKIVAFENAFERLLDIISEEGNSDGGIVVEDCLILLQNLLKNNNSNQNFFKEGSYIQRMKPWFEVGDENSGWSAQKVTNLHLMLQLVRVLVSPTNPPGATSSCQKAMFQCGLLQQLCTILMATGVPADILTETINTVSEVIRGCQVNQDYFASVNAPSNPPRPAIVVLLMSMVNERQPFVLRCAVLYCFQCFLYKNQKGQGEIVSTLLPSTIDATGNSVSAGQLLCGGLFSTDSLSNWCAAVALAHALQENATQKEQLLRVQLATSIGNPPVSLLQQCTNILSQGDKIDRRGSKIQTRVGLLMLLCTWLSNCPIAVTHFLHNSANVPFLTGQIAENLGEEEQLVQGLCALLLGISIYFNDNSLESYMKEKLKQLIEKRIGKENFIEKLGFISKHELYSRASQKPQPNFPSPEYMIFDHEFTKLVKELEGVITKAIYKSSEEDKKEEEVKKTLEQHDNIVTHYKNMIREQDLQLEELRQQVSTLKCQNEQLQTAVTQQVSQIQQHKDQYNLLKIQLGKDNQHQGSYSEGAQMNGIQPEEIGRLREEIEELKRNQELLQSQLTEKDSMIENMKSSQTSGTNEQSSAIVSARDSEQVAELKQELATLKSQLNSQSVEITKLQTEKQELLQKTEAFAKSVEVQGETETIIATKTTDVEGRLSALLQETKELKNEIKALSEERTAIKEQLDSSNSTIAILQTEKDKLELEITDSKKEQDDLLVLLADQDQKILSLKNKLKDLGHPVEEEDELESGDQEDEDDESEDPGKDLDHI

SEQ ID NO: 1703 - DNA, 467 bp, Homosapiens
tgtaaactggcagtaataataatacgaatgccacagagctgtggatgaaatgagcccattccggtctggcttctttaaccaggaagatgtgggctgagagctgtggagtagatgtcttcaccagatgagtacacagagaagtagagaatgtgtatctgcagagtaggatgaagcagagacaaggtgggatgggagagagacaggggctgcaggacaaccctaccatcaatacacccaacagtcgccatcctaccccacttatttattcacttagtaacactaattactctctaaaaatacttgactatttatttgtgtatctacacccacaggaatggatgtaagtgctatgagggcaggaagattgtttttcctaccactgaattcccaggacctcaatcaatgcttggtatatagtgggcactccataaacattggccgaataaatgaattctatttacttgttc

SEQ ID NO: 1704 - protein, 58 aa, Homosapiens
MKQRQGGMGERQGLQDNPTINTPNSRHPTPLIYSLSNTNYSLKILDYLFVYLHPQEWM

SEQ ID NO: 1705 - DNA, 468 bp, Homosapiens
ctttgtgacaatgctaatcatgtgggaatggtgctgtttccccaccacaagctggccaattccggtctggcttctttaaccaggaagatgtgggctgagagctgtggagtagatgtcttcaccagatgagtacacagagaagtagagaatgtgtatctgcagagtaggatgaagcagagacaaggtgggatgggagagagacaggggctgcaggacaaccctaccatcaatacacccaacagtcgccatcctaccccacttatttattcacttagtaacactaattactctctaaaaatacttgactatttatttgtgtatctacacccacaggaatggatgtaagtgctatgagggcaggaagattgtttttcctaccactgaattcccaggacctcaatcaatgcttggtatatagtgggcactccataaacattggccgaataaatgaattctatttacttgttc

SEQ ID NO: 1706 - protein, 33 aa, Homosapiens
MVLFPHHKLANSGLASLTRKMWAESCGVDVFTR

SEQ ID NO: 1707 - DNA, 561 bp, Homosapiens
gtttttttttttttattttactttaagttcttggctacatgtgctgaacatgcaggtttgttacacatatgtatacacataggtatacatgtgccatggtggttcgctgcacctatcaacctgtcatctaggtttttgtttttttttttttttgagatggaatctcgctctgtcacccaggctggagtgcagtggcgcgatctcaagctccgcctcccgggttcacgccattctcctgcctcagcaacaagagagaaactccatctcaaaaaaacgtataaaatgaaaacaatgagagagttacattgtcagtggttcttaactgaagtggactttagaatttgaaaacactatacctaagttctactttgtgaagattgtgaggtggggttggggcactcatatacttaaaacacatacatacacaacaccccaacccacccctccacactgaaatacacaggtgattctgatgcatatggataggtaaattttcagcataaagtttcacatggagaataagggagatagtctagtgagaagctgagcattgcctatgag

SEQ ID NO: 1708 - protein, 65 aa, Homosapiens
MCHGGSLHLSTCHLGFCFFFFLRWNLALSPRLECSGAISSSASRVHAILLPQQQERNSISKKRIK

SEQ ID NO: 1709 - DNA, 353 bp, Homosapiens
gtgagacagggtctcgctgtgtcacccaggctgtagtacagtggcaggatgacagatcactgcagcctcgacctgctagtcttaagagatcctcccacttcagctacctcacacctggtactacaggcgcatgagccaccgcacccagcctattttatactttttatttattgtctttaacaatgtctattggtaaaggaaagttatttttaaaaattgtattgtaattccatgacccaagcatatggattttcttcattatttactttttcttacttgttactgtagtgtttatataattttatgttctacttttaaaaaaataaattaatatctaattgtaaaccctttcc

SEQ ID NO: 1710 - protein, 43 aa, Homosapiens
MTDHCSLDLLVLRDPPTSATSHLVLQAHEPPHPAYFILFIYCL

SEQ ID NO: 1711 - DNA, 517 bp, Homosapiens
aaaaccactccaagaagtacatattatcagcaccattacacgtatgaggacactgcccacagaggttagcaacttgcctgaggtcatagaacgactaagttgggactcaagccaaggtctgtcttacctcaaggcccattttctttcttcaacaccatggtgcttaccctacttaaaaagtatttattcaataactgcttataaaatatgtaacgtatgtgcaaccttgggctaggtacttcttttaacagtgttactgcaatataatttacataccatgcaattcatccatttaaagtgtataattcagccagcctattttatactttttatttattgtctttaacaatgtctattggtaaaggaaagttatttttaaaaattgtattgtaattccatgacccaagcatatggattttcttcattatttactttttcttacttgttactgtagtgtttatataattttatgttctacttttaaaaaaataaattaatatctaattgtaaacccttt

SEQ ID NO: 1712 - protein, 63 aa, Homosapiens
MRTLPTEVSNLPEVIERLSWDSSQGLSYLKAHFLSSTPWCLPYLKSIYSITAYKICNVCATLG

SEQ ID NO: 1713 - DNA, 3629 bp, Homosapiens
ggagataccccgactatgcagtcgcccccttcaaatcttccttgggggcctgatctgactgacgtcagggggtgcctactccttcgaggcaagaagcctgaactttccttcctgtcactgtgaatacttggccagggctgtgaatgtcaccattgcttttcaggaagaagacatggcagactagggctgcaccttctttatgggctctgtaggtctgaaagaaatcagatcagcctgggatccctcagccaactctgaagacaggatggggatcacgcctgcatgttaaagagatttctgccttgttgtgtctcatggtaaataaaaaacccagcaaagaagcaaacagctcactgtcctctggatctgctgcgtcctgcaggagcattgcgcttaaactatgggaagcggcacctccacccaacatcattttgctttccagaatgcagagagagccttcaaggcagcagccctgatccagagatggtaccggcgctacgtggcccgcctggagatgaggcggcgttgcacctggagcatcttccagtctatagaatatgctgggcagcaagaccaagtcaagctccatgacttcttcagctatctcatggatcacttcatccccagcagccacaacgacagggacttcctgacccgcatattcactgaggacagattcgcccaggactccgagatgaagaaatgcagtgactatgaatccatagaggtacccgacagttacacggggccacgcctctccttcccactcctgcctgaccatgcaactgccctggtagaagcattcagactgaaacaacagctccatgctcgctacgtcttgaaccttttgtatgaaaccaagaaacatctggtacagctgccaaacatcaaccgggtctcaacctgttacagtgaggagatcacagtgtgtggagacttacatggccaattggatgacttaatctttatattttataagaatggcctcccgtcgccagaacggtcatatgtgttcaacggtgactttgtggatcgaggcaaggattcagtagagatcctgatgattctttttgccttcatgctggtttaccccaaagagttccatcttaacagaggaaaccatgaggaccatatggtgaacttacgatatggcttcaccaaggaagtgatgaataaatacaaggtacacgggaaggaaatactaagaaccctgcaagatgttttctgttggcttccactggccactctgatagatgagaaagttctaattcttcatggtggggtgtcagacataactgatctggagcttttggacaaaatagagaggagcaagatagtttccaccatgaggtgcaaaacgagacagaagagtgagaagcagatggaggagaagagaagagccaaccagaagagctctgcacagggacccatcccatggtttctccccgaaagccgctctcttccctcttcgccccttcggcttggctcctacaaggcccagaaaaccagcaggtcctccagcatcccctgcagcggttccctggacgggcgggagctctcccggcaggtgcggagctccgtggaactggagctagagcggtgccggcagcaagcaggcctcctggtgaccggagagaaagaggagccctcccgctcagcctcagaagcagactctgaagccggagagctgcggaagcccactcaggaggagtggaggcaggttgtagatatcctgtggagtgatcccatggctcaagagggctgcaaggccaacactattcgaggaggaggctgttattttgggcctgatgtgacacaacagttgctacaaaaatacaacatgcaattcctgatccgttcacatgaatgcaaacctgaaggctatgaattctgtcacaaccgcaaggtattaacaatcttttctgcctccaactactatgaagttggcagcaacagaggggcctatgtcaaactggggccagccctgaccccacatattgtgcagtatcaagctaacaaggtgacccacacactcaccatgaggcaaaggattagcagagtggaggagtcggctctgagagctctgagggagaagctgtttgctcattcttcagatcttctcagtgaatttaagaagcatgatgcagataaagtcgcctagcttccagccaactctgctactatcaacaaaaatagtgacagtgcccattatttctattacctgcagatagtaagaaggatgtcaggataaaaatatacacaccattgggcaggaaactagacttctaggtgacaaggcaacaggttagctctcacctgtaggtttaatcaccttgagtgactgggcagcagcggtggagtctgtgttgcacctaggactgccatggcggatgctgaggccacagctggtgaacagctcagcagacaacatgctggagtacaagtcttggctgaagaacttggccaaggaacaactgagtcgcgagaacatacaatcaagtttgctggaaacattgtatcgaaaccgatccaacctagagaccatttttaggatcatagacagtgatcattcagggttcatctcactggacgagttcaggcagacctggaagctgttcagctctcacatgaatatcgacattacagatgactgcatctgtgaccttgctcggagcattgatttcaacaaagatggccacattgatatcaatgagttcctggaggccttccgccttgtggagaaatcctgcccagagggcgatgcctcagaatgcccacaagctacaaatgctaaagacagtggctgcagcagtccaggtgcacactaagaacagcctggtcttcatcacccaaagtgcctcataggcaatgctcagcttctcactagactatctcccttattctccatgtgaaactttatgctgaaaatttacctatccatatgcatcagaatcacctgtgtatttcagtgtggaggggtgggttggggtgttgtgtatgtatgtgttttaagtatatgagtgccccaaccccacctcacaatcttcacaaagtagaacttaggtatagtgttttcaaattctaaagtccacttcagttaagaaccactgacaatgtaactctctcattgttttcattttatacgtttttttgagatggagtttctctcttgttgcccaggctggagtgcattggcgcgatctcggctcaccgcaaagtccgcctcccaggcgattctcctgcctcagcctcctgagtagctgggattacaggcatgcaccaccacaccaggctaattttgtatttttagtagacacagggtttctccatgttggtcaggctggtcttgaactcccaacctcaggtgatccaccctcctcagcctcccaaagtgctgggattacaggcatgagccaccgcacccagcctattttatactttttatttattgtctttaacaatgtctattggtaaaggaaagttatttttaaaaattgtattgtaattccatgacccaagcatatggattttcttcattatttactttttcttacttgttactgtagtgtttatataattttatgttctacttttaaaaaaataaattaatatctaattgtaaacccttt

SEQ ID NO: 1714 - protein, 586 aa, Homosapiens
MGSGTSTQHHFAFQNAERAFKAAALIQRWYRRYVARLEMRRRCTWSIFQSIEYAGQQDQVKLHDFFSYLMDHFIPSSHNDRDFLTRIFTEDRFAQDSEMKKCSDYESIEVPDSYTGPRLSFPLLPDHATALVEAFRLKQQLHARYVLNLLYETKKHLVQLPNINRVSTCYSEEITVCGDLHGQLDDLIFIFYKNGLPSPERSYVFNGDFVDRGKDSVEILMILFAFMLVYPKEFHLNRGNHEDHMVNLRYGFTKEVMNKYKVHGKEILRTLQDVFCWLPLATLIDEKVLILHGGVSDITDLELLDKIERSKIVSTMRCKTRQKSEKQMEEKRRANQKSSAQGPIPWFLPESRSLPSSPLRLGSYKAQKTSRSSSIPCSGSLDGRELSRQVRSSVELELERCRQQAGLLVTGEKEEPSRSASEADSEAGELRKPTQEEWRQVVDILWSDPMAQEGCKANTIRGGGCYFGPDVTQQLLQKYNMQFLIRSHECKPEGYEFCHNRKVLTIFSASNYYEVGSNRGAYVKLGPALTPHIVQYQANKVTHTLTMRQRISRVEESALRALREKLFAHSSDLLSEFKKHDADKVA

SEQ ID NO: 1715 - DNA, 4284 bp, Homosapiens
ggagataccccgactatgcagtcgcccccttcaaatcttccttgggggcctgatctgactgacgtcagggggtgcctactccttcgaggcaagaagcctgaactttccttcctgtcactgtgaatacttggccagggctgtgaatgtcaccattgcttttcaggaagaagacatggcagactagggctgcaccttctttatgggctctgtaggtctgaaagaaatcagatcagcctgggatccctcagccaactctgaagacaggatggggatcacgcctgcatgttaaagagatttctgccttgttgtgtctcatggtaaataaaaaacccagcaaagaagcaaacagctcactgtcctctggatctgctgcgtcctgcaggagcattgcgcttaaactatgggaagcggcacctccacccaacatcattttgctttccagaatgcagagagagccttcaaggcagcagccctgatccagagatggtaccggcgctacgtggcccgcctggagatgaggcggcgttgcacctggagcatcttccagtctatagaatatgctgggcagcaagaccaagtcaagctccatgacttcttcagctatctcatggatcacttcatccccagcagccacaacgacagggacttcctgacccgcatattcactgaggacagattcgcccaggactccgagatgaagaaatgcagtgactatgaatccatagaggtacccgacagttacacggggccacgcctctccttcccactcctgcctgaccatgcaactgccctggtagaagcattcagactgaaacaacagctccatgctcgctacgtcttgaaccttttgtatgaaaccaagaaacatctggtacagctgccaaacatcaaccgggtctcaacctgttacagtgaggagatcacagtgtgtggagacttacatggccaattggatgacttaatctttatattttataagaatggcctcccgtcgccagaacggtcatatgtgttcaacggtgactttgtggatcgaggcaaggattcagtagagatcctgatgattctttttgccttcatgctggtttaccccaaagagttccatcttaacagaggaaaccatgaggaccatatggtgaacttacgatatggcttcaccaaggaagtgatgaataaatacaaggtacacgggaaggaaatactaagaaccctgcaagatgttttctgttggcttccactggccactctgatagatgagaaagttctaattcttcatggtggggtgtcagacataactgatctggagcttttggacaaaatagagaggagcaaggaaatgctgctacaacatccatgacaacattttcctgggaagttccaaagacagggaacaatcagtctacttcagctttgggcaattctaatggatatggatatgaaagtctatgtatatgagacatacatgaaatgaaagaatacggctttagagtgagacagacctgggtttgaaccctggaataggcaattgttggctgaaatggcagtttggttctatgaagttgtccagagacccaggtttcttgttactctgccacccctaatgtgtggtttctagacttagctaccatttagcaagtaaggatatgactccttgtggtttggtaactagaaattgctgtgtccctgtacacccaaactcagtgttttcacttacacatctgttatatctttttttgtttgtttgtttttgagacaaggtctcactctgtcatccagactggagtgtggtaccacgatcacggctcactgcagccttgacctcctgggctgaggcaatcctccagcctcagcctcccgagtagctgggactacagtcacacacaatcatgcttggctaatttttaaaaaattatttgtagagggccgggtgtgatggctcacacctgtaatcccagcactctgagagtcggaggccagcggatcatgagatagtttccaccatgaggtgcaaaacgagacagaagagtgagaagcagatggaggagaagagaagagccaaccagaagagctctgcacagggacccatcccatggtttctccccgaaagccgctctcttccctcttcgccccttcggcttggctcctacaaggcccagaaaaccagcaggtcctccagcatcccctgcagcggttccctggacgggcgggagctctcccggcaggtgcggagctccgtggaactggagctagagcggtgccggcagcaagcaggcctcctggtgaccggagagaaagaggagccctcccgctcagcctcagaagcagactctgaagccggagagctgcggaagcccactcaggaggagtggaggcaggttgtagatatcctgtggagtgatcccatggctcaagagggctgcaaggccaacactattcgaggaggaggctgttattttgggcctgatgtgacacaacagttgctacaaaaatacaacatgcaattcctgatccgttcacatgaatgcaaacctgaaggctatgaattctgtcacaaccgcaaggtattaacaatcttttctgcctccaactactatgaagttggcagcaacagaggggcctatgtcaaactggggccagccctgaccccacatattgtgcagtatcaagctaacaaggtgacccacacactcaccatgaggcaaaggattagcagagtggaggagtcggctctgagagctctgagggagaagctgtttgctcattcttcagatcttctcagtgaatttaagaagcatgatgcagataaagtcgcctagcttccagccaactctgctactatcaacaaaaatagtgacagtgcccattatttctattacctgcagatagtaagaaggatgtcaggataaaaatatacacaccattgggcaggaaactagacttctaggtgacaaggcaacaggttagctctcacctgtaggtttaatcaccttgagtgactgggcagcagcggtggagtctgtgttgcacctaggactgccatggcggatgctgaggccacagctggtgaacagctcagcagacaacatgctggagtacaagtcttggctgaagaacttggccaaggaacaactgagtcgcgagaacatacaatcaagtttgctggaaacattgtatcgaaaccgatccaacctagagaccatttttaggatcatagacagtgatcattcagggttcatctcactggacgagttcaggcagacctggaagctgttcagctctcacatgaatatcgacattacagatgactgcatctgtgaccttgctcggagcattgatttcaacaaagatggccacattgatatcaatgagttcctggaggccttccgccttgtggagaaatcctgcccagagggcgatgcctcagaatgcccacaagctacaaatgctaaagacagtggctgcagcagtccaggtgcacactaagaacagcctggtcttcatcacccaaagtgcctcataggcaatgctcagcttctcactagactatctcccttattctccatgtgaaactttatgctgaaaatttacctatccatatgcatcagaatcacctgtgtatttcagtgtggaggggtgggttggggtgttgtgtatgtatgtgttttaagtatatgagtgccccaaccccacctcacaatcttcacaaagtagaacttaggtatagtgttttcaaattctaaagtccacttcagttaagaaccactgacaatgtaactctctcattgttttcattttatacgtttttttgagatggagtttctctcttgttgcccaggctggagtgcattggcgcgatctcggctcaccgcaaagtccgcctcccaggcgattctcctgcctcagcctcctgagtagctgggattacaggcatgcaccaccacaccaggctaattttgtatttttagtagacacagggtttctccatgttggtcaggctggtcttgaactcccaacctcaggtgatccaccctcctcagcctcccaaagtgctgggattacaggcatgagccaccgcacccagcctattttatactttttatttattgtctttaacaatgtctattggtaaaggaaagttatttttaaaaattgtattgtaattccatgacccaagcatatggattttcttcattatttactttttcttacttgttactgtagtgtttatataattttatgttctacttttaaaaaaataaattaatatctaattgtaaacccttt

SEQ ID NO: 1716 - protein, 318 aa, Homosapiens
MGSGTSTQHHFAFQNAERAFKAAALIQRWYRRYVARLEMRRRCTWSIFQSIEYAGQQDQVKLHDFFSYLMDHFIPSSHNDRDFLTRIFTEDRFAQDSEMKKCSDYESIEVPDSYTGPRLSFPLLPDHATALVEAFRLKQQLHARYVLNLLYETKKHLVQLPNINRVSTCYSEEITVCGDLHGQLDDLIFIFYKNGLPSPERSYVFNGDFVDRGKDSVEILMILFAFMLVYPKEFHLNRGNHEDHMVNLRYGFTKEVMNKYKVHGKEILRTLQDVFCWLPLATLIDEKVLILHGGVSDITDLELLDKIERSKEMLLQHP

SEQ ID NO: 1717 - DNA, 3463 bp, Homosapiens
ggagataccccgactatgcagtcgcccccttcaaatcttccttgggggcctgatctgactgacgtcagggggtgcctactccttcgaggcaagaagcctgaactttccttcctgtcactgtgaatacttggccagggctgtgaatgtcaccattgcttttcaggaagaagacatggcagactagggctgcaccttctttatgggctctgtaggtctgaaagaaatcagatcagcctgggatccctcagccaactctgaagacaggatggggatcacgcctgcatgttaaagagatttctgccttgttgtgtctcatggtaaataaaaaacccagcaaagaagcaaacagctcactgtcctctggatctgctgcgtcctgcaggagcattgcgcttaaactatgggaagcggcacctccacccaacatcattttgctttccagaatgcagagagagccttcaaggcagcagccctgatccagagatggtaccggcgctacgtggcccgcctggagatgaggcggcgttgcacctggagcatcttccagtctatagaatatgctgggcagcaagaccaagtcaagctccatgacttcttcagctatctcatggatcacttcatccccagcagccacaacgacagggacttcctgacccgcatattcactgaggacagattcgcccaggactccgagatgaagaaatgcagtgactatgaatccatagaggtacccgacagttacacggggccacgcctctccttcccactcctgcctgaccatgcaactgccctggtagaagcattcagactgaaacaacagctccatgctcgctacgtcttgaaccttttgtatgaaaccaagaaacatctggtacagctgccaaacatcaaccgggtctcaacctgttacagtgaggagatcacagtgtgtggagacttacatggccaattggatgacttaatctttatattttataagaatggcctcccgtcgccagaacggtcatatgtgttcaacggtgactttgtggatcgaggcaaggattcagtagagatcctgatgattctttttgccttcatgctggtttaccccaaagagttccatcttaacagaggaaaccatgaggaccatatggtgaacttacgatatggcttcaccaaggaagtgatgaataaatacaaggtacacgggaaggaaatactaagaaccctgcaagatgttttctgttggcttccactggccactctgatagatgagaaagttctaattcttcatggtggggtgtcagacataactgatctggagcttttggacaaaatagagaggagcaagatagtttccaccatgaggtgcaaaacgagacagaagagtgagaagcagatggaggagaagagaagagccaaccagaagagctctgcacagggacccatcccatggtttctccccgaaagccgctctcttccctcttcgccccttcggcttggctcctacaaggcccagaaaaccagcaggtcctccagcatcccctgcagcggttccctggacgggcgggagctctcccggcaggtgcggagctccgtggaactggagctagagcggtgccggcagcaagcaggcctcctggtgaccggagagaaagaggagccctcccgctcagcctcagaagcagactctgaagccggagagctgcggaagcccactcaggaggagtggaggcaggttgtagatatcctgtggagtgatcccatggctcaagagggctgcaaggccaacactattcgaggaggaggctgttattttgggcctgatgtgacacaacagttgctacaaaaatacaacatgcaattcctgatccgttcacatgaatgcaaacctgaaggctatgaattctgtcacaaccgcaaggtattaacaatcttttctgcctccaactactatgaagttggcagcaacagaggggcctatgtcaaactggggccagccctgaccccacatattgtgcagtatcaagctaacaaggtgacccacacactcaccatgaggcaaaggattagcagagtggaggagtcggctctgagagctctgagggagaagctgtttgctcattcttcagatcttctcagtgaatttaagaagcatgatgcagataaagtcggtttaatcaccttgagtgactgggcagcagcggtggagtctgtgttgcacctaggactgccatggcggatgctgaggccacagctggtgaacagctcagcagacaacatgctggagtacaagtcttggctgaagaacttggccaaggaacaactgagtcgcgagaacatacaatcaagtttgctggaaacattgtatcgaaaccgatccaacctagagaccatttttaggatcatagacagtgatcattcagggttcatctcactggacgagttcaggcagacctggaagctgttcagctctcacatgaatatcgacattacagatgactgcatctgtgaccttgctcggagcattgatttcaacaaagatggccacattgatatcaatgagttcctggaggccttccgccttgtggagaaatcctgcccagagggcgatgcctcagaatgcccacaagctacaaatgctaaagacagtggctgcagcagtccaggtgcacactaagaacagcctggtcttcatcacccaaagtgcctcataggcaatgctcagcttctcactagactatctcccttattctccatgtgaaactttatgctgaaaatttacctatccatatgcatcagaatcacctgtgtatttcagtgtggaggggtgggttggggtgttgtgtatgtatgtgttttaagtatatgagtgccccaaccccacctcacaatcttcacaaagtagaacttaggtatagtgttttcaaattctaaagtccacttcagttaagaaccactgacaatgtaactctctcattgttttcattttatacgtttttttgagatggagtttctctcttgttgcccaggctggagtgcattggcgcgatctcggctcaccgcaaagtccgcctcccaggcgattctcctgcctcagcctcctgagtagctgggattacaggcatgcaccaccacaccaggctaattttgtatttttagtagacacagggtttctccatgttggtcaggctggtcttgaactcccaacctcaggtgatccaccctcctcagcctcccaaagtgctgggattacaggcatgagccaccgcacccagcctattttatactttttatttattgtctttaacaatgtctattggtaaaggaaagttatttttaaaaattgtattgtaattccatgacccaagcatatggattttcttcattatttactttttcttacttgttactgtagtgtttatataattttatgttctacttttaaaaaaataaattaatatctaattgtaaacccttt

SEQ ID NO: 1718 - protein, 753 aa, Homosapiens; identical to SEQ ID NO: 145

SEQ ID NO: 1719 - DNA, 479 bp, Homosapiens
acacattattttactattccaatgaaaccattgaatttgtttttgcatacacatactctatcatataaataatagagattcatgatagtaaagcaggaaatacagataagtaaaaggaagaaaattaaaatatcccataatttctctacccagggataatgacatagttttaaacattttggtgattattcctcagtctcttttctatgtatttaagtacatatacccagaatatgcattcttctaaaaatgtgattatgccctgattattgtcacccagtttactctaatatctatttgtgcttctaaatctagatatggcttcaccaaggaagtgatgaataaatacaaggtacacgggaaggaaatactaagaaccctgcaagatgttttctgttggcttccactggccactctgatagatgagaaagttctaattcttcatggtggggtgtcagacataactgatctggagcttt

SEQ ID NO: 1720 - protein, 46 aa, Homosapiens
MNKYKVHGKEILRTLQDVFCWLPLATLIDEKVLILHGGVSDITDLE

SEQ ID NO: 1721 - DNA, 219 bp, Homosapiens
ccgacagttacacggggccacgcctctccttcccactcctgcctgaccatgcaactgccctggtagaagcattcagactgaaacaaagtctcgctctgtcatccaggctggagtacagtggcgcgatctcggctcactgcaacatccgcttcctgggttcaagcgactctcctgcctcaccctcctgatagcagctccatgctcgctacgtcttgaacc

SEQ ID NO: 1722 - protein, 61 aa, Homosapiens
DSYTGPRLSFPLLPDHATALVEAFRLKQSLALSSRLEYSGAISAHCNIRFLGSSDSPASPS

SEQ ID NO: 1723 - DNA, 881 bp, Homosapiens
atctggatgtatacgtgcaggtcacagggcatatgatggcttagcttgggctcagaggcctgacaatcacctgatgggttcttcttgctcactgcacagacaaaaccaattcactgagatcatactattgcagtagagaaagagttcaattaacagtcctagcaggagcatggatgttattactcaaatcagtctctccaagaactcagaggctagggttttaatggataatttgattctggccccaagcctgtttcctgctgaggcccagcccaccacagtggaattcatccagcagctgggacggttggcaccatctgctccagaaagctgggatgatgaaaatgtgtggctgcagaactgaacagtggccaaacttgtggggtagtaaagccaaggcaacgtatatagctacctgcactttggaactgtgctgacttataattatagaatgtttacaacttgaagggacaataaaaacccttgactggtttatttattgtttaaataagggaaataatttccttctaaaaatatcttgcctagaagaccatgaacctggccctttgctttcattttacagactggtaaacagaggcccgagagccacccagtgagtcactagcagagctggtggtgggctctagggctcctgaccctgacagcctcccaacacccgcccagctgctgagaggctctgcccactgctctcctccacacaacactcccttcccagccaaggcactggcgaaggggctcaggtacattttctgggagaggatagcacccataggtcttgccagttcctgtgacagaatgggcatattctcctgaccataagaaaacactgcaaaccagaaagcacgtagcagcctacctcc

SEQ ID NO: 1724 - protein, 64 aa, Homosapiens
MDVITQISLSKNSEARVLMDNLILAPSLFPAEAQPTTVEFIQQLGRLAPSAPESWDDENVWLQN

SEQ ID NO: 1725 - DNA, 1247 bp, Homosapiens
acggcttacccgggctccgacagcggctgcaggtctccaagttgcggccgctggagcccgagccatgcggaccgcggaccgggaggcgcgcccggggcttccgtccctgctgctgctgctgctggccggggccgggctgtcagccgcctcgcccccagcagcgccgcgcttcaacgtgagcctggactcggtccccgagctgcgctggctgcccgtgctgcggcactacgacttggacttggtgcgcgccgcgatggcgcaagtcatcggggacagagtccccaagtgggtgcacgtgttaatcggaaaagtggtcctggagctggagcgcttcctgccccagcccttcaccggcgagatccgcggcatgtgtgacttcatgaacctcagcctggcggactgccttctggtcaacctggcctacgagtcctccgtgttctgcaccagtattgtggctcaagactccagaggccacatttaccatggtcggaatttggattatccttttgggaatgtcttacgcaagctgacagtggatgtgcaattcttaaagaatgggcagattgcattcacaggaactacttttattggctatgtaggattatggactggccagagcccacacaagtttacagtttctggtgatgaacgagaccctgagtgagtcggaaaacttcgaagcagctgttggcaagttggccaagactccccttattgctgatgtttattacattgttggtggcacgtccccccgggagggggtggtcatcacgaggaacagagatggcccagcagacatttggcctctagatcctttgaatggagcgtggttccgagttgagacaaattacgaccactggaagccagcacccaaggaagatgaccggagaacatctgccatcaaggcccttaatgctacaggacaagcaaacctcagcctggaggcacttttccagtgaaagcaggccaggtgcggtggctcacgcctgtaatcccagccctttgggaggccaaggcgggtggatcacttgaggtcaggagttcaagaccagcctggccaacatggtgaaacctcgtctctactaaaaatacaaaaatcaaccaggcatgacggtgcacgcctgttatcacagctacttgggaagcagcggctggagaattgcttgaacctgggaagtcgaggctgcaagtgagctgagatcatgccatggcagtctagcctgggcaacagagcgagactctgtttc

SEQ ID NO: 1726 - protein, 199 aa, Homosapiens; identical to SEQ ID NO: 151

SEQ ID NO: 1727 - DNA, 3021 bp, Homosapiens
gcgctatttccggtcatacccggaaacacgagtccaagctgcagctggcagggattgcggggtgccggccgtctgagtttttttaaaactgctcgccgcgaagtctgtctgcagccaaaatgtccaacagaaacaacaacaagcttcccagcaacctgccgcagttacagaatctaatcaagcgagacccgccggcctacatcgaggagtttctacagcagtataatcactacaaatccaatgtggagattttcaaattgcaaccaaataaacccagcaaagaactagcagagctggtgatgtttatggcacagattagtcactgctacccagagtacctaagtaattttcctcaagaggtgaaagatcttctctcctgcaatcataccgtattggatccagatctgcgaatgacattttgcaaagctttgatcttgctgagaaataagaatctcatcaatccatcaagcctgctagaactcttctttgaactttttcgttgccatgataaacttctgcgaaagactttatacacacatattgtgactgatatcaagaatataaatgcaaaacacaagaacaataaagtgaatgtagtattgcaaaatttcatgtacaccatgttaagagatagcaatgcaaccgcagccaagatgtctttagatgtaatgattgaactctacagaaggaacatctggaatgatgcaaaaactgtcaatgttatcacaactgcatgtttctctaaggtcaccaagatattagttgccgctttgacattctttcttgggaaagatgaagatgaaaaacaggacagtgactccgaatctgaggatgatggaccaacagcaagagacctgctagtacaatatgctacagggaagaaaagttccaaaaacaagaaaaagttggaaaaggcaatgaaagtgctcaagaaacaaaaaaagaagaaaaaaccagaggtgtttaacttttcagccattcacttgattcatgatccccaagattttgcggaaaaactactaaagcagcttgagtgctgtaaggagaggtttgaagtgaagatgatgctcatgaaccttatctccagattggtgggaattcatgagcttttcctcttcaatttctatccctttttgcaaaggtttctgcagccccaccaaagagaagtaaccaagatccttctgtttgctgcacaagcatctcatcacctagtacccccagagattattcaatcattgcttatgactgtggcaaacaattttgttaccgacaagaactctggagaagtcatgacagtaggaatcaatgctataaaggagataacagctcgatgtcctctggccatgactgaagaacttctccaagacctggctcagtataaaacacacaaggataagaatgtaatgatgtctgctagaactttgattcacctcttccgaacactgaatcctcagatgctgcagaagaaattccggggtaagcctacagaggcctccatagaagcaagagtacaagaatatggagaattagatgctaaagattacattccaggagcagaagttctggaagttgagaaagaagagaatgctgaaaatgatgaagatggatgggaaagtaccagtctcagtgaggaggaggatgctgatggtgaatggattgatgtgcaacactcttccgatgaagaacagcaagaaatctccaagaagctgaacagcatgcccatggaggagcggaaggccaaagctgcagccatcagcactagccgagttttaactcaggaagacttccagaaaatccgcatggcccaaatgagaaaagaacttgatgctgcccccgggaaatcccagaagaggaaatacattgaaatagacagtgatgaagagcccaggggtgaattactttctcttcgggacattgaacgccttcataaaaagccaaagtctgacaaagagacaagactagcaactgcaatggctggaaagacagaccgaaaagaatttgtgaggaagaaaaccaaaacaaatccattttccagttcgacaaataaagagaagaaaaaacagaagaactttatgatgatgcggtatagccagaatgtccggtcaaaaaataagcgttccttccgagaaaaacagttggcactacgagatgcacttttgaaaaagagaaaaagaatgaagtaacttcctggcaagttttccattcctagaagaatgctaagtttgtgtccttgctctgaaaattggtaaatcaagcatgtttgtttacattaaaaagtccagacacactgtattgtgaaaactgctgaacatgtggcagcaattttgtgtttttattttggagacggctaatggtaggaatgttaatgtaaatagtggtggtaatgtaaaatcatttcatttatcattcatgcaaaaaaaagtatgtattgagtgcctattcattgtcactgtagatgcaaaacgaatgagctgtaaccccttcactcaaggcattgacagcttagctgtgagggtggacacacatatgtgtatttacagtgcagtgtaaatagttctgtagtagaggttaactccatatttctgtgaggtcactgaggccttatggactaactctgtgaggataggagttatatattcttataagacaaaacaaaacaggacaatgttacaagagtaagaggttcttacttgtacataggctttcctgctgaaaacaggcccctgctgtacagattttgggtacataatttagctcttttagtcaatccaagagatttaagtgacccccccccccccgtgttttttttgtttttgtttttgttttgaatgccatgtaaaggctttttggttaagacctcacttttaaaactgccttaagtataaatagtacctttggaatatatttagttcatcatttgagctgccttcatactggtttcctcagccttccttcagcctgtaatattttcagcccactgtttaccttgtctcaataaaaggtttctaatgccaaatacgt

SEQ ID NO: 1728 - protein, 687 aa, Homosapiens
MSNRNNNKLPSNLPQLQNLIKRDPPAYIEEFLQQYNHYKSNVEIFKLQPNKPSKELAELVMFMAQISHCYPEYLSNFPQEVKDLLSCNHTVLDPDLRMTFCKALILLRNKNLINPSSLLELFFELFRCHDKLLRKTLYTHIVTDIKNINAKHKNNKVNVVLQNFMYTMLRDSNATAAKMSLDVMIELYRRNIWNDAKTVNVITTACFSKVTKILVAALTFFLGKDEDEKQDSDSESEDDGPTARDLLVQYATGKKSSKNKKKLEKAMKVLKKQKKKKKPEVFNFSAIHLIHDPQDFAEKLLKQLECCKERFEVKMMLMNLISRLVGIHELFLFNFYPFLQRFLQPHQREVTKILLFAAQASHHLVPPEIIQSLLMTVANNFVTDKNSGEVMTVGINAIKEITARCPLAMTEELLQDLAQYKTHKDKNVMMSARTLIHLFRTLNPQMLQKKFRGKPTEASIEARVQEYGELDAKDYIPGAEVLEVEKEENAENDEDGWESTSLSEEEDADGEWIDVQHSSDEEQQEISKKLNSMPMEERKAKAAAISTSRVLTQEDFQKIRMAQMRKELDAAPGKSQKRKYIEIDSDEEPRGELLSLRDIERLHKKPKSDKETRLATAMAGKTDRKEFVRKKTKTNPFSSSTNKEKKKQKNFMMMRYSQNVRSKNKRSFREKQLALRDALLKKRKRMK

SEQ ID NO: 1729 - DNA, 730 bp, Homosapiens
ttgactagcttcctacgtcattaaaaattctttaaatagtctgtcttaatggctgcaaattttgtcgtaagtctgggctaaaatctgatgaaatgttttacctgtggttaagtaatttagcaactcgtatctttttaaaatattacaactgggaattctagtacgtcacaaacatttgttatatcatttattttgtgccattgtctgtgctatgaaatacagtagaatgaaaatttacttcaaagcattcattgtcttcccccaggaatgatgcagtttatgttaagtgatgctttctttgttcctatactgctttcctgggtcatctgaactttaaaagagtcaatagaattatgagtttttaaattgctatgtaataaatgatagcctcagtggttttttactgttttctcctgtgattcttgacttccgttgggcttcggcactgctaaaagaaatttaaggtcaatgtttgacttttgtctgttagaagaactgcaatgtcacttttcttataggggatgtagaaattctcgacagtcttgaaggataactatatagagcctagcagtttttatctagtttttaaaattatttattagagaaataacataaaacaacttttaattaagaaaaaatgaacaaaaatcccaccactctttgaatttgttcttcagatcttagttcatgcacatgtataaagcatactcaaaaggatttattctttatt

SEQ ID NO: 1730 - protein, 37 aa, Homosapiens
NYEFLNCYVINDSLSGFLLFSPVILDFRWASALLKEI

SEQ ID NO: 1731 - DNA, 1682 bp, Homosapiens
ccgatttagctgaggacaatgttgcagagaaagggcagctgagggccaccagcagctgacattcacaacaagtggggcaaacaggtacaccggcctcgtgaagggaatgtcagccaggactcaaccccaaccactaaaaggacaatgatgaaatgctcaaactgactgtctaatggacggagtctcactctgttgccacgctggaatgcagtggcacgatctcggctcactgcaacctccgactctctggttcaagcgattctcctgcctcagcctcctgaatagctaggattacaggcatgcgccaccacgcccagctaatttttctagttttagtagagacggggtttcaccatgttggccaggatggtctcgatctcctgacctcgtgatccgtccgccttggcctccccaagtgctgagattacaggcgtgagccaccgcacccggccttttattgtactttcttcctcctctctctcttttacagctttgttatgagttttccccacaagcccatgtatttctttgctcctgtgggcagcgaaaacttttggccttgcctctggacaaatctatcagggctgatagattttgtcattggtacaggccctcgcttctcatccacctccactgcctctctttttgctgatccaaggtccccaacattctccctagctggcagagatcatccctgtttccccattattcagagaaatttagcttagttttgctttaacttccataccatcaaaagtcctaggcccatctctccctaatcaaaggctccatacaaaagagacatctgccctgagaatttcgctctgttgccaggctggagtacagtggtgcgatctcagcttgctgcaacttccaactcctggattcaagcgattctcctgcctcagcctcccgaatagctgggactacaggcatgcgccaccacgcccagctaatttttgtatttttagtagagacagggttttaccacattggccaggatggtctcaatctcttgacctcatgatctgcccacctcagcctcccaaagtgctgggattacaggtgtgagccactgcacccggccctggttaaattttaaaaattacttacagtagactgtctggaaataatttaaatgttcctttaatttttctgtatagtctgagaataagagtagtcaaggatgacttataaagacaaaatatgcacacatccttcaacctagcaatcctaatctctagaaaggaaagaattacagacacaatactgccacagtaagttttatttcagcagtaaaaatttggaaataatctatatttccaacaataatcctggtcatataaattatggtttatccatatgatgaaatacagtttggccattaaaaatgacattaagtaaaaatgacattattagagatttactgacacgagaaaatgttcatgatatagtgttaatgaaaaagcagattacaaaacagtgtatagtatatgatttaatttttgtgcttatatacgtgtatgtaaaaacatatctatgttatgtgcacacgaagcaagtaaggaagatttagaaaactgtatactaaggggttaacagtatttgtcactcaagggtagaattatgcgtgatttttattttcttctattgtgttacctgcattaaacattttgtacaat

SEQ ID NO: 1732 - protein, 38 aa, Homosapiens
MDGVSLCCHAGMQWHDLGSLQPPTLWFKRFSCLSLLNS

SEQ ID NO: 1733 - DNA, 2693 bp, Homosapiens
aaagaatttctcaggctcaaaatccaatacaggagtgacttggaactccattctatcactatgaagaaaagtggtgttcttttcctcttgggcatcatcttgctggttctgattggagtgcaaggaaccccagtagtgagaaagggtcgctgttcctgcatcagcaccaaccaagggactatccacctacaatccttgaaagaccttaaacaatttgccccaagcccttcctgcgagaaaattgaaatcattgctacactgaagaatggagttcaaacatgtctaaacccagattcagcagatgtgaaggaactgattaaaaagtgggagaaacaggtcagccaaaagaaaaagcaaaagaatgggaaaaaacatcaaaaaaagaaagttctgaaagttcgaaaatctcaacgttctcgtcaaaagaagactacataagagaccacttcaccaataagtattctgtgttaaaaatgttctattttaattataccgctatcattccaaaggaggatggcatataatacaaaggcttattaatttgactagaaaatttaaaacattactctgaaattgtaactaaagttagaaagttgattttaagaatccaaacgttaagaattgttaaaggctatgattgtctttgttcttctaccacccaccagttgaatttcatcatgcttaaggccatgattttagcaatacccatgtctacacagatgttcacccaaccacatcccactcacaacagctgcctggaagagcagccctaggcttccacgtactgcagcctccagagagtatctgaggcacatgtcagcaagtcctaagcctgttagcatgctggtgagccaagcagtttgaaattgagctggacctcaccaagctgctgtggccatcaacctctgtatttgaatcagcctacaggcctcacacacaatgtgtctgagagattcatgctgattgttattgggtatcaccactggagatcaccagtgtgtggctttcagagcctcctttctggctttggaagccatgtgattccatcttgcccgctcaggctgaccactttatttctttttgttcccctttgcttcattcaagtcagctcttctccatcctaccacaatgcagtgcctttcttctctccagtgcacctgtcatatgctctgatttatctgagtcaactcctttctcatcttgtccccaacaccccacagaagtgctttcttctcccaattcatcctcactcagtccagcttagttcaagtcctgcctcttaaataaacctttttggacacacaaattatcttaaaactcctgtttcacttggttcagtaccacatgggtgaacactcaatggttaactaattcttgggtgtttatcctatctctccaaccagattgtcagctccttgagggcaagagccacagtatatttccctgtttcttccacagtgcctaataatactgtggaactaggttttaataattttttaattgatgttgttatgggcaggatggcaaccagaccattgtctcagagcaggtgctggctctttcctggctactccatgttggctagcctctggtaacctcttacttattatcttcaggacactcactacagggaccagggatgatgcaacatccttgtctttttatgacaggatgtttgctcagcttctccaacaataagaagcacgtggtaaaacacttgcggatattctggactgtttttaaaaaatatacagtttaccgaaaatcatataatcttacaatgaaaaggactttatagatcagccagtgaccaaccttttcccaaccatacaaaaattccttttcccgaaggaaaagggctttctcaataagcctcagctttctaagatctaacaagatagccaccgagatccttatcgaaactcattttaggcaaatatgagttttattgtccgtttacttgtttcagagtttgtattgtgattatcaattaccacaccatctcccatgaagaaagggaacggtgaagtactaagcgctagaggaagcagccaagtcggttagtggaagcatgattggtgcccagttagcctctgcaggatgtggaaacctccttccaggggaggttcagtgaattgtgtaggagaggttgtctgtggccagaatttaaacctatactcactttcccaaattgaatcactgctcacactgctgatgatttagagtgctgtccggtggagatcccacccgaacgtcttatctaatcatgaaactccctagttccttcatgtaacttccctgaaaaatctaagtgtttcataaatttgagagtctgtgacccacttaccttgcatctcacaggtagacagtatataactaacaaccaaagactacatattgtcactgacacacacgttataatcatttatcatatatatacatacatgcatacactctcaaagcaaataatttttcacttcaaaacagtattgacttgtataccttgtaatttgaaatattttctttgttaaaatagaatggtatcaataaatagaccattaatcagaaaacagatcttgattttttttctcttgaatgtacccttcaactgttgaatgtttaatagtaaatcttatatgtccttatttactttttagctttctctcaaataaagtgtaacactagttgagata

SEQ ID NO: 1734 - protein, 125 aa, Homosapiens; identical to SEQ ID NO: 155

SEQ ID NO: 1735 - DNA, 2903 bp, Homosapiens
ggctgaggtcgctgcgtgtgaggcccctggagccaggcagccctttacagaccctatccaacttccagacctgccgagccagctcccagctccttccctcatgcgtgtgcgcttactgggtgctaggcactgtgtttagcaccatgctcagacggggagcgtcgcaggccttccttgcctagtggtggaaggaaatgttaaccatagggttgcagggaaacgtagcgttgctgcggacacgggctcagcaaggcctctgcaagtgtgcggtgagagcccctctggggttcaggaaagtcttcccagggaaatgatgctggcctgggtaactatggaaccccagtagtgagaaagggtcgctgttcctgcatcagcaccaaccaagggactatccacctacaatccttgaaagaccttaaacaatttgccccaagcccttcctgcgagaaaattgaaatcattgctacactgaagaatggagttcaaacatgtctaaacccagattcagcagatgtgaaggaactgattaaaaagtgggagaaacaggtcagccaaaagaaaaagcaaaagaatgggaaaaaacatcaaaaaaagaaagttctgaaagttcgaaaatctcaacgttctcgtcaaaagaagactacataagagaccacttcaccaataagtattctgtgttaaaaatgttctattttaattataccgctatcattccaaaggaggatggcatataatacaaaggcttattaatttgactagaaaatttaaaacattactctgaaattgtaactaaagttagaaagttgattttaagaatccaaacgttaagaattgttaaaggctatgattgtctttgttcttctaccacccaccagttgaatttcatcatgcttaaggccatgattttagcaatacccatgtctacacagatgttcacccaaccacatcccactcacaacagctgcctggaagagcagccctaggcttccacgtactgcagcctccagagagtatctgaggcacatgtcagcaagtcctaagcctgttagcatgctggtgagccaagcagtttgaaattgagctggacctcaccaagctgctgtggccatcaacctctgtatttgaatcagcctacaggcctcacacacaatgtgtctgagagattcatgctgattgttattgggtatcaccactggagatcaccagtgtgtggctttcagagcctcctttctggctttggaagccatgtgattccatcttgcccgctcaggctgaccactttatttctttttgttcccctttgcttcattcaagtcagctcttctccatcctaccacaatgcagtgcctttcttctctccagtgcacctgtcatatgctctgatttatctgagtcaactcctttctcatcttgtccccaacaccccacagaagtgctttcttctcccaattcatcctcactcagtccagcttagttcaagtcctgcctcttaaataaacctttttggacacacaaattatcttaaaactcctgtttcacttggttcagtaccacatgggtgaacactcaatggttaactaattcttgggtgtttatcctatctctccaaccagattgtcagctccttgagggcaagagccacagtatatttccctgtttcttccacagtgcctaataatactgtggaactaggttttaataattttttaattgatgttgttatgggcaggatggcaaccagaccattgtctcagagcaggtgctggctctttcctggctactccatgttggctagcctctggtaacctcttacttattatcttcaggacactcactacagggaccagggatgatgcaacatccttgtctttttatgacaggatgtttgctcagcttctccaacaataagaagcacgtggtaaaacacttgcggatattctggactgtttttaaaaaatatacagtttaccgaaaatcatataatcttacaatgaaaaggactttatagatcagccagtgaccaaccttttcccaaccatacaaaaattccttttcccgaaggaaaagggctttctcaataagcctcagctttctaagatctaacaagatagccaccgagatccttatcgaaactcattttaggcaaatatgagttttattgtccgtttacttgtttcagagtttgtattgtgattatcaattaccacaccatctcccatgaagaaagggaacggtgaagtactaagcgctagaggaagcagccaagtcggttagtggaagcatgattggtgcccagttagcctctgcaggatgtggaaacctccttccaggggaggttcagtgaattgtgtaggagaggttgtctgtggccagaatttaaacctatactcactttcccaaattgaatcactgctcacactgctgatgatttagagtgctgtccggtggagatcccacccgaacgtcttatctaatcatgaaactccctagttccttcatgtaacttccctgaaaaatctaagtgtttcataaatttgagagtctgtgacccacttaccttgcatctcacaggtagacagtatataactaacaaccaaagactacatattgtcactgacacacacgttataatcatttatcatatatatacatacatgcatacactctcaaagcaaataatttttcacttcaaaacagtattgacttgtataccttgtaatttgaaatattttctttgttaaaatagaatggtatcaataaatagaccattaatcagaaaacagatcttgattttttttctcttgaatgtacccttcaactgttgaatgtttaatagtaaatcttatatgtccttatttactttttagctttctctcaaataaagtgtaacactagttgagata

SEQ ID NO: 1736 - protein, 108 aa, Homosapiens
MLIVIGYHHWRSPVCGFQSLLSGFGSHVIPSCPLRLTTLFLFVPLCFIQVSSSPSYHNAVPFFSPVHLSYALIYLSQLLSHLVPNTPQKCFLLPIHPHSVQLSSSPAS

SEQ ID NO: 1737 - DNA, 2566 bp, Homosapiens
aaagaatttctcaggctcaaaatccaatacaggagtgacttggaactccattctatcactatgaagaaaagtggtgttcttttcctcttgggcatcatcttgctggttctgattggagtgcaaggaaccccagtagtgagaaagggtcgctgttcctgcatcagcaccaaccaagggactatccacctacaatccttgaaagaccttaaacaatttgccccaagcccttcctgcgagaaaattgaaatcattgctacactgaagaatggagttcaaacatgtctaaacccagattcagcagatgtgaaggaactgattaaaaagtgggagaaacaggtcagccaaaagaaaaagcaaaagaatgggaaaaaacatcaaaaaaagaaagttctgaaagttcgaaaatctcaacgttctcgtcaaaagaagactacataagagaccacttcaccaataagtattctgtgttaaaaatgttctattttaattataccgctatcattccaaaggaggatggcatataatacaaaggcttattaatttgactagaaaatttaaaacattactctgaaattgtaactaaagttagaaagttgattttaagaatccaaacgttaagaattgttaaaggctatgattgtctttgttcttctaccacccaccagttgaatttcatcatgcttaaggccatgattttagcaatacccatgtctacacagatgttcacccaaccacatcccactcacaacagctgcctggaagagcagccctaggcttccacgtactgcagcctccagagagtatctgaggcacatgtcagcaagtcctaagcctgttagcatgctggtgagccaagcagtttgaaattgagctggacctcaccaagctgctgtggccatcaacctctgtatttgaatcagcctacaggcctcacacacaatgtgtctgagagattcatgctgattgttattgggtatcaccactggagatcaccagtgtgtggctttcagagcctcctttctggctttggaagccatgtgattccatcttgcccgctcaggctgaccactttatttctttttgttcccctttgcttcattcaagtcagctcttctccatcctaccacaatgcagtgcctttcttctctccagtgcacctgtcatatgctctgatttatctgagtcaactcctttctcatcttgtccccaacaccccacagaagtgctttcttctcccaattcatcctcactcagtccagcttagttcaagtcctgcctcttaaataaacctttttggacacacaaattatcttaaaactcctgtttcacttggttcagtaccacatgggtgaacactcaatggttaactaattcttgggtgtttatcctatctctccaaccagattgtcagctccttgagggcaagagccacagtatatttccctgtttcttccacagtgcctaataatactgtggaactaggttttaataattttttaattgatgttgttatgggcaggatggcaaccagaccattgtctcagagcaggtgctggctctttcctggctactccatgttggctagcctctggtaacctcttacttattatcttcaggacactcactacagggaccagggatgatgcaacatccttgtctttttatgacaggatgtttgctcagcttctccaacaataagaagcacgtggtaaaacacttgcggatattctggactgtttttaaaaaatatacagtttaccgaaaatcatataatcttacaatgaaaaggactttatagatcagccagtgaccaaccttttcccaaccatacaaaaattccttttcccgaaggaaaagggctttctcaataagcctcagctttctaagatctaacaagatagccaccgagatccttatcgaaactcattttaggcaaatatgagttttattgtccgtttacttgtttcagagtttgtattgtgattatcaattaccacaccatctcccatgaagaaagggaacggtgaagtactaagcgctagaggaagcagccaagtcggttagtggaagcatgattggtgcccagttagcctctgcaggatgtggaaacctccttccaggggaggttcagtgaattgtgtaggagaggttgtctgtggccagaatttaaacctatactcactttcccaaattgaatcactgctcacactgctgatgatttagagtgctgtccggtggagatcccacccgaacgtcttatctaatcatgaaactccctagttccttcatgtaacttccctgaaaaatctaagtgtttcataaatttgagagtctgtgacccacttaccttgcatctcacaggtagacagtatataactaacaaccaaagactacatattgtcactgacacacacgttataatcatttatcatatatatacatacatgcatacactctcaaagcaaataatttttcacttcaaaacagtattgacttgtataccttgtaatttgaaatattttctttgttaaaatagaatggtatcaataaatagaccattaatcag

SEQ ID NO: 1738 - protein, 125 aa, Homosapiens; identical to SEQ ID NO: 155

SEQ ID NO: 1739 - DNA, 2776 bp, Homosapiens
ggctgaggtcgctgcgtgtgaggcccctggagccaggcagccctttacagaccctatccaacttccagacctgccgagccagctcccagctccttccctcatgcgtgtgcgcttactgggtgctaggcactgtgtttagcaccatgctcagacggggagcgtcgcaggccttccttgcctagtggtggaaggaaatgttaaccatagggttgcagggaaacgtagcgttgctgcggacacgggctcagcaaggcctctgcaagtgtgcggtgagagcccctctggggttcaggaaagtcttcccagggaaatgatgctggcctgggtaactatggaaccccagtagtgagaaagggtcgctgttcctgcatcagcaccaaccaagggactatccacctacaatccttgaaagaccttaaacaatttgccccaagcccttcctgcgagaaaattgaaatcattgctacactgaagaatggagttcaaacatgtctaaacccagattcagcagatgtgaaggaactgattaaaaagtgggagaaacaggtcagccaaaagaaaaagcaaaagaatgggaaaaaacatcaaaaaaagaaagttctgaaagttcgaaaatctcaacgttctcgtcaaaagaagactacataagagaccacttcaccaataagtattctgtgttaaaaatgttctattttaattataccgctatcattccaaaggaggatggcatataatacaaaggcttattaatttgactagaaaatttaaaacattactctgaaattgtaactaaagttagaaagttgattttaagaatccaaacgttaagaattgttaaaggctatgattgtctttgttcttctaccacccaccagttgaatttcatcatgcttaaggccatgattttagcaatacccatgtctacacagatgttcacccaaccacatcccactcacaacagctgcctggaagagcagccctaggcttccacgtactgcagcctccagagagtatctgaggcacatgtcagcaagtcctaagcctgttagcatgctggtgagccaagcagtttgaaattgagctggacctcaccaagctgctgtggccatcaacctctgtatttgaatcagcctacaggcctcacacacaatgtgtctgagagattcatgctgattgttattgggtatcaccactggagatcaccagtgtgtggctttcagagcctcctttctggctttggaagccatgtgattccatcttgcccgctcaggctgaccactttatttctttttgttcccctttgcttcattcaagtcagctcttctccatcctaccacaatgcagtgcctttcttctctccagtgcacctgtcatatgctctgatttatctgagtcaactcctttctcatcttgtccccaacaccccacagaagtgctttcttctcccaattcatcctcactcagtccagcttagttcaagtcctgcctcttaaataaacctttttggacacacaaattatcttaaaactcctgtttcacttggttcagtaccacatgggtgaacactcaatggttaactaattcttgggtgtttatcctatctctccaaccagattgtcagctccttgagggcaagagccacagtatatttccctgtttcttccacagtgcctaataatactgtggaactaggttttaataattttttaattgatgttgttatgggcaggatggcaaccagaccattgtctcagagcaggtgctggctctttcctggctactccatgttggctagcctctggtaacctcttacttattatcttcaggacactcactacagggaccagggatgatgcaacatccttgtctttttatgacaggatgtttgctcagcttctccaacaataagaagcacgtggtaaaacacttgcggatattctggactgtttttaaaaaatatacagtttaccgaaaatcatataatcttacaatgaaaaggactttatagatcagccagtgaccaaccttttcccaaccatacaaaaattccttttcccgaaggaaaagggctttctcaataagcctcagctttctaagatctaacaagatagccaccgagatccttatcgaaactcattttaggcaaatatgagttttattgtccgtttacttgtttcagagtttgtattgtgattatcaattaccacaccatctcccatgaagaaagggaacggtgaagtactaagcgctagaggaagcagccaagtcggttagtggaagcatgattggtgcccagttagcctctgcaggatgtggaaacctccttccaggggaggttcagtgaattgtgtaggagaggttgtctgtggccagaatttaaacctatactcactttcccaaattgaatcactgctcacactgctgatgatttagagtgctgtccggtggagatcccacccgaacgtcttatctaatcatgaaactccctagttccttcatgtaacttccctgaaaaatctaagtgtttcataaatttgagagtctgtgacccacttaccttgcatctcacaggtagacagtatataactaacaaccaaagactacatattgtcactgacacacacgttataatcatttatcatatatatacatacatgcatacactctcaaagcaaataatttttcacttcaaaacagtattgacttgtataccttgtaatttgaaatattttctttgttaaaatagaatggtatcaataaatagaccattaatcag

SEQ ID NO: 1740 - protein, 108 aa, Homosapiens; identical to SEQ ID NO: 1736

SEQ ID NO: 1741 - DNA, 883 bp, Homosapiens
agtgaggaggttatacccggaggtctcgacgctcgctcgtgctgctcgtgttgccgctgggtacgtttgctgccagtgctgatccagccggaggcgaagagaagcactttgggggcaaaagaagagaaaaatgaagacgggacattttgaaatagtcaccatgctgctggcaaccatgattctagtggacattttccaggactaaaaaccgaaaactgtattgagaacctagaatattttcaacccatctatgtctacaaccctggtgagaaaaaccagaagcttgaagaccatagtgagaaaaactggaagcttgaagaccatggtgagaaaaaccagaagcttgaagaccatggtgtgaaaatccttgaacccacccaaatacctgagatggggtctcgctatgttgcccaggctcaaactcctggtctcaagtggtcctcctgccttggcctcctaaaatgctggaattacagctccaggtccagttcctgttccaggtcccaaaagccatccttctgcatcctcgggcaaactgctgcttccacagtttgggatggtcatcattttaatcagtgtttctgctataaatctctttgttgctctgtagtttgatgcattgtttatctttcttattctttacttgaaataactatagggatccacaggagatcaaaaggaatgatgtattttttacgtgttggccaaagtcactggataaaatgagaattgtatatttgttattcattttgcaaattcagaaagttggtccagatatatgtcacagaacttttcacttgtatactactcttacaatggaaaaaaatcccgaaaactgtatacttctgattaaattcaataaaagattttgattagatatttc

SEQ ID NO: 1742 - protein, 74 aa, Homosapiens
MGSRYVAQAQTPGLKWSSCLGLLKCWNYSSRSSSCSRSQKPSFCILGQTAASTVWDGHHFNQCFCYKSLCCSVV

SEQ ID NO: 1743 - DNA, 1216 bp, Homosapiens
ctttgcagataaatatggcacactagccccacgttttctgagacattcctcaattgcttagacatattctgagcctacagcagaggaacctccagtctcagcaccatgaatcaaactgccattctgatttgctgccttatctttctgactctaagtggcattcaaggagtacctctctctagaactgtacgctgtacctgcatcagcattagtaatcaacctgttaatccaaggtctttagaaaaacttgaaattattcctgcaagccaattttgtccacgtgttgagatcattgctacaatgaaaaagaagggtgagaagagatgtctgaatccagaatcgaaggccatcaagaatttactgaaagcagttagcaaggaaaggtctaaaagatctccttaaaaccagaggggagcaaaatcgatgcagtgcttccaaggatggaccacacagaggctgcctctcccatcacttccctacatggagtatatgtcaagccataattgttcttagtttgcagttacactaaaaggtgaccaatgatggtcaccaaatcagctgctactactcctgtaggaaggttaatgttcatcatcctaagctattcagtaataactctaccctggcactataatgtaagctctactgaggtgctatgttcttagtggatgttctgaccctgcttcaaatatttccctcacctttcccatcttccaagggtactaaggaatctttctgctttggggtttatcagaattctcagaatctcaaataactaaaaggtatgcaatcaaatctgctttttaaagaatgctctttacttcatggacttccactgccatcctcccaaggggcccaaattctttcagtggctacctacatacaattccaaacacatacaggaaggtagaaatatctgaaaatgtatgtgtaagtattcttatttaatgaaagactgtacaaagtagaagtcttagatgtatatatttcctatattgttttcagtgtacatggaataacatgtaattaagtactatgtatcaatgagtaacaggaaaattttaaaaatacagatagatatatgctctgcatgttacataagataaatgtgctgaatggttttcaaaataaaaatgaggtactctcctggaaatattaagaaagactatctaaatgttgaaagatcaaaaggttaataaagtaattataactaaga

SEQ ID NO: 1744 - protein, 98 aa, Homosapiens
MNQTAILICCLIFLTLSGIQGVPLSRTVRCTCISISNQPVNPRSLEKLEIIPASQFCPRVEIIATMKKKGEKRCLNPESKAIKNLLKAVSKERSKRSP

SEQ ID NO: 1745 - DNA, 1599 bp, Homosapiens
agagaacaaaacagaaactcttggaagcaggaaaggtgcatgactcaaagagggaaattcctgtgccataaaaggattgctggtgtataaaatgctctatatatgccaattatcaatttcctttcatgttcagcatttctactccttccaagaagagcagcaaagctgaagtagcagcagcagcaccagcagcaacagcaaaaaacaaacatgagtgtgaagggcatggctatagccttggctgtgatattgtgtgctacagttgttcaaggcttccccatgttcaaaagaggacgctgtctttgcataggccctggggtaaaagcagtgaaagtggcagatattgagaaagcctccataatgtacccaagtaacaactgtgacaaaatagaagtgattattaccctgaaagaaaataaaggacaacgatgcctaaatcccaaatcgaagcaagcaaggcttataatcaaaaaagttgaaagaaagaatttttaaaaatatcaaaacatatgaagtcctggaaaagagcatctgaaaaacctagaacaagtttaactgtgactactgaaatgacaagaattctacagtaggaaactgagacttttctatggttttgtgactttcaacttttgtacagttatgtgaaggatgaaaggtgggtgaaaggaccaaaaacagaaatacagtcttcctgaatgaatgacaatcagaattccactgcccaaaggagtccaacaattaaatggatttctaggaaaagctaccttaagaaaggctggttaccatcggagtttacaaagtgctttcacgttcttacttgttgcattatacattcatgcatttctaggctagagaaccttctagatttgatgcttacaactattctgttgtgactatgagaacatttctgtctctagaagtcatctgtctgtattgatctttatgctatattactatctgtggttacggtggagacattgacattattactggagtcaagcccttataagtcaaaagcatctatgtgtcgtaaaacattcctcaaacattttttcatgcaaatacacacttctttccccaaacatcatgtagcacatcaatatgtagggagacattcttatgcatcatttggtttgttttataaccaattcattaaatgtaattcataaaatgtactatgaaaaaaattatacgctatgggatactggcaaaagtgcacatatttcataaccaaattagtagcaccagtcttaatttgatgtttttcaacttttattcattgagatgttttgaagcaattaggatatgtgtgtttactgtactttttgttttgatccgtttgtataaatgatagcaatatcttggacacatctgaaatacaaaatgtttttgtctaccaaagaaaaatgttgaaaaataagcaaatgtatacctagcaatcacttttactttttgtaattctgtctcttagaaaaatacataatctaatcaatttctttgttcatgcctatatactgtaaaatttaggtatactcaagactagtttaaagaatcaaagtcatttttttctctaataaactaccacaacctttctttttt

SEQ ID NO: 1746 - protein, 94 aa, Homosapiens; identical to SEQ ID NO: 159

SEQ ID NO: 1747 - DNA, 1768 bp, Homosapiens
aagacatcaagacttaaacgaaggaaaggattcaaaagaggagaggaaagtgcattttcatgctagaaaaaccatattatacaaatataaaaaatagggatctctcaggctcaccagatgaggggatgctgtgaaagaaggtaatcttcctcatgtgatgtcagagagtatagagccagaacaagtcacaatcctgaagacacgtctgaccccacacatctacaaagccagcagaaatcaggcagactaacttctacaataaggcagaaagtttgaaatttggaacacacggaaaggacttgcatttctactccttccaagaagagcagcaaagctgaagtagcagcagcagcaccagcagcaacagcaaaaaacaaacatgagtgtgaagggcatggctatagccttggctgtgatattgtgtgctacagttgttcaaggcttccccatgttcaaaagaggacgctgtctttgcataggccctggggtaaaagcagtgaaagtggcagatattgagaaagcctccataatgtacccaagtaacaactgtgacaaaatagaagtgattattaccctgaaagaaaataaaggacaacgatgcctaaatcccaaatcgaagcaagcaaggcttataatcaaaaaagttgaaagaaagaatttttaaaaatatcaaaacatatgaagtcctggaaaagagcatctgaaaaacctagaacaagtttaactgtgactactgaaatgacaagaattctacagtaggaaactgagacttttctatggttttgtgactttcaacttttgtacagttatgtgaaggatgaaaggtgggtgaaaggaccaaaaacagaaatacagtcttcctgaatgaatgacaatcagaattccactgcccaaaggagtccaacaattaaatggatttctaggaaaagctaccttaagaaaggctggttaccatcggagtttacaaagtgctttcacgttcttacttgttgcattatacattcatgcatttctaggctagagaaccttctagatttgatgcttacaactattctgttgtgactatgagaacatttctgtctctagaagtcatctgtctgtattgatctttatgctatattactatctgtggttacggtggagacattgacattattactggagtcaagcccttataagtcaaaagcatctatgtgtcgtaaaacattcctcaaacattttttcatgcaaatacacacttctttccccaaacatcatgtagcacatcaatatgtagggagacattcttatgcatcatttggtttgttttataaccaattcattaaatgtaattcataaaatgtactatgaaaaaaattatacgctatgggatactggcaaaagtgcacatatttcataaccaaattagtagcaccagtcttaatttgatgtttttcaacttttattcattgagatgttttgaagcaattaggatatgtgtgtttactgtactttttgttttgatccgtttgtataaatgatagcaatatcttggacacatctgaaatacaaaatgtttttgtctaccaaagaaaaatgttgaaaaataagcaaatgtatacctagcaatcacttttactttttgtaattctgtctcttagaaaaatacataatctaatcaatttctttgttcatgcctatatactgtaaaatttaggtatactcaagactagtttaaagaatcaaagtcatttttttctctaataaactaccacaacctttctttttt

SEQ ID NO: 1748 - protein, 94 aa, Homosapiens; identical to SEQ ID NO: 159

SEQ ID NO: 1749 - DNA, 1659 bp, Homosapiens
aagacatcaagacttaaacgaaggaaaggattcaaaagaggagaggaaagtgcattttcatgctagaaaaaccatattatacaaatataaaaaatagggatctctcaggctcaccagatgaggggatgctgtgaaagaaggtaatcttcctcatgtgatgtcagagagtatagagccagaacaagtcacaatcctgaagacacgtctgaccccacacatctacaaagccagcagaaatcaggcagactaacttctacaataaggcagaaagtttgaaatttggaacacacggaaaggacttgcatttctactccttccaagaagagcagcaaagctgaagtagcagcagcagcaccagcagcaacagcaaaaaacaaacatgagtgtgaagggcatggctatagccttggctgtgatattgtgtgctacagttgttcaaggcttccccatgttcaaaagaggacgctgtctttgcataggccctggggtaaaagcagtgaaagtggcagatattgagaaagcctccataatgtacccaagtaacaactgtgacaaaatagaagtgattattaccctgaaagaaaataaaggacaacgatgcctaaatcccaaatcgaagcaagcaaggcttataatcaaaaaagttgaaagaaagaatttttaaaaatatcaaaacatatgaagtcctggaaaagagcatctgaaaaacctagaacaagtttaactgtgactactgaaatgacaagaattctacagtaggaaactgagacttttctatggttttgtgactttcaacttttgtacagttatgtgaaggatgaaaggtgggtgaaaggaccaaaaacagaaatacagtcttcctgaatgaatgacaatcagaattccactgcccaaaggagtccaacaattaaatggatttctaggaaaagctaccttaagaaaggctggttaccatcggagtttacaaagtgctttcacgttcttacttgttgcattatacattcatgcatttctaggctagagaaccttctagatttgatgcttacaactattctgttgtgactatgagaacatttctgtctctagaagtcatctgtctgtattgatctttatgctatattactatctgtggttacggtggagacattgacattattactggagtcaagcccttataagtcaaaagcatctatgtgtcgtaaaacattcctcaaacattttttcatgcaaatacacacttctttccccaaacatcatgtagcacatcaatatgtagggagacattcttatgcatcatttggtttgttttataaccaattcattaaatgtaattcataaaatgtactatgaaaaaaattatacgctatgggatactggcaaaagtgcacatatttcataaccaaattagtagcaccagtcttaatttgatgtttttcaacttttattcattgagatgttttgaagcaattaggatatgtgtgtttactgtactttttgttttgatccgtttgtataaatgatagcaatatcttggacacatctgaaatacaaaatgtttttgtctaccaaagaaaaatgttgaaaaataagcaaatgtatacctagcaatcacttttactttttgtaattctgtctcttagaaaaatacataatctaatc

SEQ ID NO: 1750 - protein, 94 aa, Homosapiens; identical to SEQ ID NO: 159

SEQ ID NO: 1751 - DNA, 1526 bp, Homosapiens
gcattcctgtctcagctctcactgtcaacaacatcccatcctgaagacttgcttaccacaactgagagtggggagtcagtttgaggcctagcatcacttaaacttcctccaaaggcacaaaagccagaagagaaaaatgaagacgggacattttgaaatagtcaccatgctgctggcaaccatgattctagtggacattttccaggtgaaggctgaagtgttagacatggcagataatgcatttgatgatgaatacctgaaatgtacggacaggatggaaattaaatacgttccccaactgctaaaggaggaaaaagcaagccaccagcaattagatactgtgtgggaaaatgcaaaagccaaatgggcagcccgaaagactcaaatctttctccctatgaattttaaggataaccatggaatagccctgatggcatatatttccgaagctcaagagcaaactcccttttaccatctgttcagtgaagctgtgaagatggctggccaatctcgagaagattatatctatggcttccagttcaaagctttccacttttacctcacaagagccctgcagttgctgagaaaaccttgtgaggccagttccaaaactgtggtatatagaacaagccagggcacttcatttacatttggagggctaaaccaagccaggtttggccattttaccttggcatattcagccaaacctcaggctgctaatgaccagctcactgtgttatccatctacacatgccttggagttgacattgaaaattttcttgataaagaaagtgaaagaattactttaatacctctgaatgaggtttttcaagtgtcacaggagggggctggcaataaccttatccttcaaagcataaacaagacctgcagccattatgagtgtgcatttctaggtggactaaaaaccgaaaactgtattgagaacctagaatattttcaacccatctatgtctacaaccctggtgagaaaaaccagaagcttgaagaccatagtgagaaaaactggaagcttgaagaccatggtgagaaaaaccagaagcttgaagaccatggtgtgaaaatccttgaacccacccaaatacctggaatgaaaattccagaaccttttccactacctgaagataaaagtcaaggaaatatcaacaatcctactccaggtccagttcctgttccaggtcccaaaagccatccttctgcatcctcgggcaaactgctgcttccacagtttgggatggtcatcattttaatcagtgtttctgctataaatctctttgttgctctgtagtttgatgcattgtttatctttcttattctttacttgaaataactatagggatccacaggagatcaaaaggaatgatgtattttttacgtgttggccaaagtcactggataaaatgagaattgtatatttgttattcattttgcaaattcagaaagttggtccagatatatgtcacagaacttttcacttgtatactactcttacaatggaaaaaaatccc

SEQ ID NO: 1752 - protein, 389 aa, Homosapiens
MKTGHFEIVTMLLATMILVDIFQVKAEVLDMADNAFDDEYLKCTDRMEIKYVPQLLKEEKASHQQLDTVWENAKAKWAARKTQIFLPMNFKDNHGIALMAYISEAQEQTPFYHLFSEAVKMAGQSREDYIYGFQFKAFHFYLTRALQLLRKPCEASSKTVVYRTSQGTSFTFGGLNQARFGHFTLAYSAKPQAANDQLTVLSIYTCLGVDIENFLDKESERITLIPLNEVFQVSQEGAGNNLILQSINKTCSHYECAFLGGLKTENCIENLEYFQPIYVYNPGEKNQKLEDHSEKNWKLEDHGEKNQKLEDHGVKILEPTQIPGMKIPEPFPLPEDKSQGNINNPTPGPVPVPGPKSHPSASSGKLLLPQFGMVIILISVSAINLFVAL

SEQ ID NO: 1753 - DNA, 1546 bp, Homosapiens
gcattcctgtctcagctctcactgtcaacaacatcccatcctgaagacttgcttaccacaactgagagtggggagtcagtttgaggcctagcatcacttaaacttcctccaaaggcacaaaagccagaagagaaaaatgaagacgggacattttgaaatagtcaccatgctgctggcaaccatgattctagtggacattttccaggtgaaggctgaagtgttagacatggcagataatgcatttgatgatgaatacctgaaatgtacggacaggatggaaattaaatacgttccccaactgctaaaggaggaaaaagcaagccaccagcaattagatactgtgtgggaaaatgcaaaagccaaatgggcagcccgaaagactcaaatctttctccctatgaattttaaggataaccatggaatagccctgatggcatatatttccgaagctcaagagcaaactcccttttaccatctgttcagtgaagctgtgaagatggctggccaatctcgagaagattatatctatggcttccagttcaaagctttccacttttacctcacaagagccctgcagttgctgagaaaaccttgtgaggccagttccaaaactgtggtatatagaacaagccagggcacttcatttacatttggagggctaaaccaagccaggtttggccattttaccttggcatattcagccaaacctcaggctgctaatgaccagctcactgtgttatccatctacacatgccttggagttgacattgaaaattttcttgataaagaaagtgaaagaattactttaatacctctgaatgaggtttttcaagtgtcacaggagggggctggcaataaccttatccttcaaagcataaacaagacctgcagccattatgagtgtgcatttctaggtggactaaaaaccgaaaactgtattgagaacctagaatattttcaacccatctatgtctacaaccctggtgagaaaaaccagaagcttgaagaccatagtgagaaaaactggaagcttgaagaccatggtgagaaaaaccagaagcttgaagaccatggtgtgaaaatccttgaacccacccaaatacctgaagataaaagtcaaggaaatatcaacaatcctactccaggtccagttcctgttccaggtcccaaaagccatccttctgcatcctcgggcaaactgctgcttccacagtttgggatggtcatcattttaatcagtgtttctgctataaatctctttgttgctctgtagtttgatgcattgtttatctttcttattctttacttgaaataactatagggatccacaggagatcaaaaggaatgatgtattttttacgtgttggccaaagtcactggataaaatgagaattgtatatttgttattcattttgcaaattcagaaagttggtccagatatatgtcacagaacttttcacttgtatactactcttacaatggaaaaaaatcccgaaaactgtatacttctgattaaattcaataaaagattttgattagatatttc

SEQ ID NO: 1754 - protein, 378 aa, Homosapiens; identical to SEQ ID NO: 161

SEQ ID NO: 1755 - DNA, 533 bp, Homosapiens
ctcactgtcaacaacatcccatcctgaagacttgcttaccacaactgagagtggggagtcagtttgaggcctagcatcacttaaacttcctccaaaggcacaaaagccagaagagaaaaatgaagacgggacattttgaaatagtcaccatgctgctggcaaccatgattctagtggacattttccagaggcaacagaacagtttggttaagaggacaagacggccgggcacggtggctcacgcctgtaatcccagcactttgggaggccgagaaaggcagatcacgaggtcgggagatcgagaccatcctggctaacatggtgaaaccccgtctctactaaaaatacagaaaaattagccgggcgtggtggcgggcgtctgtagtcccagctactggggaggctgaagcgggagaatggcgtgaacccggcaggcggagcttgcagtgagccgaaatagtgccactgcactccagcctgggcggcagagcgagactccgtctaaaaaaaaaaaaaaggacaagactctggaa

SEQ ID NO: 1756 - protein, 65 aa, Homosapiens
MKTGHFEIVTMLLATMILVDIFQRQQNSLVKRTRRPGTVAHACNPSTLGGRERQITRSGDRDHPG

SEQ ID NO: 1757 - DNA, 650 bp, Homosapiens
ccacaactgagagtggggagtcagtttgaggcctagcatcacttaaacttcctccaaaggcacaaaagccagaagagaaaaatgaagacgggacattttgaaatagtcaccatgctgctggcaaccatgattctagtggacattttccaggtgagaaaaactggaagcttgaagaccatggtgagaaaaaccagaagcttgaagaccatggtgtgaaaatccttgaacccacccaaatacctgctccaggtccagttcctgttccaggtcccaaaagccatccttctgcatcctcgggcaaactgctgcttccacagtttgggatggtcatcattttaatcagtgtttctgctataaatctctttgttgctctgtagtttgatgcattgtttatctttcttattctttacttgaaataactatagggatccacaggagatcaaaaggaatgatgtattttttacgtgttggccaaagtcactggataaaatgagaattgtatatttgttattcattttgcaaattcagaaagttggtccagatatatgtcacagaacttttcacttgtatactactcttacaatggaaaaaaatcccgaaaactgtatacttctgattaaattcaataaaagattttgattagatatttc

SEQ ID NO: 1758 - protein, 44 aa, Homosapiens
MKTGHFEIVTMLLATMILVDIFQVRKTGSLKTMVRKTRSLKTMV

SEQ ID NO: 1759 - DNA, 985 bp, Homosapiens
cacaaccccatcataagtcgagaagcatctgtatagcatagtaattcagagcaaatttgaaattagatatttctagcaccagttacccccgtgattttatgcatggcattcctcaaaacatttcataaatgttttaaggaatatctgtgaaatatggataattatacctggctaataagactaagaagtaaaggtgacagtgtacataaagcatttgcacaatgcatggcacatagtgaacactcaatagtaggtattaatgtacttgggaatctaagttcaatatgtagaaaatactttttgtgaataaaattttaacttttatttttatgtaaacacatattgatgggaaaaaaaattcaaagagcacagatgagaacaaattaaacccttcccctaaccccacacatacccgtaaacctattaccctgcccctcagacccactcacagagataaccaagtttgcttaatttttaatcagatctttcttttctggataaacagatatacaatataactaactcaaaatctctttatattttagaagataaaagtcaaggaaatatcaacaatcctactccaggtccagttcctgttccaggtcccaaaagccatccttctgcatcctcgggcaaactgctgcttccacagtttgggatggtcatcattttaatcagtgtttctgctataaatctctttgttgctctgtagtttgatgcattgtttatctttcttattctttacttgaaataactatagggatccacaggagatcaaaaggaatgatgtattttttacgtgttggccaaagtcactggataaaatgagaattgtatatttgttattcattttgcaaattcagaaagttggtccagatatatgtcacagaacttttcacttgtatactactcttacaatggaaaaaaatcccgaaaactgtatacttctgattaaattcaataaaagattttgattagatatttc

SEQ ID NO: 1760 - protein, 50 aa, Homosapiens
MDNYTWLIRLRSKGDSVHKAFAQCMAHSEHSIVGINVLGNLSSICRKYFL

SEQ ID NO: 1761 - DNA, 1073 bp, Homosapiens
gggccgactaaatgaattgatgtctcaaatcaggatgcagaatcattttggagcagtcagatctgaagaaaggtattacatagatgcagatctgttacgagaaatcaagcagcatttgaaacaacaacaggaaggccttagccatttgattagcatcattaaagacgatctagaagatataaagctggtcgaacatggattgaatgaaaccatccacatcagaggtggtgtctttagttgacagttcacaaacttgtgtaaaggtttgtgaaatgcatcttcttactgcatcagaccttccttaagaatgaaaccgaccacatggagggaaaaagaaaacaattctttcttggattggttttttgagaagtttactgacaaattactgttcatcaaatctgaaatagtcacctcacagctcttcaaagaaaacctttgaaagatttatatctaaaagctgtatttactttaaaagaagtgcataattaccaaaattgtatgtactattgtacatttttacaacagcattttcttaaacataatctgtgtttaatgattattgtccattgagcctgtactctgctttccataccaagtaaatatgaaataatctactttgcacataacagaacaaactataattacttggctgttggagatttgtacttgagtataaatgtacaccagtttttgtatttgtgaactcatctgtgggaggagtaaagaaaatccaaaagcatttaatgttttgtttttgttctataaagatatgaaaatgtatttttatattattttacttatttggaatttacagagcacacctaagcaattaggatataacaaaactacttaaccatttttgcaaccattttgttttttaagcctttttatttctaaaaagatgaaaacttataaataaattcttaatttgtaattacttttatataattctgtctggtgctttatttggcttttgaggaatgaccattttttgtccacataggtactaaattcataatcacaagtcaggaattttagtcttaagtcttatttttgcctcctagggatttttg

SEQ ID NO: 1762 - protein, 73 aa, Homosapiens
MSQIRMQNHFGAVRSEERYYIDADLLREIKQHLKQQQEGLSHLISIIKDDLEDIKLVEHGLNETIHIRGGVFS

SEQ ID NO: 1763 - DNA, 1440 bp, Homosapiens
ctgcacttcagcctgggagacagagcaagaccctgtctcaaaaaaaacaattaagtctatatcattgtatttatatgataacttttgcctagttaaaatggacagaaacataattcaaatcctgaactgttgaaccctactgttgtttgattttcagctgatttctttcagtaactaattgtactactactacttgcataactaaaaagagatgattctgttgttattggtggtttttatttgtataggtcctaatcaaacaggaaattcaaaggaagagtggttatgccattcaggctgatgaagagcagttgcgagttcagctggatacgattcagggtgaactaaatgcacctactcagttcaagggccgactaaatgaattgatgtctcaaatcaggatgcagaatcattttggagcagtcagatctgaagaaaggtattacatagatgcagatctgttacgagaaatcaagcagcatttgaaacaacaacaggaaggccttagccatttgattagcatcattaaagacgatctagaagatataaagctggtcgaacatggattgaatgaaaccatccacatcagaggtggtgtctttagttgacagttcacaaacttgtgtaaaggtttgtgaaatgcatcttcttactgcatcagaccttccttaagaatgaaaccgaccacatggagggaaaaagaaaacaattctttcttggattggttttttgagaagtttactgacaaattactgttcatcaaatctgaaatagtcacctcacagctcttcaaagaaaacctttgaaagatttatatctaaaagctgtatttactttaaaagaagtgcataattaccaaaattgtatgtactattgtacatttttacaacagcattttcttaaacataatctgtgtttaatgattattgtccattgagcctgtactctgctttccataccaagtaaatatgaaataatctactttgcacataacagaacaaactataattacttggctgttggagatttgtacttgagtataaatgtacaccagtttttgtatttgtgaactcatctgtgggaggagtaaagaaaatccaaaagcatttaatgttttgtttttgttctataaagatatgaaaatgtatttttatattattttacttatttggaatttacagagcacacctaagcaattaggatataacaaaactacttaaccatttttgcaaccattttgttttttaagcctttttatttctaaaaagatgaaaacttataaataaattcttaatttgtaattacttttatataattctgtctggtgctttatttggcttttgaggaatgaccattttttgtccacataggtactaaattcataatcacaagtcaggaattttagtcttaagtcttatttttgcctcctagggatttttg

SEQ ID NO: 1764 - protein, 73 aa, Homosapiens; identical to SEQ ID NO: 1762

SEQ ID NO: 1765 - DNA, 2484 bp, Homosapiens
ggcctcttaggctaggtcagaaaggaggcggaactcggtgatctgactggcggtttcccggccggactgagaaggggagcgcgctgcgcgtcgcaggagtaacctacttggtctcctgctttcgcgacatggccttcaattttggggctccctcgggcacctccggtaccgctgcagccaccgcggcccccgcgggtgggtttggaggatttgggacaacatctacaactgcaggttctgcattcagcttttctgccccaactaacacaggcactactggactctttggtggtactcagaacaaaggttttggatttggtactggttttggcacaacaacgggaactagtactggtttaggtactggtttgggaactggactgggatttggaggatttaatacacagcagcagcagcaaactacattaggtggtctcttcagtcagcctacacaagctcctacccagtccaaccagctgataaatactgcgagtgctctttctgctccaacgctgttgggagatgagagagatgctattttggcaaaatggaatcaactgcaggccttttggggaacaggaaaagggtatttcaacaataatattccgccagtggaattcacacaagaaaatcccttttgccgatttaaggcagtaggttatagttgcatgcccagtaataaagatgaagatgggctagtggttttagttttcaacaaaaaagaaacagagattcgaagccaacaacaacagttggtagaatcattgcataaagttttgggaggaaaccagacccttactgtaaatgtagagggcactaaaacattgccagatgatcagacagaagttgttatttatgttgttgagcgttcgccaaatggtacttcaagaagagttccagctacaacgctatatgcccattttgaacaagccaatataaaaacacaattgcagcaacttggtgtaaccctttctatgactagaacagaactttctcctgcacagatcaaacagcttttacagaatcctcctgctggtgttgatcctattatctgggaacaggccaaggtagataaccctgattctgaaaagttaattcctgtaccaatggtgggttttaaggaacttctccgaagactgaaggttcaagatcagatgactaagcagcatcaaaccagattagatatcatatctgaagatattagtgagctacaaaagaatcaaactacatctgtagccaaaattgcacaatacaagaggaaactcatggatctttcccatagaactttacaggtcctaatcaaacaggaaattcaaaggaagagtggttatgccattcaggctgatgaagagcagttgcgagttcagctggatacgattcagggtgaactaaatgcacctactcagttcaagggccgactaaatgaattgatgtctcaaatcaggatgcagaatcattttggagcagtcagatctgaagaaaggtattacatagatgcagatctgttacgagaaatcaagcagcatttgaaacaacaacaggaaggccttagccatttgattagcatcattaaagacgatctagaagatataaagctggtcgaacatggattgaatgaaaccatccacatcagaggtggtgtctttagttgacagttcacaaacttgtgtaaaggtttgtgaaatgcatcttcttactgcatcagaccttccttaagaatgaaaccgaccacatggagggaaaaagaaaacaattctttcttggattggttttttgagaagtttactgacaaattactgttcatcaaatctgaaatagtcacctcacagctcttcaaagaaaacctttgaaagatttatatctaaaagctgtatttactttaaaagaagtgcataattaccaaaattgtatgtactattgtacatttttacaacagcattttcttaaacataatctgtgtttaatgattattgtccattgagcctgtactctgctttccataccaagtaaatatgaaataatctactttgcacataacagaacaaactataattacttggctgttggagatttgtacttgagtataaatgtacaccagtttttgtatttgtgaactcatctgtgggaggagtaaagaaaatccaaaagcatttaatgttttgtttttgttctataaagatatgaaaatgtatttttatattattttacttatttggaatttacagagcacacctaagcaattaggatataacaaaactacttaaccatttttgcaaccattttgttttttaagcctttttatttctaaaaagatgaaaacttataaataaattcttaatttgtaattacttttatataattctgtctggtgctttatttggcttttgaggaatgaccattttttgtccacataggtactaaattcataatcacaagtcaggaattttagtcttaagtcttatttttgcctcctagggatttttg

SEQ ID NO: 1766 - protein, 507 aa, Homosapiens; identical to SEQ ID NO: 163

SEQ ID NO: 1767 - DNA, 1313 bp, Homosapiens
ctgcacttcagcctgggagacagagcaagaccctgtctcaaaaaaaacaattaagtctatatcattgtatttatatgataacttttgcctagttaaaatggacagaaacataattcaaatcctgaactgttgaaccctactgttgtttgattttcagctgatttctttcagtaactaattgtactactactacttgcataactaaaaagagatgattctgttgttattggtggtttttatttgtataggtcctaatcaaacaggaaattcaaaggaagagtggttatgccattcaggctgatgaagagcagttgcgagttcagctggatacgattcagggtgaactaaatgcacctactcagttcaagggccgactaaatgaattgatgtctcaaatcaggatgcagaatcattttggagcagtcagatctgaagaaaggtattacatagatgcagatctgttacgagaaatcaagcagcatttgaaacaacaacaggaaggccttagccatttgattagcatcattaaagacgatctagaagatataaagctggtcgaacatggattgaatgaaaccatccacatcagaggtggtgtctttagttgacagttcacaaacttgtgtaaaggtttgtgaaatgcatcttcttactgcatcagaccttccttaagaatgaaaccgaccacatggagggaaaaagaaaacaattctttcttggattggttttttgagaagtttactgacaaattactgttcatcaaatctgaaatagtcacctcacagctcttcaaagaaaacctttgaaagatttatatctaaaagctgtatttactttaaaagaagtgcataattaccaaaattgtatgtactattgtacatttttacaacagcattttcttaaacataatctgtgtttaatgattattgtccattgagcctgtactctgctttccataccaagtaaatatgaaataatctactttgcacataacagaacaaactataattacttggctgttggagatttgtacttgagtataaatgtacaccagtttttgtatttgtgaactcatctgtgggaggagtaaagaaaatccaaaagcatttaatgttttgtttttgttctataaagatatgaaaatgtatttttatattattttacttatttggaatttacagagcacacctaagcaattaggatataacaaaactacttaaccatttttgcaaccattttgttttttaagcctttttatttctaaaaagatgaaaacttataaataaattcttaatttgtaattacttttatat

SEQ ID NO: 1768 - protein, 73 aa, Homosapiens; identical to SEQ ID NO: 1762

SEQ ID NO: 1769 - DNA, 2230 bp, Homosapiens
attatatttgacagtcacttttcattatagcttctaggtatagggtcttgctttaggaaagcctttgtcatacacatattataaaaatagaaaattgttttagaaaaaatattttttatttgtggtaggtgttgatcctattatctgggaacaggccaaggtagataaccctgattctgaaaagtaagtatgtcttcatcttgtttcatttaagaactaatatttgctactaggaaagcaaacatgggagctattaattataattcttacatatgagacaagtttattttcattttcctggcctttaaaaaatattgattattgtccagctaaagcttcagccaaaacaaaaagaaaaaaataagaaaaaaaaagattatggtaaggcagcatagcatagtgagaactaactaggagcggaaaattctatttgcgttttcatttaataatgtaatgttttgactgaactgtatttcctcatttgtaaaatagggaggttgaataaaatctctttggtataacatggttatctcatagtcatagatctgccttagagccctagaaagttgatgtaaaattacatgagtgttactaaaaccttcacttcttgtattttgtagtaataggcttaaggtctgaaaattgttcactgcgtttcttcaggttaattcctgtaccaatggtgggttttaaggaacttctccgaagactgaaggttcaagatcagatgactaagcagcatcaaaccagattagatatcatatctgaagatattagtgagctacaaaagaatcaaactacatctgtagccaaaattgcacaatacaagaggaaactcatggatctttcccatagaactttacaggtcctaatcaaacaggaaattcaaaggaagagtggttatgccattcaggctgatgaagagcagttgcgagttcagctggatacgattcagggtgaactaaatgcacctactcagttcaaggtaaccacttctaagaccataattctaaaatttgtttcaggtggatctgcagacaaaaagttatgtaatcttcaagcaggaattttgtatacttgtgtttcttatctccaattagaacttcctttctaaagtaaactcagtcatggttcttttggctagtattagtgtttcgaatataatgtacagagagagaaatagaaatttttaatagatggttttgaaaccatcctttcagaagaaaacattgtcttttacaagtcttcgtcggcagttgtaatttgactcagtcttaacttttagggccgactaaatgaattgatgtctcaaatcaggatgcagaatcattttggagcagtcagatctgaagaaaggtattacatagatgcagatctgttacgagaaatcaagcagcatttgaaacaacaacaggaaggccttagccatttgattagcatcattaaagacgatctagaagatataaagctggtcgaacatggattgaatgaaaccatccacatcagaggtggtgtctttagttgacagttcacaaacttgtgtaaaggtttgtgaaatgcatcttcttactgcatcagaccttccttaagaatgaaaccgaccacatggagggaaaaagaaaacaattctttcttggattggttttttgagaagtttactgacaaattactgttcatcaaatctgaaatagtcacctcacagctcttcaaagaaaacctttgaaagatttatatctaaaagctgtatttactttaaaagaagtgcataattaccaaaattgtatgtactattgtacatttttacaacagcattttcttaaacataatctgtgtttaatgattattgtccattgagcctgtactctgctttccataccaagtaaatatgaaataatctactttgcacataacagaacaaactataattacttggctgttggagatttgtacttgagtataaatgtacaccagtttttgtatttgtgaactcatctgtgggaggagtaaagaaaatccaaaagcatttaatgttttgtttttgttctataaagatatgaaaatgtatttttatattattttacttatttggaatttacagagcacacctaagcaattaggatataacaaaactacttaaccatttttgcaaccattttgttttttaagcctttttatttctaaaaagatgaaaacttataaataaattcttaatttgtaattacttttatat

SEQ ID NO: 1770 - protein, 144 aa, Homosapiens
MVGFKELLRRLKVQDQMTKQHQTRLDIISEDISELQKNQTTSVAKIAQYKRKLMDLSHRTLQVLIKQEIQRKSGYAIQADEEQLRVQLDTIQGELNAPTQFKVTTSKTIILKFVSGGSADKKLCNLQAGILYTCVSYLQLELPF

SEQ ID NO: 1771 - DNA, 1966 bp, Homosapiens
cccggccggactgagaaggggagcgcgctgcgcgtcgcaggagtaacctacttggtctcctgctttcgcgacatggccttcaattttggggctccctcgggcacctccggtaccgctgcagccaccgcggcccccgcgggtgggtttggaggatttgggacaacatctacaactgcaggttctgcattcagcttttctgccccaactaacacaggcactactggactctttggtggtactcagaacaaaggttttggatttggtactggttttggcacaacaacgggaactagtactggtttaggtactggtttgggaactggactgggatttggaggatttaatacacagcagcagcagcaaactagcagtaggttatagttgcatgcccagtaataaagatgaagatgggctagtggttttagttttcaacaaaaaagaaacagagattcgaagccaacaacaacagttggtagaatcattgcataaagttttgggaggaaaccagacccttactgtaaatgtagagggcactaaaacattgccagatgatcagacagaagttgttatttatgttgttgagcgttcgccaaatggtacttcaagaagagttccagctacaacgctatatgcccattttgaacaagccaatataaaaacacaattgcagcaacttggtgtaaccctttctatgactagaacagaactttctcctgcacagatcaaacagcttttacagaatcctcctgctggtgttgatcctattatctgggaacaggccaaggtagataaccctgattctgaaaagttaattcctgtaccaatggtgggttttaaggaacttctccgaagactgaaggttcaagatcagatgactaagcagcatcaaaccagattagatgtcctaatcaaacaggaaattcaaaggaagagtggttatgccattcaggctgatgaagagcagttgcgagttcagctggatacgattcagggtgaactaaatgcacctactcagttcaagggccgactaaatgaattgatgtctcaaatcaggatgcagaatcattttggagcagtcagatctgaagaaaggtattacatagatgcagatctgttacgagaaatcaagcagcatttgaaacaacaacaggaaggccttagccatttgattagcatcattaaagacgatctagaagatataaagctggtcgaacatggattgaatgaaaccatccacatcagaggtggtgtctttagttgacagttcacaaacttgtgtaaaggtttgtgaaatgcatcttcttactgcatcagaccttccttaagaatgaaaccgaccacatggagggaaaaagaaaacaattctttcttggattggttttttgagaagtttactgacaaattactgttcatcaaatctgaaatagtcacctcacagctcttcaaagaaaacctttgaaagatttatatctaaaagctgtatttactttaaaagaagtgcataattaccaaaattgtatgtactattgtacatttttacaacagcattttcttaaacataatctgtgtttaatgattattgtccattgagcctgtactctgctttccataccaagtaaatatgaaataatctactttgcacataacagaacaaactataattacttggctgttggagatttgtacttgagtataaatgtacaccagtttttgtatttgtgaactcatctgtgggaggagtaaagaaaatccaaaagcatttaatgttttgtttttgttctataaagatatgaaaatgtatttttatattattttacttatttggaatttacagagcacacctaagcaattaggatataacaaaactacttaaccatttttgcaaccattttgttttttaagcctttttatttctaaaaagatgaaaacttataaataaattcttaatttgtaattacttttatat

SEQ ID NO: 1772 - protein, 291 aa, Homosapiens
MPSNKDEDGLVVLVFNKKETEIRSQQQQLVESLHKVLGGNQTLTVNVEGTKTLPDDQTEVVIYVVERSPNGTSRRVPATTLYAHFEQANIKTQLQQLGVTLSMTRTELSPAQIKQLLQNPPAGVDPIIWEQAKVDNPDSEKLIPVPMVGFKELLRRLKVQDQMTKQHQTRLDVLIKQEIQRKSGYAIQADEEQLRVQLDTIQGELNAPTQFKGRLNELMSQIRMQNHFGAVRSEERYYIDADLLREIKQHLKQQQEGLSHLISIIKDDLEDIKLVEHGLNETIHIRGGVFS

SEQ ID NO: 1773 - DNA, 2357 bp, Homosapiens
ggcctcttaggctaggtcagaaaggaggcggaactcggtgatctgactggcggtttcccggccggactgagaaggggagcgcgctgcgcgtcgcaggagtaacctacttggtctcctgctttcgcgacatggccttcaattttggggctccctcgggcacctccggtaccgctgcagccaccgcggcccccgcgggtgggtttggaggatttgggacaacatctacaactgcaggttctgcattcagcttttctgccccaactaacacaggcactactggactctttggtggtactcagaacaaaggttttggatttggtactggttttggcacaacaacgggaactagtactggtttaggtactggtttgggaactggactgggatttggaggatttaatacacagcagcagcagcaaactacattaggtggtctcttcagtcagcctacacaagctcctacccagtccaaccagctgataaatactgcgagtgctctttctgctccaacgctgttgggagatgagagagatgctattttggcaaaatggaatcaactgcaggccttttggggaacaggaaaagggtatttcaacaataatattccgccagtggaattcacacaagaaaatcccttttgccgatttaaggcagtaggttatagttgcatgcccagtaataaagatgaagatgggctagtggttttagttttcaacaaaaaagaaacagagattcgaagccaacaacaacagttggtagaatcattgcataaagttttgggaggaaaccagacccttactgtaaatgtagagggcactaaaacattgccagatgatcagacagaagttgttatttatgttgttgagcgttcgccaaatggtacttcaagaagagttccagctacaacgctatatgcccattttgaacaagccaatataaaaacacaattgcagcaacttggtgtaaccctttctatgactagaacagaactttctcctgcacagatcaaacagcttttacagaatcctcctgctggtgttgatcctattatctgggaacaggccaaggtagataaccctgattctgaaaagttaattcctgtaccaatggtgggttttaaggaacttctccgaagactgaaggttcaagatcagatgactaagcagcatcaaaccagattagatatcatatctgaagatattagtgagctacaaaagaatcaaactacatctgtagccaaaattgcacaatacaagaggaaactcatggatctttcccatagaactttacaggtcctaatcaaacaggaaattcaaaggaagagtggttatgccattcaggctgatgaagagcagttgcgagttcagctggatacgattcagggtgaactaaatgcacctactcagttcaagggccgactaaatgaattgatgtctcaaatcaggatgcagaatcattttggagcagtcagatctgaagaaaggtattacatagatgcagatctgttacgagaaatcaagcagcatttgaaacaacaacaggaaggccttagccatttgattagcatcattaaagacgatctagaagatataaagctggtcgaacatggattgaatgaaaccatccacatcagaggtggtgtctttagttgacagttcacaaacttgtgtaaaggtttgtgaaatgcatcttcttactgcatcagaccttccttaagaatgaaaccgaccacatggagggaaaaagaaaacaattctttcttggattggttttttgagaagtttactgacaaattactgttcatcaaatctgaaatagtcacctcacagctcttcaaagaaaacctttgaaagatttatatctaaaagctgtatttactttaaaagaagtgcataattaccaaaattgtatgtactattgtacatttttacaacagcattttcttaaacataatctgtgtttaatgattattgtccattgagcctgtactctgctttccataccaagtaaatatgaaataatctactttgcacataacagaacaaactataattacttggctgttggagatttgtacttgagtataaatgtacaccagtttttgtatttgtgaactcatctgtgggaggagtaaagaaaatccaaaagcatttaatgttttgtttttgttctataaagatatgaaaatgtatttttatattattttacttatttggaatttacagagcacacctaagcaattaggatataacaaaactacttaaccatttttgcaaccattttgttttttaagcctttttatttctaaaaagatgaaaacttataaataaattcttaatttgtaattacttttatat

SEQ ID NO: 1774 - protein, 507 aa, Homosapiens; identical to SEQ ID NO: 163

SEQ ID NO: 1775 - DNA, 2190 bp, Homosapiens
ggcctcttaggctaggtcagaaaggaggcggaactcggtgatctgactggcggtttcccggccggactgagaaggggagcgcgctgcgcgtcgcaggagtaacctacttggtctcctgctttcgcgacatggccttcaattttggggctccctcgggcacctccggtaccgctgcagccaccgcggcccccgcgggtgggtttggaggatttgggacaacatctacaactgcaggttctgcattcagcttttctgccccaactaacacaggcactactggactctttggtggtactcagaacaaaggttttggatttggtactggttttggcacaacaacgggaactagtactggtttaggtactggtttgggaactggactgggatttggaggatttaatacacagcagcagcagcaaactacattaggtggtctcttcagtcagcctacacaagctcctacccagtccaaccagctgataaatactgcgagtgctctttctgctccaacgctgttgggagatgagagagatgctattttggcaaaatggaatcaactgcaggccttttggggaacaggaaaagggtatttcaacaataatattccgccagtggaattcacacaagaaaatcccttttgccgatttaaggcagtaggttatagttgcatgcccagtaataaagatgaagatgggctagtggttttagttttcaacaaaaaagaaacagagattcgaagccaacaacaacagttggtagaatcattgcataaagttttgggaggaaaccagacccttactgtaaatgtagagggcactaaaacattgccagatgatcagacagaagttgttatttatgttgttgagcgttcgccaaatggtacttcaagaagagttccagctacaacgctatatgcccattttgaacaagccaatataaaaacacaattgcagcaacttggtgtaaccctttctatgactagaacagaactttctcctgcacagatcaaacagcttttacagaatcctcctgctggtgttgatcctattatctgggaacaggccaaggtagataaccctgattctgaaaagttaattcctgtaccaatggtgggttttaaggaacttctccgaagactgaaggttcaagatcagatgactaagcagcatcaaaccagattagatatcatatctgaagatattagtgagctacaaaagaatcaaactacatctgtagccaaaattgcacaatacaagaggaaactcatggatctttcccatagaactttacaggtcctaatcaaacaggaaattcaaaggaagagtggttatgccattcaggctgatgaagagcagttgcgagttcagctggatacgattcagggtgaactaaatgcacctactcagttcaagggccgactaaatgaattgatgtctcaaatcaggatgcagaatcattttggagcagtcagatctgaagaaaggtattacatagatgcagatctgttacgagaaatcaagcagcatttgaaacaacaacaggaaggccttagccatttgattagcatcattaaagacgatctagaagatataaagctggtcgaacatggattgaatgaaaccatccacatcagaggtggtgtctttagttgacagttcacaaacttgtgtaaaggtttgtgaaatgcatcttcttactgcatcagaccttccttaagaatgaaaccgaccacatggagggaaaaagaaaacaattctttcttggattggttttttgagaagtttactgacaaattactgttcatcaaatctgaaatagtcacctcacagctcttcaaagaaaacctttgaaagatttatatctaaaagctgtatttactttaaaagaagtgcataattaccaaaattgtatgtactattgtacatttttacaacagcattttcttaaacataatctgtgtttaatgattattgtccattgagcctgtactctgctttccataccaagtaaatatgaaataatctactttgcacataacagaacaaactataattacttggctgttggagatttgtacttgagtataaatgtacaccagtttttgtatttgtgaactcatctgtgggaggagtaaagaaaatccaaaagcatttaatgttttgtttttgttctataaagatatgaaaatgt

SEQ ID NO: 1776 - protein, 507 aa, Homosapiens; identical to SEQ ID NO: 163

SEQ ID NO: 1777 - DNA, 738 bp, Homosapiens
gggccgactaaatgaattgatgtctcaaatcaggatgcagaatcattttggagcagtcagatctgaagaaaggtattacatagatgcagatctgttacgagaaatcaagcagcatttgaaacaacaacaggaaggccttagccatttgattagcatcattaaagacgatctagaagatataaagctggtcgaacatggattgaatgaaaccatccacatcagaggtggtgtctttagttgacagttcacaaacttgtgtaaaggtttgtgaaatgcatcttcttactgcatcagaccttccttaagaatgaaaccgaccacatggagggaaaaagaaaacaattctttcttggattggttttttgagaagtttactgacaaattactgttcatcaaatctgaaatagtcacctcacagctcttcaaagaaaacctttgaaagatttatatctaaaagctgtatttactttaaaagaagtgcataattaccaaaattgtatgtactattgtacatttttacaacagcattttcttaaacataatctgtgtttaatgattattgtccattgagcctgtactctgctttccataccaagtaaatatgaaataatctactttgcacataacagaacaaactataattacttggctgttggagatttgtacttgagtataaatgtacaccagtttttgtatttgtgaactcatctgtgggaggagtaaagaaaatccaaaagc

SEQ ID NO: 1778 - protein, 73 aa, Homosapiens; identical to SEQ ID NO: 1762

SEQ ID NO: 1779 - DNA, 1105 bp, Homosapiens
ctgcacttcagcctgggagacagagcaagaccctgtctcaaaaaaaacaattaagtctatatcattgtatttatatgataacttttgcctagttaaaatggacagaaacataattcaaatcctgaactgttgaaccctactgttgtttgattttcagctgatttctttcagtaactaattgtactactactacttgcataactaaaaagagatgattctgttgttattggtggtttttatttgtataggtcctaatcaaacaggaaattcaaaggaagagtggttatgccattcaggctgatgaagagcagttgcgagttcagctggatacgattcagggtgaactaaatgcacctactcagttcaagggccgactaaatgaattgatgtctcaaatcaggatgcagaatcattttggagcagtcagatctgaagaaaggtattacatagatgcagatctgttacgagaaatcaagcagcatttgaaacaacaacaggaaggccttagccatttgattagcatcattaaagacgatctagaagatataaagctggtcgaacatggattgaatgaaaccatccacatcagaggtggtgtctttagttgacagttcacaaacttgtgtaaaggtttgtgaaatgcatcttcttactgcatcagaccttccttaagaatgaaaccgaccacatggagggaaaaagaaaacaattctttcttggattggttttttgagaagtttactgacaaattactgttcatcaaatctgaaatagtcacctcacagctcttcaaagaaaacctttgaaagatttatatctaaaagctgtatttactttaaaagaagtgcataattaccaaaattgtatgtactattgtacatttttacaacagcattttcttaaacataatctgtgtttaatgattattgtccattgagcctgtactctgctttccataccaagtaaatatgaaataatctactttgcacataacagaacaaactataattacttggctgttggagatttgtacttgagtataaatgtacaccagtttttgtatttgtgaactcatctgtgggaggagtaaagaaaatccaaaagc

SEQ ID NO: 1780 - protein, 73 aa, Homosapiens; identical to SEQ ID NO: 1762

SEQ ID NO: 1781 - DNA, 791 bp, Homosapiens
attgtgggtaaaatgtctctgcatcacttgttaatgctactggtctaacttcattcagtatgcttcattcaccgaactttgtgctcaaaatgcgtatataccattttatgttgtattcctccatttcacttgcaaaacagaagtaaataagagttcgggacccagggtaaaatggtagcttcatccaatatatcattcaaatgcatctgatttctaaaacatattacattttatgctgatcttcagttcataattcttccaggaaaactcagtcttccaactgcaataaaatactgggtagaatcaaatgggaaaggggttgggtggggcaatacccatgagttgatagtgataagctcctaaggatttttaatcacttctctcagggaaaattaggagttgagcacaggacaggaaatgggctttgccacttttagctccaggcttttctaaccagacttgatttcctcatgttctagaaagatcactaatggtcaagtggaacaagcactacacgactaacccctattggggtttttaacttaagggaggctaatttttaatttaaactgctcgagatatgagttctgcaaaaggtggtccgcatccttggccctctggacattatcactaaattgcttgtgcctgttaacaagaatactgaccagaatgctcttcatgtagcttatacagttggttcacttcatgcggttcttgacatgtttatttctacccttaatgcaatgaaatgtttcattaataaaaaaccactttatataaaattgctctag

SEQ ID NO: 1782 - protein, 31 aa, Homosapiens
VDSDKLLRIFNHFSQGKLGVEHRTGNGLCHF

SEQ ID NO: 1783 - DNA, 4805 bp, Homosapiens
ggcctccgcccccgcccgcctccccgcgcagtcgccggcggttgcctcgcggggttgcggcgagcccggcccgcgaacgtcacgtccctgcgcgctccctgcactctcccgagctgcgctaggcgggcgccacggctgcccggcgaaggaaaccgaaaccgagtccgggcccgtccctccgcggccccatccgcccggtgcacccggggccgcgctcgccaggccgcggagcccagagctgcgcgcacgaaccgtgcgccgggagggcgtgggcgtggcgccgaagggtcccgggtcttcgacgcctctgcggcggctcctccctccttgcagttggatccctggcgggtgcggcccggcccggcccgtgagcggcgcacagaatgggccgatgctgcttctacacggcggggacgttgtccctgctcctgctggtgaccagcgtcacgctgctggtggcccgggtcttccagaaggctgtagaccagagtatcgagaagaaaattgtgttaaggaatggtactgaggcatttgactcctgggagaagccccctctgcctgtgtatactcagttctatttcttcaatgtcaccaatccagaggagatcctcagaggggagacccctcgggtggaagaagtggggccatacacctacagggaactcagaaacaaagcaaatattcaatttggagataatggaacaacaatatctgctgttagcaacaaggcctatgtttttgaacgagaccaatctgttggagaccctaaaattgacttaattagaacattaaatattcctgtattgactgtcatagagtggtcccaggtgcacttcctcagggagatcatcgaggccatgttgaaagcctatcagcagaagctctttgtgactcacacagttgacgaattgctctggggctacaaagatgaaatcttgtcccttatccatgttttcaggcccgatatctctccctattttggcctattctatgagaaaaatgggactaatgatggagactatgtttttctaactggagaagacagttaccttaactttacaaaaattgtggaatggaatgggaaaacgtcacttgactggtggataacagacaagtgcaatatgattaatggaacagatggagattcttttcacccactaataaccaaagatgaggtcctttatgtcttcccatctgacttttgcaggtcagtgtatattactttcagtgactatgagagtgtacagggactgcctgcctttcggtataaagttcctgcagaaatattagccaatacgtcagacaatgccggcttctgtatacctgagggaaactgcctgggctcaggagttctgaatgtcagcatctgcaagaatggtgcacccatcattatgtctttcccacacttttaccaagcagatgagaggtttgtttctgccatagaaggcatgcacccaaatcaggaagaccatgagacatttgtggacattaatcctttgactggaataatcctaaaagcagccaagaggttccaaatcaacatttatgtcaaaaaattagatgactttgttgaaacgggagacattagaaccatggttttcccagtgatgtacctcaatgagagtgttcacattgataaagagacggcgagtcgactgaagtctatgattaacactactttgatcatcaccaacataccctacatcatcatggcgctgggtgtgttctttggtttggtttttacctggcttgcatgcaaaggacagggatccatggatgagggaacagcggatgaaagagcacccctcattcgaacctaaacattgcctttgcttggtgaagaaactgtgtgagctgtcctgacctggacgatgacgtggggaaaccctccacctccttgcaggcttgttgcctgttgaaagaaggaaaaagacacggcgctggcaagtgataggaacattctggccagaggttaaagagcaggctgacatggctggccattaagctttataaaatcatgtgggctctgaaattgttcttttatgtgtctagcaagtatttaataaacccttgtatagtaattttgttgttgttgggtgctggtagctccagaattttgtgaccactattgtgggtaaaatgtctctgcatcacttgttaatgctactggtctaacttcattcagtatgcttcattcaccgaactttgtgctcaaaatgcgtatataccattttatgttgtattcctccatttcacttgcaaaacagaagtaaataagagttcgggacccagggtaaaatggtagcttcatccaatatatcattcaaatgcatctgatttctaaaacatattacattttatgctgatcttcagttcataattcttccaggaaaactcagtcttccaactgcaataaaatactgggtagaatcaaatgggaaaggggttgggtggggcaatacccatgagttgatagtgataagctcctaaggatttttaacttgtacttttgtgaacgaagagaatgcataaataatgttggtgaggataaagtacagatatttcatgtagaattaattgctagttatgatgcttgtggatagttaactgttttttttttagtcaaaatgatcatgctacgaaaagatgcttctgagagaatgtaatgagtaactgatttttcttcctgagtcgcccttgccaaatatgttactgtattaattaatctaatattgagtgattatttgtaaaattatgaatatgggaaatccatctatctacagcctaagttacacataagtttcagaaagtctgattagactaaagagatatttcttctgggacagccgccttcttggtaattttgaagttctttttacaagttccttcctcagtttcagttctttccagtgttttgtagctcactgtcactcactgaatagagaaacgtgtgccctatacttcctgtgacaatcattttgctgacagaatgatggatgtttaaaatattgcacaaagtactttaaagaaaggtctgttaggaccagaagcagagacaccacttttcaaaggacttcttggtttcagcataacctaagacagggaattgggagccatcatatgtcacagtgttcagaattcaagcatatttaagggcattttctttgattctcaaagttcagcattcattttgaattgagaagcctatacatttagctgacaaagtgcttatagaatttcttaacaactgaaccattcaaaaggattttttttgtttaaaactggatttcaatgtaagcaaatgaagaaaaaaatatagatttcatttccatagcttcttatccctgtattgaggtaataaattgttttactgacaatttttcctttttctacactaaaacaatatgtgatatatttcccctcttgaagaggcaattcattaaactctcaaattttctatagaatcaagatagaacctttagatactccaactcaccaaaatgtaaaaaaactaacaaaaatatttggtcttcaataatgctaaatatctacatttttagaatttatcaacatttaactagataattgggcatgtcttaattatgcatgtacttatccatactaataaaattgacaatgctagtgcatacttattggtttagtcctattatcaggatataatcatctgtgaggaggatattttaaatactgtaaatgataacagttaatgatatacacatttagactgagttgcacactggcagggagaccaaaaacattacttccatacttgtgtcatgattcttttttttttgagagagtctcactctgtcgccaggctggagtacagtggcatgatctcggctcactgcaacctctgcctcccgggttcaagcaattctcctgcctcagccacccaagtagctgggactacaggtgcgtgccaccacgcccagctaaattttgtatttttagtggagacggggtttcaccatgttggccaggatggtctcaatctcctgaccctgcgatctgcccacctcagcctcccaaagtgctgggattacaggcgtaagccaccgggcctggcctgttttatgattcttaatagttacttggtttaaatcacatttgatactatccttctgaaaagtctgagacagatctacaaactacagtcaaaattatagattaagaggaatgaatgcacctatttggctttaagttgaagatgaattatttctcatgctcattttcttgcggcagttatcttagaaagacccccaaaggctttgtgattgtaagcactgtcatgatcacagaatgcaagcttctggtaccatgatcctcaacttagagaggaagaaaccaagacagagagcttaactcacttctctcagggaaaattaggagttgagcacaggacaggaaatgggctttgccacttttagctccaggcttttctaaccagacttgatttcctcatgttctagaaagatcactaatggtcaagtggaacaagcactacacgactaacccctattggggtttttaacttaagggaggctaatttttaatttaaactgctcgagatatgagttctgcaaaaggtggtccgcatccttggccctctggacattatcactaaattgcttgtgcctgttaacaagaatactgaccagaatgctcttcatgtagcttatacagttggttcacttcatgcggttcttgacatgtttatttctacccttaatgcaatgaaatgtttcattaataaaaaaccactttatataaaattgctctag

SEQ ID NO: 1784 - protein, 478 aa, Homosapiens; identical to SEQ ID NO: 165

SEQ ID NO: 1785 - DNA, 2079 bp, Homosapiens
ggcctccgcccccgcccgcctccccgcgcagtcgccggcggttgcctcgcggggttgcggcgagcccggcccgcgaacgtcacgtccctgcgcgctccctgcactctcccgagctgcgctaggcgggcgccacggctgcccggcgaaggaaaccgaaaccgagtccgggcccgtccctccgcggccccatccgcccggtgcacccggggccgcgctcgccaggccgcggagcccagagctgcgcgcacgaaccgtgcgccgggagggcgtgggcgtggcgccgaagggtcccgggtcttcgacgcctctgcggcggctcctccctccttgcagttggatccctggcgggtgcggcccggcccggcccgtgagcggcgcacagaatgggccgatgctgcttctacacggcggggacgttgtccctgctcctgctggtgaccagcgtcacgctgctggtggcccgggtcttccagaaggctgtagaccagagtatcgagaagaaaattgtgttaaggaatggtactgaggcatttgactcctgggagaagccccctctgcctgtgtatactcagttctatttcttcaatgtcaccaatccagaggagatcctcagaggggagacccctcgggtggaagaagtggggccatacacctacagggaactcagaaacaaagcaaatattcaatttggagataatggaacaacaatatctgctgttagcaacaaggcctatgtttttgaacgagaccaatctgttggagaccctaaaattgacttaattagaacattaaatattcctgtattgactgtcatagagtggtcccaggtgcacttcctcagggagatcatcgaggccatgttgaaagcctatcagcagaagctctttgtgactcacacagttgacgaattgctctggggctacaaagatgaaatcttgtcccttatccatgttttcaggcccgatatctctccctattttggcctattctatgagaaaaatgggactaatgatggagactatgtttttctaactggagaagacagttaccttaactttacaaaaattgtggaatggaatgggaaaacgtcacttgactggtggataacagacaagtgcaatatgattaatggaacagatggagattcttttcacccactaataaccaaagatgaggtcctttatgtcttcccatctgacttttgcaggtcagtgtatattactttcagtgactatgagagtgtacagggactgcctgcctttcggtataaagttcctgcagaaatattagccaatacgtcagacaatgccggcttctgtatacctgagggaaactgcctgggctcaggagttctgaatgtcagcatctgcaagaatggtgcacccatcattatgtctttcccacacttttaccaagcagatgagaggtttgtttctgccatagaaggcatgcacccaaatcaggaagaccatgagacatttgtggacattaatcctttgactggaataatcctaaaagcagccaagaggttccaaatcaacatttatgtcaaaaaattagatgactttgttgaaacgggagacattagaaccatggttttcccagtgatgtacctcaatgagagtgttcacattgataaagagacggcgagtcgactgaagtctatgattaacactactttgatcatcaccaacataccctacatcatcatggcgctgggtgtgttctttggtttggtttttacctggcttgcatgcaaaggacagggatccatggatgagggaacagcggatgaaagagcacccctcattcgaacctaaacattgcctttgcttggtgaagaaactgtgtgagctgtcctgacctggacgatgacgtggggaaaccctccacctccttgcaggcttgttgcctgttgaaagaaggaaaaagacacggcgctggcaagtgataggaacattctggccagaggttaaagagcaggctgacatggctggccattaagctttataaaatcatgtgggctctgaaattgttcttttatgtgtctagcaagtatttaataaacccttgtatagt

SEQ ID NO: 1786 - protein, 478 aa, Homosapiens; identical to SEQ ID NO: 165

SEQ ID NO: 1787 - DNA, 232 bp, Homosapiens
aggaattcaactgtacttcactgaagggctgtcagctggcttattaggataaattctgggattttatgctgggcatagtgatttcgtgcttattttactgctggaccaaatgggaagcaaaggaagtgtgtcaaagaaggtggagggttagaaggtaccatcatctgagtaaaattagctgaatttccctgacttccatattcttccattatttctcttatcccctgccagt

SEQ ID NO: 1788 - protein, 38 aa, Homosapiens
MLGIVISCLFYCWTKWEAKEVCQRRWRVRRYHHLSKIS

SEQ ID NO: 1789 - DNA, 4668 bp, Homosapiens
caggaggggagaggggctgaaagttgggttgatcacaaatggccagtgatttaatcaatcatgcctatgtaatgtagcttccataaaaaaccaaaaggactgaatttggagagtttccagagaaccaaacatggggaggttcctggagagtagcgagcctgcagagggcatggaagttctgagctccttcccctacaccttgcccagtgcatctcttcatctgtatactttgtaatatcctttataataaaatgtaagtgtttccctgagtactctgggctgttctagcaaattaattgagcccaagcacagggggatgggaaccccaatttatagccattagttcagaagcacaggtaaaacagcctggggcttttgattggcataggaggtggaaggcagtctcaacctgtagaatctgatgctatgtccaagtagaaagtatcagaattgaattgaattggaggacactgcagaattattggtgcagagaaaacgccacacacttcttggtgaccagaagtctcagaagtcttagaagtcttctgtgtaagttgttacagtatgagagcacagaaaaaaatggtttgttttttctactggagaagatacaaagactcatctatttgtatgcatctatatgaatgcatttattttctcatctgtttttattttaaagtctagaagggatttaagaggtataaagagatacaatatacagacagtccttgacttatgatggttcaacttgaatgatgttttgacttcgcgattgtgtgaaagtgatgtatttggcatgcccctccaatgacgatagagttacatccagataaacccattgtaaattggaaagatactaagttgttgaatcaaaaacaaactttcaacttacgatgttttcaacttatgatgggtttactgggacataactccatcatcaccgaggcgcatttttacgtaccagtttcagccttcagcttgcttgcagtctacctgaggctacatgataatttcacaatctaaatgatgtcactcagaagtttctaattgaatgctaaagacatgtacggacatccacaggtgggtgagaaaaatccctgtgctgctatggttgggaaaggcctcagaggaggtgtgggtagcccagctggccaatgccttcctaacctgtgctcttaaattagctctgttcaatagaaatattacatgaaccacatgtgtaatttaagattttaagattttctagtagccacattttttaaaaagtagaaggaagcaggtaaaattaattttgataatatattttaattttacccattataactgaaatagcatcatttcaatatataatcaatataaaaaaaggttggcactgtttttgaaattctgtatatattttacacttacagcaaatctcaattccagttagccacagtttaagtactcagtagtcacatgtgactagtggctaccatgtcagacataataaccctagctggtttaggaagaaggaaagataagcaaagggaaagaaacaaaagtcactggaatttattgaacacctactatgtaccaggcagggctagggctagggctagtgtgaggcatttgatgaacaaaagatcagattctgtttttatttaaaattttgttcatcataaatttttggcataaattttggttttaataaatagtgcattaaactatttatcttgattactacttgtttaggcacctcttacatcactcacactgactctaggcccagccctggcaccaggcgctttctaagaactttctaatgcttcatttgggggctctaacttgaaccaaactgtgctgtatatcagaaacagagaccgggtgtggtagctcatgcctgtaatgccagcattttggaaggtcgaggcaggaggatcacttgagtccaggagttcaagaccagcctgggtagcatagtaagacctcatctctacaaaaaaataaaaagaaacaggagtgaactcctgtaatttactaagccttgggcattattttttaaaataaaatttcaatttaattcaatgtagaaacaagaagacattggtaaacaaattgaaattcaaactaaatctgtgaaccaaactgaaaattttgaaaatacttcaggaccaaaccataacccaggagagagttcatcggctttgattcccggtcaaggtgaccctcaactattgcacctccctaatcagggaagaaaagaaggaaaacaaagtttttgagaagactctatcctaggcctcgtttccttcccacattatagcttcgatctccagctttttaaggcttagtagctgcagtctctatataatgttatattgggaatgttatattgaaaatataacttggatgctgaaagaaaggaaaagtcttgcttattaaagtggtgtctattttcaaataaaacccttttctttcttttagggaactcagaaacaaagcaaatattcaatttggagataatggaacaacaatatctgctgttagcaacaaggcctatgtttttgaacgagaccaatctgttggagaccctaaaattgacttaattagaacattaaatattcctgtattggtaagtaggcattttaataccattaagttggattttggaagaaaggaaaaagctaagttaatgctctttatgattttacatttaggagccattaagttatgttgaaatatacatatataaaaagaaaaatacttcttttcttttctttaaagtacatcttggacttttttctaagatgtatcaaataaggtcttttcaaatgatgacaaaattcagattttaggatttgttttcataatttcttcctgggtgttcaggattagcaattgtgcaaataaatatgcccctaggattttttggtagctaataattttaaaaatgtttatttgccccttgttttcattcagaaattctagcaatgaaatttgtataccatttcttacttcagatttttatgttggattttatactctcaaaattcataaattgacaccagaaatcaatagactggcagcctactgtgatttcagtgggctctgtttataatggtaattctacctaataacgacacctattctacatctattctatactgagacccatgagactttctttttttttaaattaaattaatttatttattattaattttttttgagacagggtcttgctctgtcgcccaggctggagtgcagtcagtggctccatcacagctcactgaagcttctacctcctgggctccagggatcctcctgtgtcggccagggactccaggcgtgaaccactgttcctgggctggcccagtaaacattctaattcacctacaccaacccctgccgactctcccaccctaacccctaggtgaccgctccatatgcagctggacactgatgatggacccaggacctagacagtatgaggtccctgccacctagtcccaggggtgtaggtcgggtttataatgagcctctggccctgcttaggcggaaggtagcgccaccttgtggccaaagatgcccacatgtttacaagagcttttccccttttgtggtgtctggataactcagagcctgcaaatggtctctttgtaaatattacacttacaaaatgcagtactgggaaaggacagagaagaggctttgtcttccatatgcagccagaaaggagctcactgcctgatttttcagctatttaatctcaacctttacatttatatttccaaccccctttgctatggggtagtaggagagagtggatggaggtgctttggaggggatgctgctgtcttaatatacctctgctccgcagactgtcatagagtggtcccaggtgcacttcctcagggagatcatcgaggccatgttgaaagcctatcagcagaagctctttgtgactcacacagttgacgaattgctctggggctacaaagatgaaatcttgtcccttatccatgttttcaggcccgatatctctccctattttggcctattctatgaggtaagtagatttttcttttcagaacctctttttttagctgacagtgggttggggcaccccaagccagattaactttgagtttcttctagaaattgcctagagttaagttatcttatagagtgtgtgaaaaatggagtgttttttggaaagaaaaaaaacttgaggccgggtgcggtggctaatgcctgtaattccaggactttgggagaccgaggtgggtggatcatttgaggttaagactttgagaccagcctggccaacatggcaaaactctatctctactaaaaatacaaaaattagccagctgtggtgatgtacacctgtaatctcacctactcaggagactgaggcaggtaagttgcatgaacccaggaggcagaggttgcagtgagctgaaattacaccactgtactccagccagggtgacagagcaagactctgtctaaaaaagccaaaaaaaaaacaaaaacaaaaacaaaaacaaaaaccctggagtgcagtggatagttgggaagttggtaaaagataaaataaccccaggaagaggattagattaggggtgtgctctgggattgtgatgggtctcctcagctttaaatttgtagctgttttctggctct

SEQ ID NO: 1790 - protein, 71 aa, Homosapiens
MTIELHPDKPIVNWKDTKLLNQKQTFNLRCFQLMMGLLGHNSIITEAHFYVPVSAFSLLAVYLRLHDNFTI

SEQ ID NO: 1791 - DNA, 1144 bp, Homosapiens
ggcctccgcccccgcccgcctccccgcgcagtcgccggcggttgcctcgcggggttgcggcgagcccggcccgcgaacgtcacgtccctgcgcgctccctgcactctcccgagctgcgctaggcgggcgccacggctgcccggcgaaggaaaccgaaaccgagtccgggcccgtccctccgcggccccatccgcccggtgcacccggggccgcgctcgccaggccgcggagcccagagctgcgcgcacgaaccgtgcgccgggagggcgtgggcgtggcgccgaagggtcccgggtcttcgacgcctctgcggcggctcctccctccttgcagttggatccctggcgggtgcggcccggcccggcccgtgagcggcgcacagaatgggccgatgctgcttctacacggcggggacgttgtccctgctcctgctggtgaccagcgtcacgctgctggtggcccgggtcttccagaaggctgtagaccagagtatcgagaagaaaattgtgttaaggaatggtactgaggcatttgactcctgggagaagccccctctgcctgtgtatactcagttctatttcttcaatgtcaccaatccagaggagatcctcagaggggagacccctcgggtggaagaagtggggccatacacctacagggaactcagaaacaaagcaaatattcaatttggagataatggaacaacaatatctgctgttagcaacaaggcctatgtttttgaacgagaccaatctgttggagaccctaaaattgacttaattagaacattaaatattcctgtattgactgtcatagagtggtcccaggtgcacttcctcagggagatcatcgaggccatgttgaaagcctatcagcagaagctctttgtgactcacacagttgacgaattgctctggggctacaaagatgaaatcttgtcccttatccatgttttcaggcccgatatctctccctattttggcctattctatgaggtaagtagatttttcttttcagaacctctttttttagctgacagtgggttggggcaccccaagccagattaactttgagtttcttctagaaattgcctagagttaagttatcttatagagtgtgtgaaaaatggagtgttttttggaaa

SEQ ID NO: 1792 - protein, 227 aa, Homosapiens [sequence omitted]

SEQ ID NO: 1793 - DNA, 870 bp, Homosapiens
ggcctccgcccccgcccgcctccccgcgcagtcgccggcggttgcctcgcggggttgcggcgagcccggcccgcgaacgtcacgtccctgcgcgctccctgcactctcccgagctgcgctaggcgggcgccacggctgcccggcgaaggaaaccgaaaccgagtccgggcccgtccctccgcggccccatccgcccggtgcacccggggccgcgctcgccaggccgcggagcccagagctgcgcgcacgaaccgtgcgccgggagggcgtgggcgtggcgccgaagggtcccgggtcttcgacgcctctgcggcggctcctccctccttgcagttggatccctggcgggtgcggcccggcccggcccgtgagcggcgcacagaatgggccgatgctgcttctacacggcggggacgttgtccctgctcctgctggtgaccagcgtcacgctgctggtggcccgggtcttccagaaggctgtagaccagagtatcgagaagaaaattgtgttaaggaatggtactgaggcatttgactcctgggagaagccccctctgcctgtgtatactcagttctatttcttcaatgtcaccaatccagaggagatcctcagaggggagacccctcgggtggaagaagtggggccatacacctacagggaactcagaaacaaagcaaatattcaatttggagataatggaacaacaatatctgctgttagcaacaaggcctatgtttttgaacgagaccaatctgttggagacctggtcccaggtgcacttcctcagggagatcatcgaggccatgttgaaagcctatcagcagaagctctttgtgactcacacagttgacgaattgctctggggctac

SEQ ID NO: 1794 - protein, 155 aa, Homosapiens
MGRCCFYTAGTLSLLLLVTSVTLLVARVFQKAVDQSIEKKIVLRNGTEAFDSWEKPPLPVYTQFYFFNVTNPEEILRGETPRVEEVGPYTYRELRNKANIQFGDNGTTISAVSNKAYVFERDQSVGDLVPGALPQGDHRGHVESLSAEALCDSHS

SEQ ID NO: 1795 - DNA, 695 bp, Homosapiens
atcattagatttggctttggttagaggcatttgttagaggcattagctggtttcatcctacaggcgtttcttaggtacctgttaggagaggttgtctcatacagagagaggagcaccttgtgctaatgagaaagacttgggatcaagttctcactcttctgcctgtgctctgtgtccccagctgtgaagtggggcaatactacatgctgtatttgtactacatacttgtaaggattaaataaaataaaataatgtgggttaaactctttgaagagctatgcaagggtcagctatttataggattagtgggcatagcttggtgcttagtgtgatatgatgtgtgatatgtgtatatgtgataggaagtatgcttccttctatacacttgacagagtataggatatagacatgtgatatgatgaaatatatatttagtcttcctccatttcctggcatacagctcctaagatccttggaatcgcttaagtgataagtgtctttttgtatgctagtgaattgatgaaagttgggttgatcacaaatggccagtgatttaatcaatcatgcctatgtaatgtagcttccataaaaaaccaaaaggactgaatttggagagtttccagagaaccaaacatggggaggttcctggagagtagcgagcctgcagagggcatggaagttctgagctccttccc

SEQ ID NO: 1796 - protein, 38 aa, Homosapiens [sequence omitted]

SEQ ID NO: 1797 - DNA, 1624 bp, Homosapiens
agcgccctgcaccgcaggcccagcgctcgccccaccgaaattgccgaacctggttcacacactcatttactcattccgcagataggtctgagggcctcccatgggccacgcgctggggattcaaggtggctgggacattcccctgctctagaggcgctcgcaagttagcggggacaccgttaccgcaattacaacacaatgtagcaagtgcttctaccaggtgcctgctgagatcatgccagcaagcatgttctgcctggatgacctagggccccacattgaactggggcctgggggatgcataagtttgtcacgtaaggggcatgtgcaagaatggaagatgtgcaaaaaagggaggaggaggcatttcacggagaaggaaacggagtggaagcagcctgaggccctcatccaatgcagatgtctgtgccgtgcgtcttgtccagcctgcagaaccatgagccaaataaacctcttttcactacccaatctcagctcttatcaaaggtgctggaagtgcttgatcctgaccggaagctggaggacacatgggcttattgtcaggacaccaggaaaggaatgaaggaacccacgaagcttttaaaaaaacattctacccaagtctacctgggaccttccaagaagacgtctgtgtcaaacgcaggccaatggctttatgaagaaaagccacataaaatggatttgctccatgaaaatggtcctcgtcctggtcttcatgaaaatgtatgcaaagcagttagtgacttctgcaagtgggttactacttttggaatttcggacatcgatgaagagttcatcttgaaacagtttgacattgactatgagaccaaaccaagccatgatgcgctccacacgatgaagctaaatcaggttcctctggagctaaagcgtagtgtggggctcagtaaactgcaggagacagagttcttccagaaactaggctatgagaggaaactccagaaaccacagaatccttataagccaaagtgggtgaagatgaggtatggagcatggtatttgaaccccaagttgtggaaaaagcaaagagtagacgagcctctggttgaccctgaggtctcacataaggctcaagaggagaattttaaaaaggagctgcaggaacaggaggagttacttgcagaccttcacggaacagttgcctttaaggatttcattctaagcaggggctacaggacgccacgtttccttgagaatatgtatatcgggaaggaatgtaaacgtgcatgtaataagactcctataaaacgaactcaagcatagaagaatcgtaggagaatgattaggcagattttattactacgtacttggctatttctctgtctccttttaaagattaaacagagtttatgatgagtgtcccactgtggatgttcaactttgacttggcaacatctgtaaatgtaatacctgatggttataagcatttctcaatggatttctgcttcagttaatcaacattttgtatactttatcacccatgagatcaatattcacatgtaatcttctcatatttttgtggcacgtgaatattatataggtatatcaactattggtaaaaataaataaaggcataaataaaaac

SEQ ID NO: 1798 - protein, 295 aa, Homosapiens
MQMSVPCVLSSLQNHEPNKPLFTTQSQLLSKVLEVLDPDRKLEDTWAYCQDTRKGMKEPTKLLKKHSTQVYLGPSKKTSVSNAGQWLYEEKPHKMDLLHENGPRPGLHENVCKAVSDFCKWVTTFGISDIDEEFILKQFDIDYETKPSHDALHTMKLNQVPLELKRSVGLSKLQETEFFQKLGYERKLQKPQNPYKPKWVKMRYGAWYLNPKLWKKQRVDEPLVDPEVSHKAQEENFKKELQEQEELLADLHGTVAFKDFILSRGYRTPRFLENMYIGKECKRACNKTPIKRTQA

SEQ ID NO: 1799 - DNA, 3039 bp, Homosapiens
acggtggccgcgaagctagggccaccatggcggaccgcaggcggcggctccggccggggacgttggccccggtgcgcgagggcgtgaactgcaggtccagatgtttcacaaagcacaagaacgggctgaagttccccacctctctgcacagccggcagttggtatttccaagaaaggggctggacgacttcaggaagggctgcccgccttgcactggtctggtgactcaggtccctgtggagggctttctgccccagatttatcacagagctccccaactggccccaaagaagaggcagatcaagctgctcaaggaagcagacgtgctttccaagctctcgccagcccagcaggctcggaaggcattcctggaggacgtggaggcccacctgaccccacatcccttagcgctctacctgaatctggaagaagctatgcccatagagctcttatcaaaggtgctggaagtgcttgatcctgaccggaagctggaggacacatgggcttattgtcaggacaccaggaaaggaatgaaggaacccacgaagcttttaaaaaaacattctacccaagtctacctgggaccttccaagaagacgtctgtgtcaaacgcaggccaatggctttatgaagaaaagccacataaaatggatttgctccatgaaaatggtcctcgtcctggtcttcatgaaaatggaatttcggacatcgatgaagagttcatcttgaaacagtttgacattgactatgagaccaaaccaagccatgatgcgctccacacgatgaagctaaatcaggttcctctggagctaaagcgtagtgtggggctcagtaaactgcaggagacagagttcttccagaaactaggctatgagaggaaactccagaaaccacagaatccttataagccaaagtgggtgaagatgaggtatggagcatggtatttgaaccccaagttgtggaaaaagcaaagagtagacgagcctctggttgaccctgaggtctcacataaggctcaagaggagaattttaaaaaggagctgcaggaacagagcatcttcaagaaagcaatggacatttgatttctaagaccaaagaccttggtaaactgcaagcagcatcatggagattgcagaatccttccagggaagtctgtgacaattcaagagaacatgttccttctggacagtttccagacacagaagctccagctacctctgagaccagtaactctaggagttactctgaagtttcaagaaatgaaagccttgaatctcctatgggagaatggggattccaaaaaggacaagagatatctgctaaagcagctacatgttttgcagagaagttgccttctagcaacctgctcaagaacagagctaaagaagaaatgagcctctctgatttgaacagtcaggaccgggttgaccacgaggagtgggaaatggtgcctaggcactcatcttggggggatgttggtgtgggtggcagtcttaaggctccagtgttaaacctaaaccagggaatggacaatggaagaagcactttggtggaagcaagaggtcagcaagtgcatgggaaaatggaaagggtagcagtgatgcctgcagggtctcagcaagttagtgtcaggttccaggtccattatgtcacaagcactgatgtgcaattcattgcagtaactggagaccatgagtgtcttgggagatggaacacttacatcccactccactataacaaggatgggttctggtctcattccattttcctgcctgcagatacagtggtggagtggaagtttgtgttggtagagaatgggggagttacccgctgggaagaatgcagcaatagattcctagaaactggccatgaggataaagtggttcacgcatggtgggggattcactgattcagtttgcaaagtaatggagaagctgtagaacaatgtggaagaggctgaggttgtggaacacactgaataaaataaaggcagtgtgactccaaattcagccatctgaattgtttaaatttgctagtggattttgtctaatgtgcagaaatatatatgtctaatgtgcagaaatatatatgtgtgtatgtgtgtatatatatgcacacacacacagataatgcttccagtgaatgtgaacttcttttccctgtggcactgattgacagacttgtgctgatccattattactttagggcttgattctcttggggagtgacttggctaagcttcaggtgtaaactgtggtcacggagcaaaaacattaaccagctgcccagggttcaagcttgagcctttaggtgatctttaaactatggtagtaaaataagcctcactcaaacatagctgacttcctattggtacagcttgaaaagcactttttactacatacacattttatgcttaaaaagttaacatgatacgaaactgtgattagaaaatatctggtctggatgtgattagtaaggatacaagataatgttctaagactgcctaatgctttttgtttgattttcatctgccaggcgttgttatgtgctatgagggtagcaagtacgtctttgtcttaatgatctaaggctggtgtagaaacaaagggcctaatgagaaccaatcatcatggaagtcagttgcgggggcagcccataaggaaagggaaagtgagtggggttgggcataggctgagtgaggtggcctgaatgacacctcttagaggactgtgaagtacaggcacagcccgactgcagggagggatgcacccatcatttacccatgggagcatctgtaggaccatctctctcccacttcttctcccctcccccaccgcatctggccagatggactgtcctacagcaatcgtttccatctgtcaccctcttccctctcctttcataccagtcactatcttgggtaacaaatttatacaggacagtggtacagaaatacatctttgctctgagaatacagcaaatattaacttaaattattataactgaacaaataataaaacctgaattttaatatcttca

SEQ ID NO: 1800 - protein, 351 aa, Homosapiens
MADRRRRLRPGTLAPVREGVNCRSRCFTKHKNGLKFPTSLHSRQLVFPRKGLDDFRKGCPPCTGLVTQVPVEGFLPQIYHRAPQLAPKKRQIKLLKEADVLSKLSPAQQARKAFLEDVEAHLTPHPLALYLNLEEAMPIELLSKVLEVLDPDRKLEDTWAYCQDTRKGMKEPTKLLKKHSTQVYLGPSKKTSVSNAGQWLYEEKPHKMDLLHENGPRPGLHENGISDIDEEFILKQFDIDYETKPSHDALHTMKLNQVPLELKRSVGLSKLQETEFFQKLGYERKLQKPQNPYKPKWVKMRYGAWYLNPKLWKKQRVDEPLVDPEVSHKAQEENFKKELQEQSIFKKAMDI

SEQ ID NO: 1801 - DNA, 523 bp, Homosapiens
ttccaagaagacgtctgtgtcaaacgcaggccaatggctttatgaagaaaagccacataaaatggatttgctccatgaaaatggtcctcgtcctggtcttcatgaaaatgtatgcaaagcagttagtgacttctgcaagtgggttactacttttggaatttcggacatcgatgaagagttcatcttgaaacagtttgacattgactatgagaccaaaccaagccatgatgcgctccacacgatgaagctaaatcaggttcctctggagctaaagcgtagtgtggggctcagtaaactgcaggagacagagttcttccagaaactaggctatgagaggaaactccagaaaccacaggtaattgcagaaggggaccagaccgaaaatcaaagaaaattaagttgtattgaagtcttaaagttcttgaattctgatgtgtcatgggtactggttttttaaagtagaattctggaatttttttcatgattaatatttgttaaataaatgcatgtttaatacctataa

SEQ ID NO: 1802 - protein, 131 aa, Homosapiens
MDLLHENGPRPGLHENVCKAVSDFCKWVTTFGISDIDEEFILKQFDIDYETKPSHDALHTMKLNQVPLELKRSVGLSKLQETEFFQKLGYERKLQKPQVIAEGDQTENQRKLSCIEVLKFLNSDVSWVLVF

SEQ ID NO: 1803 - DNA, 1550 bp, Homosapiens
aatttcttagtatggtttttggaaagcctaggtttatgtgaatttaatatataacataaagctattccagttgcacttttattataaaaggtaacatcattttttctcaaattaaatatttaaaaagaaaaatagctacaaacttttgctttaaggtatctagagttctctttttaaaagcatattcttaattactaattcttaaagacttcaaaagttttacaaaacatatttcattttgatgacaaatgctataaagatgtttgccaaaatggttacagtgagctaataaagtagcattatttaaatataattgatataactcgtatagtaaaagattgtttatcaggcagtttagacacagggaggatgcataacaatggaattgttctacaataatttttataaatcacacctttttaatacctgaggaatgatttacattatcgactataggtggcaccaccaggctgtggcaccccagtttacaagacgcaggcactgtggggtactggtaagagacagtaactatgacaacatgactgtctttctgggaactcgtgagttttgactattcttgatagatttggtttggaaggtgaaatggttttaaagtactgaattgaaattatgtaaacttatgcatccaatttttaaattaaaataaatgtaaagaaaaactaaaaagatgcataaatattgtagatgttgggactgatcaaatcatatttgattgtcctgtcctttgaagttaagatctatgatttgtggacatactgttaatcttaactaggttagattccagacatcataggtcaataattgtctaattgctaaaatgtgttgcccatccttaatatggggataaggaaaaggctaggggaaggagagaaagctggacatctttaaaagccttcatattcatcaactcatgaacattacacacatattcaaaaacaagaaggatatgggttaaaatgagatactttataaggaactaaatgcttttaatgagaacaaatatgaaatcaagcttctgatggctgacccctttcttcaaatgtgggtactcttttaggaggagttacttgcagaccttcacggaacagttgcctttaaggatttcattctaagcaggggctacaggacgccacgtttccttgagaatatgtatatcgggaaggaatgtaaacgtgcatgtaataagactcctataaaacgaactcaagcatagaagaatcgtaggagaatgattaggcagattttattactacgtacttggctatttctctgtctccttttaaagattaaacagagtttatgatgagtgtcccactgtggatgttcaactttgacttggcaacatctgtaaatgtaatacctgatggttataagcatttctcaatggatttctgcttcagttaatcaacattttgtatactttatcacccatgagatcaatattcacatgtaatcttctcatatttttgtggcacgtgaatattatataggtatatcaactattggtaaaaataaataaaggcataaat

SEQ ID NO: 1804 - protein, 45 aa, Homosapiens
MIYIIDYRWHHQAVAPQFTRRRHCGVLVRDSNYDNMTVFLGTREF

SEQ ID NO: 1805 - DNA, 1153 bp, Homosapiens
actccctcactggctgccattgaaagagtccacttctcagtgactcctagctgggcactggatgcagttgaggattgctggtcaatatgattcttcttgctgtgctttttctctgcttcatttcctcatattcagcttctgttaaaggtcacacaactggtctctcattaaataatgaccggctgtacaagctcacgtactccactgaagttcttcttgatcggggcaaaggaaaactgcaagacagcgtgggctaccgcatttcctccaacgtggatgtggccttactatggaggaatcctgatggtgatgatgaccagttgatccaaataacgatgaaggatgtaaatgttgaaaatgtgaatcagcagagaggagagaagagcatcttcaaaggaaaaagcccatctaaaataatgggaaaggaaaacttggaagctctgcaaagacctacgctccttcatctaatccatggaaaggtaaaggggcgtttagattccacaactttttctccaacttcatatttttcttcccttcagtagatattattttgaggtaatcacattgtaactacttttatggtaaatggaatttcttcaagaactaaagaacagaggttgtaaattaaatgtttccaaactgaatcaatgccctgagttcccttacatttactagccaatttgtttcctatttttctggaaatctttatagtggaatgaagtatttatttattgatgaaaggcattattaaaaggtaaatttctcatcaaattataagggattacaaacgtaatgtaacaaagcaagtcatcaaagcatgattggatgaattcaggaaaggagacaaattatgagactgaaatgatccaactgagattagtaatattgatttgttatgagattatcgatatctggctaaagtacaaggttaaagattttaaaagggtatgacaagtctaaagtagagtttttttaaagcctttagaaattattttaaaactatgacatggaaaagccttttatatattaaaataatgattgaacactttataatatatatttgaaaatctgttttaaaaattctatgtgtgcattacttatggcttgattctagtcaattgaaatggtctaaataaatttggaattgagaaac

SEQ ID NO: 1806 - protein, 151 aa, Homosapiens
MILLAVLFLCFISSYSASVKGHTTGLSLNNDRLYKLTYSTEVLLDRGKGKLQDSVGYRISSNVDVALLWRNPDGDDDQLIQITMKDVNVENVNQQRGEKSIFKGKSPSKIMGKENLEALQRPTLLHLIHGKVKGRLDSTTFSPTSYFSSLQ

SEQ ID NO: 1807 - DNA, 3920 bp, Homosapiens
actccctcactggctgccattgaaagagtccacttctcagtgactcctagctgggcactggatgcagttgaggattgctggtcaatatgattcttcttgctgtgctttttctctgcttcatttcctcatattcagcttctgttaaaggtcacacaactggtctctcattaaataatgaccggctgtacaagctcacgtactccactgaagttcttcttgatcggggcaaaggaaaactgcaagacagcgtgggctaccgcatttcctccaacgtggatgtggccttactatggaggaatcctgatggtgatgatgaccagttgatccaaataacgatgaaggatgtaaatgttgaaaatgtgaatcagcagagaggagagaagagcatcttcaaaggaaaaagcccatctaaaataatgggaaaggaaaacttggaagctctgcaaagacctacgctccttcatctaatccatggaaaggtcaaagagttctactcatatcaaaatgaggcagtggccatagaaaatatcaagagaggtctggctagcctatttcagacacagttaagctctggaaccaccaatgaggtagatatctctggaaattgtaaagtgacctaccaggctcatcaagacaaagtgatcaaaattaaggccttggattcatgcaaaatagcgaggtctggatttacgaccccaaatcaggtcttgggtgtcagttcaaaagctacatctgtcaccacctataagatagaagacagctttgttatagctgtgcttgctgaagaaacacacaattttggactgaatttcctacaaaccattaaggggaaaatagtatcgaagcagaaattagagctgaagacaaccgaagcaggcccaagattgatgtctggaaagcaggctgcagccataatcaaagcagttgattcaaagtacacggccattcccattgtggggcaggtcttccagagccactgtaaaggatgtccttctctctcggagctctggcggtccaccaggaaatacctgcagcctgacaacctttccaaggctgaggctgtcagaaacttcctggccttcattcagcacctcaggactgcgaagaaagaagagatccttcaaatactaaagatggaaaataaggaagtattacctcagctggtggatgctgtcacctctgctcagacctcagactcattagaagccattttggactttttggatttcaaaagtgacagcagcattatcctccaggagaggtttctctatgcctgtggatttgcttctcatcccaatgaagaactcctgagagccctcattagtaagttcaaaggttctattggtagcagtgacatcagagaaactgttatgatcatcactgggacacttgtcagaaagttgtgtcagaatgaaggctgcaaactcaaagcagtagtggaagctaagaagttaatcctgggaggacttgaaaaagcagagaaaaaagaggacaccaggatgtatctgctggctttgaagaatgccctgcttccagaaggcatcccaagtcttctgaagtatgcagaagcaggagaagggcccatcagccacctggctaccactgctctccagagatatgatctccctttcataactgatgaggtgaagaagaccttaaacagaatataccaccaaaaccgtaaagttcatgaaaagactgtgcgcactgctgcagctgctatcattttaaataacaatccatcctacatggacgtcaagaacatcctgctgtctattggggagcttccccaagaaatgaataaatacatgctcgccattgttcaagacatcctacgttttgaaatgcctgcaagcaaaattgtccgtcgagttctgaaggaaatggtcgctcacaattatgaccgtttctccaggagtggatcttcttctgcctacactggctacatagaacgtagtccccgttcggcatctacttacagcctagacattctctactcgggttctggcattctaaggagaagtaacctgaacatctttcagtacattgggaaggctggtcttcacggtagccaggtggttattgaagcccaaggactggaagccttaatcgcagccacccctgacgagggggaggagaaccttgactcctatgctggtatgtcagccatcctctttgatgttcagctcagacctgtcacctttttcaacggatacagtgatttgatgtccaaaatgctgtcagcatctggcgaccctatcagtgtggtgaaaggacttattctgctaatagatcattctcaggaacttcagttacaatctggactaaaagccaatatagaggtccagggtggtctagctattgatatttcaggtgcaatggagtttagcttgtggtatcgtgagtctaaaacccgagtgaaaaatagggtgactgtggtaataaccactgacatcacagtggactcctcttttgtgaaagctggcctggaaaccagtacagaaacagaagcaggcttggagtttatctccacagtgcagttttctcagtacccattcttagtttgcatgcagatggacaaggatgaagctccattcaggcaatttgagaaaaagtacgaaaggctgtccacaggcagaggttatgtctctcagaaaagaaaagaaagcgtattagcaggatgtgaattcccgctccatcaagagaactcagagatgtgcaaagtggtgtttgcccctcagccggatagtacttccagcggatggttttgaaactgacctgtgatattttacttgaatttgtctccccgaaagggacacaatgtggcatgactaagtacttgctctctgagagcacagcgtttacatatttacctgtatttaagatttttgtaaaaagctacaaaaaactgcagtttgatcaaatttgggtatatgcagtatgctacccacagcgtcattttgaatcatcatgtgacgctttcaacaacgttcttagtttacttatacctctctcaaatctcatttggtacagtcagaatagttattctctaagaggaaactagtgtttgttaaaaacaaaaataaaaacaaaaccacacaaggagaacccaattttgtttcaacaatttttgatcaatgtatatgaagctcttgataggacttccttaagcatgacgggaaaaccaaacacgttccctaatcaggaaaaaaaaaaaaaaaaaaagtaagacacaaacaaaccattttttttctctttttttggagttgggggcccagggagaagggacaagacttttaaaagacttgttagccaacttcaagaattaatatttatgtctctgttattgttagttttaagccttaaggtagaaggcacatagaaataacatctcatctttctgctgaccattttagtgaggttgttccaaagacattcaggtctctacctccagccctgcaaaaatattggacctagcacagaggaatcaggaaaattaatttcagaaactccatttgatttttcttttgctgtgtctttttgagactgtaatatggtacactgtcctctaagggacatcctcattttatctcacctttttgggggtgagagctctagttcatttaactgtactctgcacaatagctaggatgactaagagaacattgcttcaagaaactggtggatttggatttccaaaatatgaaataaggaaaaaaatgtttttatttgtatgaattaaaagatccatgttgaacatttgcaaatatttattaataaacagatgtggtgataaacccaaaacaaatgacaggtccttattttccactaaacacagacacatgaaatgaaagtttagctagcccactatttgttgtaaattgaaaacgaagtgtgataaaataaatatgtagaaatca

SEQ ID NO: 1808 - protein, 894 aa, Homosapiens
MILLAVLFLCFISSYSASVKGHTTGLSLNNDRLYKLTYSTEVLLDRGKGKLQDSVGYRISSNVDVALLWRNPDGDDDQLIQITMKDVNVENVNQQRGEKSIFKGKSPSKIMGKENLEALQRPTLLHLIHGKVKEFYSYQNEAVAIENIKRGLASLFQTQLSSGTTNEVDISGNCKVTYQAHQDKVIKIKALDSCKIARSGFTTPNQVLGVSSKATSVTTYKIEDSFVIAVLAEETHNFGLNFLQTIKGKIVSKQKLELKTTEAGPRLMSGKQAAAIIKAVDSKYTAIPIVGQVFQSHCKGCPSLSELWRSTRKYLQPDNLSKAEAVRNFLAFIQHLRTAKKEEILQILKMENKEVLPQLVDAVTSAQTSDSLEAILDFLDFKSDSSIILQERFLYACGFASHPNEELLRALISKFKGSIGSSDIRETVMIITGTLVRKLCQNEGCKLKAVVEAKKLILGGLEKAEKKEDTRMYLLALKNALLPEGIPSLLKYAEAGEGPISHLATTALQRYDLPFITDEVKKTLNRIYHQNRKVHEKTVRTAAAAIILNNNPSYMDVKNILLSIGELPQEMNKYMLAIVQDILRFEMPASKIVRRVLKEMVAHNYDRFSRSGSSSAYTGYIERSPRSASTYSLDILYSGSGILRRSNLNIFQYIGKAGLHGSQVVIEAQGLEALIAATPDEGEENLDSYAGMSAILFDVQLRPVTFFNGYSDLMSKMLSASGDPISVVKGLILLIDHSQELQLQSGLKANIEVQGGLAIDISGAMEFSLWYRESKTRVKNRVTVVITTDITVDSSFVKAGLETSTETEAGLEFISTVQFSQYPFLVCMQMDKDEAPFRQFEKKYERLSTGRGYVSQKRKESVLAGCEFPLHQENSEMCKVVFAPQPDSTSSGWF

SEQ ID NO: 1809 - DNA, 8192 bp, Homosapiens
atggggcatgccagtgggtcacatttcctctctgaatctccctccaagccgcactgtactcttgaagggaaagggacaaggcttcacaagaaacagcacatgctttcctttcatttctggaagtcccggggtcaacctacagatgctgcttcttccgtggccgatggcattcagactcctcgctgctgccgacggtgccaggcaaacaactggacaggacagctcagctacagaacactggccacagtctcggccggagcagcagccccccagccacagaccacctccaccgcctcatccaggagccttcccacctccctcaggcttgctgcggccccgccacaggggctgaagaactgggaggtggtggcagcagtggcagcagtgcctacagccttggggccagtccagatacgtgggaccctgcttcgggcaactctgcagcccctccggggccagagacggacccaagacttccccagcgatcaccattgtctcttcctgtcgctgaaacctgggcaagggctcataatggaagctgcccctcctgagctgaattcgaaagcaagacaggcggaggtgggggacggggtgagcagtgctcaagacagccaggagctcaagcagcagctgtggccacttcccaagccttcagcctcctcccagcgagaagcgaaatatgtggacatgtgtgcttcagctgaagtccagagggagagtccccagaccatgaaacttaccctggggcactgccctgggggtcagagggcctctaggagcccaaaggagaaagcccaagatgaacccagcagcaagactccaagcccccagaacaatcctgcctcctcccaactctctagatcccagcactctgcctctgaagagggtggcaatttctcatcttcctcatcctcctccccgatgaacaaagcagaagaggatggcctttccaaaatggaggactccaccacatccacaggggctctggccacctcctcttcatccttaggcttcgagagtgagagtggtgaaagtgaaggttgccaggccggcagcagggacccccccaaagtcgaagaggctcactacatcaccacccatgagatccagctgagtgaggtggaacaggacatggatttcgacgtgggactggcctcccgctgggatttcgaggacaacaacgtgatctactcgttcgtggattatgcttcctttggtggcagcgacgagaccccaggggacatcaccagtctgaccgaagaggacgacgacaacagctgctacctcagcaccactcccagcaccaacaccacccggacgcccagccctacaagcagcgacctggcccgccccaatgcaggccgcagtggccgcgacaccagcagcaccgaagtgggcagtggcccctctgacagtggccccactcccccacccactgggcctggcactgcccccctgactgagcccttgcctgagaccccggaggcagcttcaggggcagcagccgccgccgcaagcagctgtgggagtgcagcaagccagatcctcctatcaatcaaaccggcttcccgggctataaatgagcctagcaacgtgcgtgcaaagcaaaacattatttatgctgccaagcatgaaggcgacatgagcctccgcgtctctacagctgctgaacacaattcaagttcgctgaagcaaaacccggctgcagcagtggctcaggaccatgcaaagaaattcattgctgtacctgctcgcctgcaaaccaggtgcggggccatccgggcgaaggagctggtggactactccagcggagcctccagtgccgtgagcgaactggacgatgcggacaaagaggtgcgtaacctgacctcccgggccttccggagcctggcttacccctactttgaggctctgaacatcagctcccgggagtcctccaccacgctctccgaagtgggctttgggcgctggtcaactttcctggacttaaaatgtgggggtgttggggccagggtggagcagagcctcctcaggagcagcgcggcctctgtggctgcaggtctgaggaagggcagtggggcccgggccactgccgaccagctctacatccagtccaagaagtctcagaccaaggccttggagttcgtggtcagcaaagtcgagggggaaatcaaacatgtggagacgcccctgtgtttccagaagcaggtccagacgggctcccgcgtcgtcacccttttggagcccctgaatgtacgcagtgagagcaaagccagctcggcccctgggcccggcagggccaccaaaggccccggcaagggtcccgggtcggcatacacggacgacggctccgagacctccgagggcagcaagcccacctcccgcgccgatggcccccagaagtccaagttcgcctccagtctgctcaaaaatgtcatttccaagaagatgcagcgggaacacgagttcaaaatggagaggggagaagtcatggatacatcccaccacctctcaggcacctccaaggagacggagggcgcccgcgggagcgagaggcagcgagagaggggcctgcagaggcagagctctcgtcactccgaggccggctccgagtacacagtggtcagcatgtccgacgcgggcggggaggggtccgtggcgggctccaaatctccagtcttcaaagccagtactcctcgcgagcgcaacgcaggccctggccggaatttcaccgatggacacacagaagtgtgtgaaattaaaaagagtgcctcagagaccgtcaagggcatcttcctccgtagtcagaacagtgcgttccggtcatggaaggagaaagaggccgagaagagggaggaacaagcccctatagggaagctgaagctgcccaaaggaggcgactggcgggctgatctcggggagatttctgccagcaagaacaccatcatgtctcgcctctttgtccccaacatccagcagacacccaaggacaagcagccgaggaagcaggccaccaagtaccctgctgctcaggccacctccacagcggtgatcagacccaaggctcccgaaatcaagatccggctggggagtgtgcagcagccgagctcagacttcaacattgccaagttgctcacgcccaagctggccggtggcagcgcctctaacctgttcaagaccatcgaggacaacagcagggcacagcagaaactcttccgcggggacaacctagaaaaagtgccccatttccaggtgagagacatcagagacaagtccaaggctcaaggccccctccaccaggtgagagatgtcaggaaactaattaaagggtcaggggatagtagtgacaagggcagtgttaccccagagcaggggctgactggacccaaacccaggcagctgtctgcagcagctggcggatctggatccctgtcccccatggtgattacatgccaggctgtagtgaaccagagggaagacagcatggaccgagagcccagggaaagcatgggcaaagggggcggcagcagagtcttgaattcttcctccccagaagggacagtcttggttcacagggcatctggcaggctgcctgtggctaccattgcccccaataagcccgagcagggctcatacctgcctgtgctcaagattgtctccaaggcttccacccagaagaccccagagaagctcaaggaggaggaggtcaaggaggaagggaaagccacgaagccagcccggaatgccctggagaagctgactgcagccgtgaggtccatggaagagctgtacagcttcaacaggaacgagtggaagcgcaaaagcgaccccttgcctatgatgatggacagccacgtgctgtcgctcattgccagtgaggagagggaaggggtagtggttgctgatggagaccacgacaagctgtccaaacggctgggtgaggtggaagagcggggcacaggaaacaaagctggtgtggtcctgcgaggggcccccatagaacgtctgcagcggagaaactccaaccccagcgctgagagtgtgtctgccagggcagcggcctttgagaacctggccagggaaagaccccgatctctctatattcccccagtccacaaggatgtagagagaacccaacccctgcagcccctcccaccactccccagcaaccggaacgtgttcacagtgagtgccagcagcatccagaaaactgggggtgtcgctggcaagttcccacaagggccttctccggagagtccttcagcagctaagggcatcaagtcgcagggactccggtccctcaagatctctccagccacccgggcacctcctgatgaggtgaccaacaggaaaagtggcagcaatttggagaagagcaacagtgactgtgagaattacctgaccatccctcttaaaggaagctctgctgcaggggagcttcttagcaggcctggggcttccagggaggggccccccaactcctcagctgccactctctgtagtttacccccgctgagtgcccgcagtcaggtccccagtagctccaaaggctctcaggttagtggaaccagccgaccagcttggcgtaccaaacctgacaacccccgggagacagtagctgcccccccagggccacagagccccgagcatccccccaccaccatctaccaccagccgccgctgcccttcaccctacagggggcccagcctcaggtcctctgcttctccccacccagcatgcctgccccagcacctgcagcctcagctcccgtccccacagaccccttccagcaggcacagcctcaacagacccagcgtaagatgctcctggatgtgacaacaggccagtactatctggtggacacaccagtacagcccatgacccggagactgtttgaccctgagacagggcagtatgtggatgtgcccatgacctcccagcagcaggctgtggctcccatgtccatctctgtgcctcccttggccctgagtcctggggcttatggacccacctacatgatttaccctgggtttctgcctaccgtgctgcccaccaatgctctgcagcccacaccaattgctcgcgctccaagaggaagtgagctctccccaatggtggcagaaccttccagcaaagaggcagctgcaacgttcaccgaggccccatacttcatggcttctggtcagtctccggcctcctcaacctcctcagccccagcagccacatcccagctcctaggggccaaggcctttgcccagctgcatggcaagcctgtcatcagcattacttcgcagcccctggggccacggatcattgctcccccttcctttgatggcaccaccatgagctttgtggtagaacacagatgatgagcagccaccaggaagcggaatgaaaaactgctggagcaagacaaaaagatggactattcttctttaatctggaatttgcattgtaatagcactaagaattatttcatctgaaaaacttcttccacatgtgttattcttaatttttgcttcttataagctaagtgtgtaagtttctatatttttctgaacaatcctcttaaggcagtttttattttaattttattaagttgattgaatggttgcattttttccctttatgactatttctttttatacttcaacacaggatataagctttctattcacctccttcccccctgtacttgtgactagacaaacaattcctttgttcccattgttcagtcaaaacataccacagaatgggattgattctgttgtaaaccaagctagtaaatgagtaatttggatcacgaatctccttatagtttcttggaatatatcaagactagctggctgagttgtaatacgtatttaagttttcactatgatggtctgctctttgaatcatatatcagccaaacctacccattctcttggttatgctctatatgttcttttattaggtttggcatgatttcaaatgtgattgtgaaaaatggtggttgtaatgtttgtgctttattttatttttcccatttgtacaatgccacgacactatttgttgccttaaaatagaatggcttgaaatactggaaagccaatgattgcatctaaaattaagtacttagtctcagaaaggtataaaatatctattttcctttaagaatccaattatttttgtgggtgcataacatttttcttttcttcaataattccctccatagttgcatactcgtgtctctcatggattgtttagagtctaaagagtgacccatttggggcagtagagtagaatatggcactaattcagtggctctgattcactccagccctagcctcgctatcccaataacagtaacctagagttacagcacttgctccttatgaggatgaggcaggtttgaagagatgtcaagaatccaaatcacagaatcttttattgacatttagtactgtctcagttgtaacccaattctgaaggctatttgagtgagtgttcacagggagtcttgaagactggaagacttgattgaacagataaatatttagcttgtcataataagtgtatcgatatatacttggcaaatgttacattgaaatattacttaattactttttaaaggaataatttgaaggttttcccaggatttttttttaagaatctccttttatttaccaatttgtttaaagataaagcattctggtaattttttaaacaccctaatattattttaaacctcagcaatatttgatttctgcttaaattttcttcataagccacagaattttatgctactcatgacaaaaagtgtgagtaaaaaactaggagactgagttttgtatgatttatataatctttttactttgtagttatgcttcccatctcagactcttaaaaaagacttaatttcactttcagggccttcctttaagggatcttactctgaaaaaaagttctcttgggtatagggaaaggtttgaggcgggaatagtcagctctgatcacgattcaattgcttgttgtgctgatgagctatgaaatgaagctatagactttatgagacatgaaatatgaaacatagtctctgtgtataaaaaagatgcccttgtgccaaattcaagaaaaagatatttctttatcatagaggtcttcttacccaggcacatcaatcaattccccccagaacttaaagtaagttttatccactggggaacaaatcttatggcatcagagcttcctcgttttcaggagagattggctgggtataaggtaacttaatattgacccaagaaagtagaatccctttcagaaatcttacacttattttactgaaagcagcaccaagaaacctccagtatttgaatacacctggtgaaacctatataggatttgggtggatagtaccaaaattgttaagactggtttaaagccaaatgcgactttcaggaaaaaccagtggccatgttgagtagtgactgctcaccaactcttccaaaagagagacaactccttctctagaaaatgtggtagagttgagggcttgggacccctaatctatgtatcagtgtttctcaccagcagatttgagttttaaattctcacactgaggtaaattaggacacaaactaaggaaagaaagaaaaagcttttcatttgtttgttctatacaagaggcttcaccttttaggaagttgccaaggacacagtgatgtccaagtggctaaaaacgcaacttttaaataatgttctattaatatcatgtcatctatcgataattttatggttctctatttcaccaaatcatacaaagctgctaggccattcactacctccagtgatagggaaaaaatattttcacgggcatgaggtaaatctcaatcttgatttttattgttttgtcatttcttgaggttgcatgaatatttgaatgaagtgatatacccttccttttatagctcaaggggaatcaaacaagagcctatgaagccttctgacccataaaactattaccctaataatgtccctttagttactgaacttcccttttattttttattactataaaaccattagtaaaacatttcctaaatagtgccttgaacttgaatctaatcagaattgcagagtctggcttttataatatcctcttagggttatatgtgtggcttagttttccagaagatccactttttacttg

SEQ ID NO: 1810 - protein, 1789 aa, Homosapiens
MGHASGSHFLSESPSKPHCTLEGKGTRLHKKQHMLSFHFWKSRGQPTDAASSVADGIQTPRCCRRCQANNWTGQLSYRTLATVSAGAAAPQPQTTSTASSRSLPTSLRLAAAPPQGLKNWEVVAAVAAVPTALGPVQIRGTLLRATLQPLRGQRRTQDFPSDHHCLFLSLKPGQGLIMEAAPPELNSKARQAEVGDGVSSAQDSQELKQQLWPLPKPSASSQREAKYVDMCASAEVQRESPQTMKLTLGHCPGGQRASRSPKEKAQDEPSSKTPSPQNNPASSQLSRSQHSASEEGGNFSSSSSSSPMNKAEEDGLSKMEDSTTSTGALATSSSSLGFESESGESEGCQAGSRDPPKVEEAHYITTHEIQLSEVEQDMDFDVGLASRWDFEDNNVIYSFVDYASFGGSDETPGDITSLTEEDDDNSCYLSTTPSTNTTRTPSPTSSDLARPNAGRSGRDTSSTEVGSGPSDSGPTPPPTGPGTAPLTEPLPETPEAASGAAAAAASSCGSAASQILLSIKPASRAINEPSNVRAKQNIIYAAKHEGDMSLRVSTAAEHNSSSLKQNPAAAVAQDHAKKFIAVPARLQTRCGAIRAKELVDYSSGASSAVSELDDADKEVRNLTSRAFRSLAYPYFEALNISSRESSTTLSEVGFGRWSTFLDLKCGGVGARVEQSLLRSSAASVAAGLRKGSGARATADQLYIQSKKSQTKALEFVVSKVEGEIKHVETPLCFQKQVQTGSRVVTLLEPLNVRSESKASSAPGPGRATKGPGKGPGSAYTDDGSETSEGSKPTSRADGPQKSKFASSLLKNVISKKMQREHEFKMERGEVMDTSHHLSGTSKETEGARGSERQRERGLQRQSSRHSEAGSEYTVVSMSDAGGEGSVAGSKSPVFKASTPRERNAGPGRNFTDGHTEVCEIKKSASETVKGIFLRSQNSAFRSWKEKEAEKREEQAPIGKLKLPKGGDWRADLGEISASKNTIMSRLFVPNIQQTPKDKQPRKQATKYPAAQATSTAVIRPKAPEIKIRLGSVQQPSSDFNIAKLLTPKLAGGSASNLFKTIEDNSRAQQKLFRGDNLEKVPHFQVRDIRDKSKAQGPLHQVRDVRKLIKGSGDSSDKGSVTPEQGLTGPKPRQLSAAAGGSGSLSPMVITCQAVVNQREDSMDREPRESMGKGGGSRVLNSSSPEGTVLVHRASGRLPVATIAPNKPEQGSYLPVLKIVSKASTQKTPEKLKEEEVKEEGKATKPARNALEKLTAAVRSMEELYSFNRNEWKRKSDPLPMMMDSHVLSLIASEEREGVVVADGDHDKLSKRLGEVEERGTGNKAGVVLRGAPIERLQRRNSNPSAESVSARAAAFENLARERPRSLYIPPVHKDVERTQPLQPLPPLPSNRNVFTVSASSIQKTGGVAGKFPQGPSPESPSAAKGIKSQGLRSLKISPATRAPPDEVTNRKSGSNLEKSNSDCENYLTIPLKGSSAAGELLSRPGASREGPPNSSAATLCSLPPLSARSQVPSSSKGSQVSGTSRPAWRTKPDNPRETVAAPPGPQSPEHPPTTIYHQPPLPFTLQGAQPQVLCFSPPSMPAPAPAASAPVPTDPFQQAQPQQTQRKMLLDVTTGQYYLVDTPVQPMTRRLFDPETGQYVDVPMTSQQQAVAPMSISVPPLALSPGAYGPTYMIYPGFLPTVLPTNALQPTPIARAPRGSELSPMVAEPSSKEAAATFTEAPYFMASGQSPASSTSSAPAATSQLLGAKAFAQLHGKPVISITSQPLGPRIIAPPSFDGTTMSFVVEHR

SEQ ID NO: 1811 - DNA, 624 bp, Homosapiens
gccatagcaggctgctgtctcacagagcgagaaggtgtcaggagcagcccagttgtgtctctctctctacctctgtgaagggcgcgaatgggcagagcagaacttctagaagggaagatgagcacccaggatccctcagatctgtggagcagatccgatggagaggctgagctgctccaggacttggggtggtatcacggcaacctcacacgccatgctgctgaagctcttctcctctcaaatggatgtgacggcagctaccttctgagggacagcaatgagaccaccgggctgtactctctctctgtgagggccaaagattctgttaaacactttcatgttgaatatactggatattcatttaaatttggctttaatgaattctcatctttgaaggattttgtcaagcattttgcaaatcagcctttgattggaagcgagacaggcactctgatggttctaaaacatccctacccaagaaaagtggaagaaccctccatttatgaatctgtccgggttcacacagcaatgcagacaggaagaacagaagatgaccttgtgcccacagcaccttctctgggcaccaaagaaggttacctcaccaaacagggaggcctggtcaag

SEQ ID NO: 1812 - protein, 178 aa, Homosapiens
MGRAELLEGKMSTQDPSDLWSRSDGEAELLQDLGWYHGNLTRHAAEALLLSNGCDGSYLLRDSNETTGLYSLSVRAKDSVKHFHVEYTGYSFKFGFNEFSSLKDFVKHFANQPLIGSETGTLMVLKHPYPRKVEEPSIYESVRVHTAMQTGRTEDDLVPTAPSLGTKEGYLTKQGGLV

SEQ ID NO: 1813 - DNA, 1446 bp, Homosapiens
gccatagcaggctgctgtctcacagagcgagaaggtgtcaggagcagcccagttgtgtctctctctctacctctgtgaagggcgcgaatgggcagagcagaacttctagaagggaagatgagcacccaggatccctcagatctgtggagcagatccgatggagaggctgagctgctccaggacttggggtggtatcacggcaacctcacacgccatgctgctgaagctcttctcctctcaaatggatgtgacggcagctaccttctgagggacagcaatgagaccaccgggctgtactctctctctgtgagggccaaagattctgttaaacactttcatgttgaatatactggatattcatttaaatttggctttaatgaattctcatctttgaaggattttgtcaagcattttgcaaatcagcctttgattggaagcgagacaggcactctgatggttctaaaacatccctacccaagaaaagtggaagaaccctccatttatgaatctgtccgggttcacacagcaatgcagacaggaagaacagaagatgaccttgtgcccacagcaccttctctgggcaccaaagaaggttacctcaccaaacagggaggcctggtcaagacctggaaaacaagatggtttactctgcacaggaatgaactgaaatacttcaaagaccagatgtcaccagaaccaattcggatcctagacctaacagaatgttcagctgtacaattcgattattcacaagaaagggtaaactgtttttgtttggtatttccattcaggacattttatctctgtgcaaagaccggagtagaagctgatgagtggatcaagatattacgctggaaattgtcacaaataagaaaacagctcaaccaaggggaaggcacgatccgatctcggtcgttcatctttaaatagatctttcttgccaaggaatgctctggcccaggagcaaggtggaatgtttccctgacgctgtgatctgcagcaggcttcaaatgaaaaccgactaaggattttctttcaaaaacaaatcagaagcagatgctgattgggacccatataccacgttgctgactcacgttgctgcccttccatgatgttgccatctccttgagaacactgaagcaatcaccattctgatagaaagtgcttaaaccaccactcttaggtctgctcactcttagaacacacaatggaagaggaagggtttttgttttcactcattgtggtccccaagcctattgacactagttgcctagagtcccactgtgagtcatggtcagcctgtctgacatccaggttgtgctattaaccaagaaggaaacagatacttggaggcttagatgacttctgcaggatttatattcagatagaaaacatcaaatattttcaggggagaggtttttttttttaatttttccccctttatac

SEQ ID NO: 1814 - protein, 280 aa, Homosapiens
MGRAELLEGKMSTQDPSDLWSRSDGEAELLQDLGWYHGNLTRHAAEALLLSNGCDGSYLLRDSNETTGLYSLSVRAKDSVKHFHVEYTGYSFKFGFNEFSSLKDFVKHFANQPLIGSETGTLMVLKHPYPRKVEEPSIYESVRVHTAMQTGRTEDDLVPTAPSLGTKEGYLTKQGGLVKTWKTRWFTLHRNELKYFKDQMSPEPIRILDLTECSAVQFDYSQERVNCFCLVFPFRTFYLCAKTGVEADEWIKILRWKLSQIRKQLNQGEGTIRSRSFIFK

SEQ ID NO: 1815 - DNA, 2355 bp, Homosapiens
gccatagcaggctgctgtctcacagagcgagaaggtgtcaggagcagcccagttgtgtctctctctctacctctgtgaagggcgcgaatgggcagagcagaacttctagaagggaagatgagcacccaggatccctcagatctgtggagcagatccgatggagaggctgagctgctccaggacttggggtggtatcacggcaacctcacacgccatgctgctgaagctcttctcctctcaaatggatgtgacggcagctaccttctgagggacagcaatgagaccaccgggctgtactctctctctgtgagggccaaagattctgttaaacactttcatgttgaatatactggatattcatttaaatttggctttaatgaattctcatctttgaaggattttgtcaagcattttgcaaatcagcctttgattggaagcgagacaggcactctgatggttctaaaacatccctacccaagaaaagtggaagaaccctccatttatgaatctgtccgggttcacacagcaatgcagacaggaagaacagaagatgaccttgtgcccacagcaccttctctgggcaccaaagaaggttacctcaccaaacagggaggcctggtcaagacctggaaaacaagatggtttactctgcacaggaatgaactgaaatacttcaaagaccagatgtcaccagaaccaattcggatcctagacctaacagaatgttcagctgtacaattcgattattcacaagaaagggtaaactgtttttgtttggtatttccattcaggacattttatctctgtgcaaagaccggagtagaagctgatgagtggatcaagatattacgctggaaattgtcacaaataagaaaacagctcaaccaaggggaaggcacgatccgatctcggtcgttcatctttaaatagatctttcttgccaaggaatgctctggcccaggagcaaggtggaatgtttccctgacgctgtgatctgcagcaggcttcaaatgaaaaccgactaaggattttctttcaaaaacaaatcagaagcagatgctgattgggacccatataccacgttgctgactcacgttgctgcccttccatgatgttgccatctccttgagaacactgaagcaatcaccattctgatagaaagtgcttaaaccaccactcttaggtctgctcactcttagaacacacaatggaagaggaagggtttttgttttcactcattgtggtccccaagcctattgacactagttgcctagagtcccactgtgagtcatggtcagcctgtctgacatccaggttgtgctattaaccaagaaggaaacagatacttggaggcttagatgacttctgcaggatttatattcagatagaaaacatcaaatattttcaggggagaggtttttttttttaatttttccccctttatacaaaaaaaaaagaacatttccaaaactaaaatagaaaatgcttgtggcatttattttctctttttaaaaggttcagaaatttggcaggtcctttgcttctaatgacaaaactgtgagagctagatgtcctatgggcaattaggtagtataataaaggtaaatgaaggtacaatttttaaaccattattttcaccctgttggggtaaatgttttaaagagtgagaaaacataaattgagaaagggtgataaagtaatagataacttttagtttaataataattattgttattatactactaataatagagcacttgtaagcactaagttatctttatccaacatttctccaaatggactgaaagaaacttttcaaggacagtgtattataacaatccctttcccagaattagttgtatagggttggcccaagagatgtaagaaaaatctcgcattgctccctaagcaccctgggccttattaaagagcaacttctatttccagtcgggggagtaacactaaagctacaagaaatatgtaataatgataggtaataatgtgttccaaagctttttcaaactagaataaggaggcaaatagaagaatgagatactgatgtccacagttcattggcagaatctaaccccttctgttatcttttttaatactatttttgtttagatagaagtttcaaagaagataaaaatgcttgaagagcctgagagtaaaaagattatgctgcaaagctatgatataaactgctcttgcagtccaaagggatacctgattaaagaagtttcttatttaaacatctcagacgcaaaaattacattaaatttttgtatatttcaacaacattttaaatgtattttgttatgtttgtattatataggataaagcaaatgtcaagtt

SEQ ID NO: 1816 - protein, 280 aa, Homosapiens; identical to SEQ ID NO: 1814

SEQ ID NO: 1817 - DNA, 2994 bp, Homosapiens
gccatagcaggctgctgtctcacagagcgagaaggtgtcaggagcagcccagttgtgtctctctctctacctctgtgaagggcgcgaatgggcagagcagaacttctagaagggaagatgagcacccaggatccctcagatctgtggagcagatccgatggagaggctgagctgctccaggacttggggtggtatcacggcaacctcacacgccatgctgctgaagctcttctcctctcaaatggatgtgacggcagctaccttctgagggacagcaatgagaccaccgggctgtactctctctctgtgagggccaaagattctgttaaacactttcatgttgaatatactggatattcatttaaatttggctttaatgaattctcatctttgaaggattttgtcaagcattttgcaaatcagcctttgattggaagcgagacaggcactctgatggttctaaaacatccctacccaagaaaagtggaagaaccctccatttatgaatctgtccgggttcacacagcaatgcagacaggaagaacagaagatgaccttgtgcccacagcaccttctctgggcaccaaagaaggttacctcaccaaacagggaggcctggtcaagacctggaaaacaagatggtttactctgcacaggaatgaactgaaatacttcaaagaccagatgtcaccagaaccaattcggatcctagacctaacagaatgttcagctgtacaattcgattattcacaagaaagggtaaactgtttttgtttggtatttccattcaggacattttatctctgtgcaaagaccggagtagaagctgatgagtggatcaagatattacgctggaaattggtcaaggacaaaagctgatttattttgtctgctctctgtatatctcccgaggagaagactgatcacaaataagaaaacagctcaaccaaggggaaggcacgatccgatctcggtcgttcatctttaaatagatctttcttgccaaggaatgctctggcccaggagcaaggtggaatgtttccctgacgctgtgatctgcagcaggcttcaaatgaaaaccgactaaggattttctttcaaaaacaaatcagaagcagatgctgattgggacccatataccacgttgctgactcacgttgctgcccttccatgatgttgccatctccttgagaacactgaagcaatcaccattctgatagaaagtgcttaaaccaccactcttaggtctgctcactcttagaacacacaatggaagaggaagggtttttgttttcactcattgtggtccccaagcctattgacactagttgcctagagtcccactgtgagtcatggtcagcctgtctgacatccaggttgtgctattaaccaagaaggaaacagatacttggaggcttagatgacttctgcaggatttatattcagatagaaaacatcaaatattttcaggggagaggtttttttttttaatttttccccctttatacaaaaaaaaaagaacatttccaaaactaaaatagaaaatgcttgtggcatttattttctctttttaaaaggttcagaaatttggcaggtcctttgcttctaatgacaaaactgtgagagctagatgtcctatgggcaattaggtagtataataaaggtaaatgaaggtacaatttttaaaccattattttcaccctgttggggtaaatgttttaaagagtgagaaaacataaattgagaaagggtgataaagtaatagataacttttagtttaataataattattgttattatactactaataatagagcacttgtaagcactaagttatctttatccaacatttctccaaatggactgaaagaaacttttcaaggacagtgtattataacaatccctttcccagaattagttgtatagggttggcccaagagatgtaagaaaaatctcgcattgctccctaagcaccctgggccttattaaagagcaacttctatttccagtcgggggagtaacactaaagctacaagaaatatgtaataatgataggtaataatgtgttccaaagctttttcaaactagaataaggaggcaaatagaagaatgagatactgatgtccacagttcattggcagaatctaaccccttctgttatcttttttaatactatttttgtttagatagaagtttcaaagaagataaaaatgcttgaagagcctgagagtaaaaagattatgctgcaaagctatgatataaactgctcttgcagtccaaagggatacctgattaaagaagtttcttatttaaacatctcagacgcaaaaattacattaaatttttgtatatttcaacaacattttaaatgtattttgttatgtttgtattatataggataaagcaaatgtcaagttaaaatgtattgtgttgtttgtaaagtaagaagttactggccaggagcggcggctcatgcctgtaatcccaggactttggtaggccaagacaagcagatcacttgaggtcaggagttcaacatcagcctggccaacatgatgaaaccttgtctttactaaaaatacaaaaattagctgggcatggtggcaggcgcctgtaatcccagctactcaggaggctgaggcaggagaattgcttgaacccgggaggtggaggttgcagtgaaccaagatcgcggcgctgcactctagcctgggtgacagagtcagactccgtcccaaaaaaacaaacaaacaaaacaaaacaaaaaaaaacagaagttacaaatgaatactcacggatatgtatagttttatgtttgttttcttagaaacaaatgtgtttctttgggtgggtaatattgtgttttactatgtttaccttttataaaacataacctgtttatttatattctttggctttgtttattaaaaagcatgattttgctgtgcatgtaccattttgctattaaaatttatttttaatatttgtaacttg

SEQ ID NO: 1818 - protein, 263 aa, Homosapiens
MGRAELLEGKMSTQDPSDLWSRSDGEAELLQDLGWYHGNLTRHAAEALLLSNGCDGSYLLRDSNETTGLYSLSVRAKDSVKHFHVEYTGYSFKFGFNEFSSLKDFVKHFANQPLIGSETGTLMVLKHPYPRKVEEPSIYESVRVHTAMQTGRTEDDLVPTAPSLGTKEGYLTKQGGLVKTWKTRWFTLHRNELKYFKDQMSPEPIRILDLTECSAVQFDYSQERVNCFCLVFPFRTFYLCAKTGVEADEWIKILRWKLVKDKS

SEQ ID NO: 1819 - DNA, 2932 bp, Homosapiens
gccatagcaggctgctgtctcacagagcgagaaggtgtcaggagcagcccagttgtgtctctctctctacctctgtgaagggcgcgaatgggcagagcagaacttctagaagggaagatgagcacccaggatccctcagatctgtggagcagatccgatggagaggctgagctgctccaggacttggggtggtatcacggcaacctcacacgccatgctgctgaagctcttctcctctcaaatggatgtgacggcagctaccttctgagggacagcaatgagaccaccgggctgtactctctctctgtgagggccaaagattctgttaaacactttcatgttgaatatactggatattcatttaaatttggctttaatgaattctcatctttgaaggattttgtcaagcattttgcaaatcagcctttgattggaagcgagacaggcactctgatggttctaaaacatccctacccaagaaaagtggaagaaccctccatttatgaatctgtccgggttcacacagcaatgcagacaggaagaacagaagatgaccttgtgcccacagcaccttctctgggcaccaaagaaggttacctcaccaaacagggaggcctggtcaagacctggaaaacaagatggtttactctgcacaggaatgaactgaaatacttcaaagaccagatgtcaccagaaccaattcggatcctagacctaacagaatgttcagctgtacaattcgattattcacaagaaagggtaaactgtttttgtttggtatttccattcaggacattttatctctgtgcaaagaccggagtagaagctgatgagtggatcaagatattacgctggaaattgtcacaaataagaaaacagctcaaccaaggggaaggcacgatccgatctcggtcgttcatctttaaatagatctttcttgccaaggaatgctctggcccaggagcaaggtggaatgtttccctgacgctgtgatctgcagcaggcttcaaatgaaaaccgactaaggattttctttcaaaaacaaatcagaagcagatgctgattgggacccatataccacgttgctgactcacgttgctgcccttccatgatgttgccatctccttgagaacactgaagcaatcaccattctgatagaaagtgcttaaaccaccactcttaggtctgctcactcttagaacacacaatggaagaggaagggtttttgttttcactcattgtggtccccaagcctattgacactagttgcctagagtcccactgtgagtcatggtcagcctgtctgacatccaggttgtgctattaaccaagaaggaaacagatacttggaggcttagatgacttctgcaggatttatattcagatagaaaacatcaaatattttcaggggagaggtttttttttttaatttttccccctttatacaaaaaaaaaagaacatttccaaaactaaaatagaaaatgcttgtggcatttattttctctttttaaaaggttcagaaatttggcaggtcctttgcttctaatgacaaaactgtgagagctagatgtcctatgggcaattaggtagtataataaaggtaaatgaaggtacaatttttaaaccattattttcaccctgttggggtaaatgttttaaagagtgagaaaacataaattgagaaagggtgataaagtaatagataacttttagtttaataataattattgttattatactactaataatagagcacttgtaagcactaagttatctttatccaacatttctccaaatggactgaaagaaacttttcaaggacagtgtattataacaatccctttcccagaattagttgtatagggttggcccaagagatgtaagaaaaatctcgcattgctccctaagcaccctgggccttattaaagagcaacttctatttccagtcgggggagtaacactaaagctacaagaaatatgtaataatgataggtaataatgtgttccaaagctttttcaaactagaataaggaggcaaatagaagaatgagatactgatgtccacagttcattggcagaatctaaccccttctgttatcttttttaatactatttttgtttagatagaagtttcaaagaagataaaaatgcttgaagagcctgagagtaaaaagattatgctgcaaagctatgatataaactgctcttgcagtccaaagggatacctgattaaagaagtttcttatttaaacatctcagacgcaaaaattacattaaatttttgtatatttcaacaacattttaaatgtattttgttatgtttgtattatataggataaagcaaatgtcaagttaaaatgtattgtgttgtttgtaaagtaagaagttactggccaggagcggcggctcatgcctgtaatcccaggactttggtaggccaagacaagcagatcacttgaggtcaggagttcaacatcagcctggccaacatgatgaaaccttgtctttactaaaaatacaaaaattagctgggcatggtggcaggcgcctgtaatcccagctactcaggaggctgaggcaggagaattgcttgaacccgggaggtggaggttgcagtgaaccaagatcgcggcgctgcactctagcctgggtgacagagtcagactccgtcccaaaaaaacaaacaaacaaaacaaaacaaaaaaaaacagaagttacaaatgaatactcacggatatgtatagttttatgtttgttttcttagaaacaaatgtgtttctttgggtgggtaatattgtgttttactatgtttaccttttataaaacataacctgtttatttatattctttggctttgtttattaaaaagcatgattttgctgtgcatgtaccattttgctattaaaatttatttttaatatttgtaacttg

SEQ ID NO: 1820 - protein, 280 aa, Homosapiens; identical to SEQ ID NO: 1814

SEQ ID NO: 1821 - DNA, 3929 bp, Homosapiens
actgggagaagagtcttgagaaaggaatgtcttatttcccactaccttttattttaaagtttttcaagcatacacaagttgaaagacatacgtttacataccctccatagcagttattaatatatcttaccatatttgctttatcctagtctatccactttttttttttcctgaaccaattgaaagtaagttgcagacatcatggcactttattcctaaagactttagtatgtgtctcttaagaataaaatatcacatataggactacagtatcattattacaactgaagaaattaatgttaattctataatatcaactgagaatgggtgtctttttaaaatttgcatagacatgccctgtgagctagcagagctttatttttctcatatatccaaaaatcaggaggcaagcagctatggtgacaaggtcaggtccagggtctctactgttctcctggccttttctcatgctggctacttcaggatttgagtgtctactacacctgtaggtctcatattttcaacaaagtacaaagaaagatgtagggatgatattacccgtgtctgtccctttttatcaggaaaaccaatgtttctccagaaactcccctatgagaccgggtgccatggccatccccagcagctgatcataattggcttaaacaaattaggatttattgcttggggttctgttagcaaaagaaagggataattatctgtattaatagacagttaataatgtctcccatagggagtaccaaacaatgacaatgacagaaaccagttttcgagtatatgcactgtatcactccctccccaccactgtccactcactctccactagacctcacatccaggtattagcttctatgcacagagacttacctcttacctattcaactttaattgctggtatcaacaaaatacactgcttaggctttaagatatagaaacccttctgaaggctttttcacaaaaagaaaaaagatttttggtatttttgcatctcaactgtaagtaaggaagtatgttcagtatgtaatttagggctgaccttattgcttacataattttaactaggtaatcagacacagtcaaatgaaaaattactatacatttaggaaaagtattttgtgccagtaggaaagttcttattccctgcagcagagactgactcttggccagagatgggagaaataactaatttagttttattgtctctttttattgtcccaatagttgaaattgcccacaaccacagaaggcagagttatcctcgttgaagcaagctaacacaaatgagttctttttagcaaacttctctgtcttgcctattctttggatcatagcacaagtttttgagagatcagctgaatgaatacataagtgttagagttaacctaagacatgaaccacaaaaggatctaggggtgtcctgaacatgtttctttcttcttcaaagtcttattcgagtatatacatctgacttggaataataatatgaatctacaacttccttaacatttctgcagtttgctggcaggagtaggtgcatatataccagcacttcaaggtacttacctgcatcctttatcaattcttttttcccttgcaatactctaattagtgttcaactaatatatatatatatatatatatataatatatataatatattatattatatattatattatatatattatatatatatatatatatatagctaatgatctgcaatatcttatgttctttcttttgtcctattagtttggtatttccattcaggacattttatctctgtgcaaagaccggagtagaagctgatgagtggatcaagatattacgctggaaattgtcacaaataagaaaacagctcaaccaaggggaaggcacgatccgatctcggtcgttcatctttaaatagatctttcttgccaaggaatgctctggcccaggagcaaggtggaatgtttccctgacgctgtgatctgcagcaggcttcaaatgaaaaccgactaaggattttctttcaaaaacaaatcagaagcagatgctgattgggacccatataccacgttgctgactcacgttgctgcccttccatgatgttgccatctccttgagaacactgaagcaatcaccattctgatagaaagtgcttaaaccaccactcttaggtctgctcactcttagaacacacaatggaagaggaagggtttttgttttcactcattgtggtccccaagcctattgacactagttgcctagagtcccactgtgagtcatggtcagcctgtctgacatccaggttgtgctattaaccaagaaggaaacagatacttggaggcttagatgacttctgcaggatttatattcagatagaaaacatcaaatattttcaggggagaggtttttttttttaatttttccccctttatacaaaaaaaaaagaacatttccaaaactaaaatagaaaatgcttgtggcatttattttctctttttaaaaggttcagaaatttggcaggtcctttgcttctaatgacaaaactgtgagagctagatgtcctatgggcaattaggtagtataataaaggtaaatgaaggtacaatttttaaaccattattttcaccctgttggggtaaatgttttaaagagtgagaaaacataaattgagaaagggtgataaagtaatagataacttttagtttaataataattattgttattatactactaataatagagcacttgtaagcactaagttatctttatccaacatttctccaaatggactgaaagaaacttttcaaggacagtgtattataacaatccctttcccagaattagttgtatagggttggcccaagagatgtaagaaaaatctcgcattgctccctaagcaccctgggccttattaaagagcaacttctatttccagtcgggggagtaacactaaagctacaagaaatatgtaataatgataggtaataatgtgttccaaagctttttcaaactagaataaggaggcaaatagaagaatgagatactgatgtccacagttcattggcagaatctaaccccttctgttatcttttttaatactatttttgtttagatagaagtttcaaagaagataaaaatgcttgaagagcctgagagtaaaaagattatgctgcaaagctatgatataaactgctcttgcagtccaaagggatacctgattaaagaagtttcttatttaaacatctcagacgcaaaaattacattaaatttttgtatatttcaacaacattttaaatgtattttgttatgtttgtattatataggataaagcaaatgtcaagttaaaatgtattgtgttgtttgtaaagtaagaagttactggccaggagcggcggctcatgcctgtaatcccaggactttggtaggccaagacaagcagatcacttgaggtcaggagttcaacatcagcctggccaacatgatgaaaccttgtctttactaaaaatacaaaaattagctgggcatggtggcaggcgcctgtaatcccagctactcaggaggctgaggcaggagaattgcttgaacccgggaggtggaggttgcagtgaaccaagatcgcggcgctgcactctagcctgggtgacagagtcagactccgtcccaaaaaaacaaacaaacaaaacaaaacaaaaaaaaacagaagttacaaatgaatactcacggatatgtatagttttatgtttgttttcttagaaacaaatgtgtttctttgggtgggtaatattgtgttttactatgtttaccttttataaaacataacctgtttatttatattctttggctttgtttattaaaaagcatgattttgctgtgcatgtaccattttgctattaaaatttatttttaatatttgtaacttg

SEQ ID NO: 1822 - protein, 65 aa, Homosapiens
MICNILCSFFCPISLVFPFRTFYLCAKTGVEADEWIKILRWKLSQIRKQLNQGEGTIRSRSFIFK

SEQ ID NO: 1823 - DNA, 4234 bp, Homosapiens
ggaggggaggggcgcggccgccggacgcgccctcgcagcttccgccgggcccctccggaaatcccgtatcgtagggcgacggcggcttagaaagtgcttcctggagcgcagacgaggtcatgaatcatgtgacggtggcttgaggaggaacctgtctttaaagctgtccctgaagtgacagcggagagaaccaggcagcccagaaaccccaggacctaaagcgattcttgtataaaaagttaccaagtgttgaagggctccatgccattgttgtgtcagatagagatggagtacctgttattaaagtggcaaatgacaatgctccagagcatgctttgcgacctggtttcttatccacttttgcccttgcaacagaccaaggaagcaaacttggactttccaaaaataaaagtatcatctgttactataacacctaccaggtggttcaatttaatcgtttacctttggtggtgagtttcatagccagcagcagtgccaatacaggactaattgtcagcctagaaaaggaacttgctccattgtttgaagaactgagacaagttgtggaagtttcttaatctgacagtggtttcagtgtgtaccttatcttcattataacaacacaatatcaatccagcaatctttagactacaataatacttttatccatgtgctcaagaaagggcccctttttccaacttatactaaagagctagcatatagatgtaatttatagatagatcagttgctatattttctggtgtagggtctttcttatttagtgagatctagggataccacagaaatggttcagtctatcacagctcccatggagttagtctggtcaccagatatggatgagagattctattcagtggatcagaatcaaactggtacattgatccacttgagccgttaagtgctgccaattgtacaatatgcccaggcttgcagaataaagccaactttttattgtgaataataataaggacatatttttcttcagattatgttttatttctttgcattgagtgaggaacataaaatggcttggtaaaagtaataaaatcagtacaatcactaactttcctttgtacatattattttgcagtatagatgaatattactaatcagtttgattattctcagagggtgctgctctttaatgaaaatgaaaattatagctaatgttttttcctcaaactctgctttctgtaaccaatcagtgttttaatgtttgtgtgttcttcataaaatttaaatacaattcgttattctgtttccaatgttagtatgtatgtaaacatgatagtacagccatttttttcatatgtgagtaaaaataaaatagtatttttaaaaatatagtttgagcactgtataggtcctttttttgttcagactttttccaaaaatctaaacataattaatatactctttcagccacatgaataaataatgagtgtttcttgtaggtattggtttggagattgttttacggtagtatgaactgttaactggaaaagaaacctgagattgcagtcagccaagattgtgccactgcaccccagcctgggcaacagagactccgtctcaaaaacaaaaaagaaaagaaaccaagaaacctcaggcatgaacctaatttaatctccatgaaagaggtactacagttctagaatataccctttatgttcaggaatgcagtctatcattcagagttaatttctttctaggctctttgacaatcagtttttccctggatcagttcagtacatatgcattgagcacctgtgtgccagtcagccgagctatcacattgcacaattctaagaagcaccattcatgtctcatcatatttctatgctctgggagttgcctttcacatagaatatgtgtgattgttatccctagaattgtgcagtgaggcaattggctaggtgctgtgctgctttttctttctttctttttttttttaagagacagagtcttgctgtgttgcccagtctggagtgcagtggtggcatgatcttgcctcactgtaacctctgcctcctgggttcaagctgttctcatgccccattctcccttgtagctgggattacaggcttacaccatcgcacttggcaaatttgtgtatttttagtagagacaggaattcaccatgttggccaggctggtcttgaactcctgacttaaagtgatccacctgctttggcctcccaaaatgctaggattataggtgtgagccactgcaccgggccatgtgctactttttcttccttccatccttcctcccttcttcagtgtaaatatgagattaatttgtgataccttactttaaagaacttagagttcagtaaaggaagcaggtatagaaagtgctatgataaagctatacataggatggtatagaaccacagactaggggcacttaaaatgggcaagaaaatagcctttgtaaataaaatagaggcaagagatataatgctttacctgcaaagagctataaatacagccatgtaccatataatgatgtttcagttagtgaaggaccacatacgagggtggtcagaacagcaggctataccatatagcctaggtgtgtagtaggctataccatatagcctaggtgtgtagtagtaggctataccatatagcctaggtgtgtagtagtaggcgataccatatagcctaggtgtgtagtagtaggctataccatatagcctaggtgtatagtagtaggctataccatatagcctaggtgtgtagtaggctataccatatagcctaggtatgtagtagtaggctataccatatagcctaggtgtgtagtagtaggctataccatctggggttcctgtcagtacagtatgatgttcacataatgatgaaatcacctaacaaagcatgtctcgaaatgtatccacattgttacgtaacacatgactgtagttaattgttacaattgaaatactagatgtactcattgaaatccagaattcccattatctggattatttaatatcgttcaggaaatttttgccagtgcaatggtgcatgaaacaatgtcttttagaaatgaggtggccagatttctatttgcagataataattgtatatctaaaaatcctagaaaaagaaatgataacaaatggagctacttaacctttacatgttgaatgctgccactgttaaaatttctgagggggtataatagataaactatcccatagttcatctggaaaaataaggtggtgaaaattgctaagaaatttttgaaagggtaatgtaaacctagattaactgtttttgaaaggtagtacagaactgaatgcacaactagatatcaatggtatgtactcacccagaaaaaagacttcagtacatacatgtgagggcttaaaacattgttataaagacgggatcacaatgggaaaaggattattcaataagtagggcaggcattctctatgcctgctagggaagtgtgacttgttatactctttatgtacagcaattggcagtctgtgaaacttttaaattcatatacataaccttttgccctgcaattccacttctagaaatttatcctaccaaacaaagcacatagatgtgcaaaagtatgtatttacaagtatattctttgcaacttggtaatgtcaaagaattggaagcaacctaaatatctgccataggtaggataaccatatgctttggctttttgaacactaccagtttatacctgctgttcttggataattattaatagtgctttcattctcaatgtctcactttagataataaattacagaggattggtgaaactaatttgcccaatggaaaaaggaatgaagaagtgctttaggtactgagatgaaaagatctctaaggcataataatgtttattgagaaaagcatggtgtcaaactgtatggcatgctacaattgatgtataagaagaaaaaatgtgtatgtattcctatttgtttgtatatggtagactgtctctgaagacatatatggaagaacctgatcacattggtagtctccaaggagcagaactagatacctgggggataaggatcccaggagtgagccttttcattgtaaacttcattgtactttgagtttttaactgttcaaaaataataaaattagaaataaaatatttcaacaaacaataaaatgggatatttggggaagaaagttgtctcagggctctccaaagaagcag

SEQ ID NO: 1824 - protein, 70 aa, Homosapiens
MPLLCQIEMEYLLLKWQMTMLQSMLCDLVSYPLLPLQQTKEANLDFPKIKVSSVTITPTRWFNLIVYLWW

SEQ ID NO: 1825 - DNA, 4280 bp, Homosapiens
ggaggggaggggcgcggccgccggacgcgccctcgcagcttccgccgggcccctccggaaatcccgtatcgtagggcgacggcggcttagaaagtgcttcctggagcgcagacgaggtcatgaatcatgtgacggtggcttgaggaggaacctgtctttaaagctgtccctgaagtgacagcggagagaaccaggcagcccagaaaccccaggcgtggagattgatcctgcgagagaagggggttcatcatggcggatgacctaaagcgattcttgtataaaaagttaccaagtgttgaagggctccatgccattgttgtgtcagatagagatggagtacctgttattaaagtggcaaatgacaatgctccagagcatgctttgcgacctggtttcttatccacttttgcccttgcaacagaccaaggaagcaaacttggactttccaaaaataaaagtatcatctgttactataacacctaccaggtggttcaatttaatcgtttacctttggtggtgagtttcatagccagcagcagtgccaatacaggactaattgtcagcctagaaaaggaacttgctccattgtttgaagaactgagacaagttgtggaagtttcttaatctgacagtggtttcagtgtgtaccttatcttcattataacaacacaatatcaatccagcaatctttagactacaataatacttttatccatgtgctcaagaaagggcccctttttccaacttatactaaagagctagcatatagatgtaatttatagatagatcagttgctatattttctggtgtagggtctttcttatttagtgagatctagggataccacagaaatggttcagtctatcacagctcccatggagttagtctggtcaccagatatggatgagagattctattcagtggatcagaatcaaactggtacattgatccacttgagccgttaagtgctgccaattgtacaatatgcccaggcttgcagaataaagccaactttttattgtgaataataataaggacatatttttcttcagattatgttttatttctttgcattgagtgaggaacataaaatggcttggtaaaagtaataaaatcagtacaatcactaactttcctttgtacatattattttgcagtatagatgaatattactaatcagtttgattattctcagagggtgctgctctttaatgaaaatgaaaattatagctaatgttttttcctcaaactctgctttctgtaaccaatcagtgttttaatgtttgtgtgttcttcataaaatttaaatacaattcgttattctgtttccaatgttagtatgtatgtaaacatgatagtacagccatttttttcatatgtgagtaaaaataaaatagtatttttaaaaatatagtttgagcactgtataggtcctttttttgttcagactttttccaaaaatctaaacataattaatatactctttcagccacatgaataaataatgagtgtttcttgtaggtattggtttggagattgttttacggtagtatgaactgttaactggaaaagaaacctgagattgcagtcagccaagattgtgccactgcaccccagcctgggcaacagagactccgtctcaaaaacaaaaaagaaaagaaaccaagaaacctcaggcatgaacctaatttaatctccatgaaagaggtactacagttctagaatataccctttatgttcaggaatgcagtctatcattcagagttaatttctttctaggctctttgacaatcagtttttccctggatcagttcagtacatatgcattgagcacctgtgtgccagtcagccgagctatcacattgcacaattctaagaagcaccattcatgtctcatcatatttctatgctctgggagttgcctttcacatagaatatgtgtgattgttatccctagaattgtgcagtgaggcaattggctaggtgctgtgctgctttttctttctttctttttttttttaagagacagagtcttgctgtgttgcccagtctggagtgcagtggtggcatgatcttgcctcactgtaacctctgcctcctgggttcaagctgttctcatgccccattctcccttgtagctgggattacaggcttacaccatcgcacttggcaaatttgtgtatttttagtagagacaggaattcaccatgttggccaggctggtcttgaactcctgacttaaagtgatccacctgctttggcctcccaaaatgctaggattataggtgtgagccactgcaccgggccatgtgctactttttcttccttccatccttcctcccttcttcagtgtaaatatgagattaatttgtgataccttactttaaagaacttagagttcagtaaaggaagcaggtatagaaagtgctatgataaagctatacataggatggtatagaaccacagactaggggcacttaaaatgggcaagaaaatagcctttgtaaataaaatagaggcaagagatataatgctttacctgcaaagagctataaatacagccatgtaccatataatgatgtttcagttagtgaaggaccacatacgagggtggtcagaacagcaggctataccatatagcctaggtgtgtagtaggctataccatatagcctaggtgtgtagtagtaggctataccatatagcctaggtgtgtagtagtaggcgataccatatagcctaggtgtgtagtagtaggctataccatatagcctaggtgtatagtagtaggctataccatatagcctaggtgtgtagtaggctataccatatagcctaggtatgtagtagtaggctataccatatagcctaggtgtgtagtagtaggctataccatctggggttcctgtcagtacagtatgatgttcacataatgatgaaatcacctaacaaagcatgtctcgaaatgtatccacattgttacgtaacacatgactgtagttaattgttacaattgaaatactagatgtactcattgaaatccagaattcccattatctggattatttaatatcgttcaggaaatttttgccagtgcaatggtgcatgaaacaatgtcttttagaaatgaggtggccagatttctatttgcagataataattgtatatctaaaaatcctagaaaaagaaatgataacaaatggagctacttaacctttacatgttgaatgctgccactgttaaaatttctgagggggtataatagataaactatcccatagttcatctggaaaaataaggtggtgaaaattgctaagaaatttttgaaagggtaatgtaaacctagattaactgtttttgaaaggtagtacagaactgaatgcacaactagatatcaatggtatgtactcacccagaaaaaagacttcagtacatacatgtgagggcttaaaacattgttataaagacgggatcacaatgggaaaaggattattcaataagtagggcaggcattctctatgcctgctagggaagtgtgacttgttatactctttatgtacagcaattggcagtctgtgaaacttttaaattcatatacataaccttttgccctgcaattccacttctagaaatttatcctaccaaacaaagcacatagatgtgcaaaagtatgtatttacaagtatattctttgcaacttggtaatgtcaaagaattggaagcaacctaaatatctgccataggtaggataaccatatgctttggctttttgaacactaccagtttatacctgctgttcttggataattattaatagtgctttcattctcaatgtctcactttagataataaattacagaggattggtgaaactaatttgcccaatggaaaaaggaatgaagaagtgctttaggtactgagatgaaaagatctctaaggcataataatgtttattgagaaaagcatggtgtcaaactgtatggcatgctacaattgatgtataagaagaaaaaatgtgtatgtattcctatttgtttgtatatggtagactgtctctgaagacatatatggaagaacctgatcacattggtagtctccaaggagcagaactagatacctgggggataaggatcccaggagtgagccttttcattgtaaacttcattgtactttgagtttttaactgttcaaaaataataaaattagaaataaaatatttcaacaaacaataaaatgggatatttggggaagaaagttgtctcagggctctccaaagaagcag

SEQ ID NO: 1826 - protein, 124 aa, Homosapiens; identical to SEQ ID NO: 173

SEQ ID NO: 1827 - DNA, 4182 bp, Homosapiens
ggaggggaggggcgcggccgccggacgcgccctcgcagcttccgccgggcccctccggaaatcccgtatcgtagggcgacggcggcttagaaagtgcttcctggagcgcagacgaggtcatgaatcatgtgacggtggcttgaggaggaacctgtctttaaagctgtccctgaagtgacagcggagagaaccaggcagcccagaaaccccaggacctaaagcgattcttgtataaaaagttaccaagtgttgaagggctccatgccattgttgtgtcagatagagatggagtacctgttattaaagtggcaaatgacaatgctccagagcatgctttgcgacctggtttcttatccacttttgcccttgcaacagaccaaggaagcaaacttggactttccaaaaataaaagtatcatctgttactataacacctaccaggtggttcaatttaatcgtttacctttggtggtgagtttcatagccagcagcagtgccaatacaggactaattgtcagcctagaaaaggaacttgctccattgtttgaagaactgagacaagttgtggaagtttcttaatctgacagtggtttcagtgtgtaccttatcttcattataacaacacaatatcaatccagcaatctttagactacaataatacttttatccatgtgctcaagaaagggcccctttttccaacttatactaaagagctagcatatagatgtaatttatagatagatcagttgctatattttctggtgtagggtctttcttatttagtgagatctagggataccacagaaatggttcagtctatcacagctcccatggagttagtctggtcaccagatatggatgagagattctattcagtggatcagaatcaaactggtacattgatccacttgagccgttaagtgctgccaattgtacaatatgcccaggcttgcagaataaagccaactttttattgtgaataataataaggacatatttttcttcagattatgttttatttctttgcattgagtgaggaacataaaatggcttggtaaaagtaataaaatcagtacaatcactaactttcctttgtacatattattttgcagtatagatgaatattactaatcagtttgattattctcagagggtgctgctctttaatgaaaatgaaaattatagctaatgttttttcctcaaactctgctttctgtaaccaatcagtgttttaatgtttgtgtgttcttcataaaatttaaatacaattcgttattctgtttccaatgttagtatgtatgtaaacatgatagtacagccatttttttcatatgtgagtaaaaataaaatagtatttttaaaaatatagtttgagcactgtataggtcctttttttgttcagactttttccaaaaatctaaacataattaatatactctttcagccacatgaataaataatgagtgtttcttgtaggtattggtttggagattgttttacggtagtatgaactgttaactggaaaagaaacctgagattgcagtcagccaagattgtgccactgcaccccagcctgggcaacagagactccgtctcaaaaacaaaaaagaaaagaaaccaagaaacctcaggcatgaacctaatttaatctccatgaaagaggtactacagttctagaatataccctttatgttcaggaatgcagtctatcattcagagttaatttctttctaggctctttgacaatcagtttttccctggatcagttcagtacatatgcattgagcacctgtgtgccagtcagccgagctatcacattgcacaattctaagaagcaccattcatgtctcatcatatttctatgctctgggagttgcctttcacatagaatatgtgtgattgttatccctagaattgtgcagtgaggcaattggctaggtgctgtgctgctttttctttctttctttttttttttaagagacagagtcttgctgtgttgcccagtctggagtgcagtggtggcatgatcttgcctcactgtaacctctgcctcctgggttcaagctgttctcatgccccattctcccttgtagctgggattacaggcttacaccatcgcacttggcaaatttgtgtatttttagtagagacaggaattcaccatgttggccaggctggtcttgaactcctgacttaaagtgatccacctgctttggcctcccaaaatgctaggattataggtgtgagccactgcaccgggccatgtgctactttttcttccttccatccttcctcccttcttcagtgtaaatatgagattaatttgtgataccttactttaaagaacttagagttcagtaaaggaagcaggtatagaaagtgctatgataaagctatacataggatggtatagaaccacagactaggggcacttaaaatgggcaagaaaatagcctttgtaaataaaatagaggcaagagatataatgctttacctgcaaagagctataaatacagccatgtaccatataatgatgtttcagttagtgaaggaccacatacgagggtggtcagaacagcaggctataccatatagcctaggtgtgtagtaggctataccatatagcctaggtgtgtagtagtaggctataccatatagcctaggtgtgtagtagtaggcgataccatatagcctaggtgtgtagtagtaggctataccatatagcctaggtgtatagtagtaggctataccatatagcctaggtgtgtagtaggctataccatatagcctaggtatgtagtagtaggctataccatatagcctaggtgtgtagtagtaggctataccatctggggttcctgtcagtacagtatgatgttcacataatgatgaaatcacctaacaaagcatgtctcgaaatgtatccacattgttacgtaacacatgactgtagttaattgttacaattgaaatactagatgtactcattgaaatccagaattcccattatctggattatttaatatcgttcaggaaatttttgccagtgcaatggtgcatgaaacaatgtcttttagaaatgaggtggccagatttctatttgcagataataattgtatatctaaaaatcctagaaaaagaaatgataacaaatggagctacttaacctttacatgttgaatgctgccactgttaaaatttctgagggggtataatagataaactatcccatagttcatctggaaaaataaggtggtgaaaattgctaagaaatttttgaaagggtaatgtaaacctagattaactgtttttgaaaggtagtacagaactgaatgcacaactagatatcaatggtatgtactcacccagaaaaaagacttcagtacatacatgtgagggcttaaaacattgttataaagacgggatcacaatgggaaaaggattattcaataagtagggcaggcattctctatgcctgctagggaagtgtgacttgttatactctttatgtacagcaattggcagtctgtgaaacttttaaattcatatacataaccttttgccctgcaattccacttctagaaatttatcctaccaaacaaagcacatagatgtgcaaaagtatgtatttacaagtatattctttgcaacttggtaatgtcaaagaattggaagcaacctaaatatctgccataggtaggataaccatatgctttggctttttgaacactaccagtttatacctgctgttcttggataattattaatagtgctttcattctcaatgtctcactttagataataaattacagaggattggtgaaactaatttgcccaatggaaaaaggaatgaagaagtgctttaggtactgagatgaaaagatctctaaggcataataatgtttattgagaaaagcatggtgtcaaactgtatggcatgctacaattgatgtataagaagaaaaaatgtgtatgtattcctatttgtttgtatatggtagactgtctctgaagacatatatggaagaacctgatcacattggtagtctccaaggagcagaactagatacctgggggataaggatcccaggagtgagccttttcattgtaaacttcattgtactttgagtttttaactgttcaaaaataataaaattagaaataaaatatttcaacaaacaat

SEQ ID NO: 1828 - protein, 70 aa, Homosapiens; identical to SEQ ID NO: 1824

SEQ ID NO: 1829 - DNA, 4228 bp, Homosapiens
ggaggggaggggcgcggccgccggacgcgccctcgcagcttccgccgggcccctccggaaatcccgtatcgtagggcgacggcggcttagaaagtgcttcctggagcgcagacgaggtcatgaatcatgtgacggtggcttgaggaggaacctgtctttaaagctgtccctgaagtgacagcggagagaaccaggcagcccagaaaccccaggcgtggagattgatcctgcgagagaagggggttcatcatggcggatgacctaaagcgattcttgtataaaaagttaccaagtgttgaagggctccatgccattgttgtgtcagatagagatggagtacctgttattaaagtggcaaatgacaatgctccagagcatgctttgcgacctggtttcttatccacttttgcccttgcaacagaccaaggaagcaaacttggactttccaaaaataaaagtatcatctgttactataacacctaccaggtggttcaatttaatcgtttacctttggtggtgagtttcatagccagcagcagtgccaatacaggactaattgtcagcctagaaaaggaacttgctccattgtttgaagaactgagacaagttgtggaagtttcttaatctgacagtggtttcagtgtgtaccttatcttcattataacaacacaatatcaatccagcaatctttagactacaataatacttttatccatgtgctcaagaaagggcccctttttccaacttatactaaagagctagcatatagatgtaatttatagatagatcagttgctatattttctggtgtagggtctttcttatttagtgagatctagggataccacagaaatggttcagtctatcacagctcccatggagttagtctggtcaccagatatggatgagagattctattcagtggatcagaatcaaactggtacattgatccacttgagccgttaagtgctgccaattgtacaatatgcccaggcttgcagaataaagccaactttttattgtgaataataataaggacatatttttcttcagattatgttttatttctttgcattgagtgaggaacataaaatggcttggtaaaagtaataaaatcagtacaatcactaactttcctttgtacatattattttgcagtatagatgaatattactaatcagtttgattattctcagagggtgctgctctttaatgaaaatgaaaattatagctaatgttttttcctcaaactctgctttctgtaaccaatcagtgttttaatgtttgtgtgttcttcataaaatttaaatacaattcgttattctgtttccaatgttagtatgtatgtaaacatgatagtacagccatttttttcatatgtgagtaaaaataaaatagtatttttaaaaatatagtttgagcactgtataggtcctttttttgttcagactttttccaaaaatctaaacataattaatatactctttcagccacatgaataaataatgagtgtttcttgtaggtattggtttggagattgttttacggtagtatgaactgttaactggaaaagaaacctgagattgcagtcagccaagattgtgccactgcaccccagcctgggcaacagagactccgtctcaaaaacaaaaaagaaaagaaaccaagaaacctcaggcatgaacctaatttaatctccatgaaagaggtactacagttctagaatataccctttatgttcaggaatgcagtctatcattcagagttaatttctttctaggctctttgacaatcagtttttccctggatcagttcagtacatatgcattgagcacctgtgtgccagtcagccgagctatcacattgcacaattctaagaagcaccattcatgtctcatcatatttctatgctctgggagttgcctttcacatagaatatgtgtgattgttatccctagaattgtgcagtgaggcaattggctaggtgctgtgctgctttttctttctttctttttttttttaagagacagagtcttgctgtgttgcccagtctggagtgcagtggtggcatgatcttgcctcactgtaacctctgcctcctgggttcaagctgttctcatgccccattctcccttgtagctgggattacaggcttacaccatcgcacttggcaaatttgtgtatttttagtagagacaggaattcaccatgttggccaggctggtcttgaactcctgacttaaagtgatccacctgctttggcctcccaaaatgctaggattataggtgtgagccactgcaccgggccatgtgctactttttcttccttccatccttcctcccttcttcagtgtaaatatgagattaatttgtgataccttactttaaagaacttagagttcagtaaaggaagcaggtatagaaagtgctatgataaagctatacataggatggtatagaaccacagactaggggcacttaaaatgggcaagaaaatagcctttgtaaataaaatagaggcaagagatataatgctttacctgcaaagagctataaatacagccatgtaccatataatgatgtttcagttagtgaaggaccacatacgagggtggtcagaacagcaggctataccatatagcctaggtgtgtagtaggctataccatatagcctaggtgtgtagtagtaggctataccatatagcctaggtgtgtagtagtaggcgataccatatagcctaggtgtgtagtagtaggctataccatatagcctaggtgtatagtagtaggctataccatatagcctaggtgtgtagtaggctataccatatagcctaggtatgtagtagtaggctataccatatagcctaggtgtgtagtagtaggctataccatctggggttcctgtcagtacagtatgatgttcacataatgatgaaatcacctaacaaagcatgtctcgaaatgtatccacattgttacgtaacacatgactgtagttaattgttacaattgaaatactagatgtactcattgaaatccagaattcccattatctggattatttaatatcgttcaggaaatttttgccagtgcaatggtgcatgaaacaatgtcttttagaaatgaggtggccagatttctatttgcagataataattgtatatctaaaaatcctagaaaaagaaatgataacaaatggagctacttaacctttacatgttgaatgctgccactgttaaaatttctgagggggtataatagataaactatcccatagttcatctggaaaaataaggtggtgaaaattgctaagaaatttttgaaagggtaatgtaaacctagattaactgtttttgaaaggtagtacagaactgaatgcacaactagatatcaatggtatgtactcacccagaaaaaagacttcagtacatacatgtgagggcttaaaacattgttataaagacgggatcacaatgggaaaaggattattcaataagtagggcaggcattctctatgcctgctagggaagtgtgacttgttatactctttatgtacagcaattggcagtctgtgaaacttttaaattcatatacataaccttttgccctgcaattccacttctagaaatttatcctaccaaacaaagcacatagatgtgcaaaagtatgtatttacaagtatattctttgcaacttggtaatgtcaaagaattggaagcaacctaaatatctgccataggtaggataaccatatgctttggctttttgaacactaccagtttatacctgctgttcttggataattattaatagtgctttcattctcaatgtctcactttagataataaattacagaggattggtgaaactaatttgcccaatggaaaaaggaatgaagaagtgctttaggtactgagatgaaaagatctctaaggcataataatgtttattgagaaaagcatggtgtcaaactgtatggcatgctacaattgatgtataagaagaaaaaatgtgtatgtattcctatttgtttgtatatggtagactgtctctgaagacatatatggaagaacctgatcacattggtagtctccaaggagcagaactagatacctgggggataaggatcccaggagtgagccttttcattgtaaacttcattgtactttgagtttttaactgttcaaaaataataaaattagaaataaaatatttcaacaaacaat

SEQ ID NO: 1830 - protein, 124 aa, Homosapiens; identical to SEQ ID NO: 173

SEQ ID NO: 1831 - DNA, 1366 bp, Homosapiens
ggaggggaggggcgcggccgccggacgcgccctcgcagcttccgccgggcccctccggaaatcccgtatcgtagggcgacggcggcttagaaagtgcttcctggagcgcagacgaggtcatgaatcatgtgacggtggcttgaggaggaacctgtctttaaagctgtccctgaagtgacagcggagagaaccaggcagcccagaaaccccaggacctaaagcgattcttgtataaaaagttaccaagtgttgaagggctccatgccattgttgtgtcagatagagatggagtacctgttattaaagtggcaaatgacaatgctccagagcatgctttgcgacctggtttcttatccacttttgcccttgcaacagaccaaggaagcaaacttggactttccaaaaataaaagtatcatctgttactataacacctaccaggtggttcaatttaatcgtttacctttggtggtgagtttcatagccagcagcagtgccaatacaggactaattgtcagcctagaaaaggaacttgctccattgtttgaagaactgagacaagttgtggaagtttcttaatctgacagtggtttcagtgtgtaccttatcttcattataacaacacaatatcaatccagcaatctttagactacaataatacttttatccatgtgctcaagaaagggcccctttttccaacttatactaaagagctagcatatagatgtaatttatagatagatcagttgctatattttctggtgtagggtctttcttatttagtgagatctagggataccacagaaatggttcagtctatcacagctcccatggagttagtctggtcaccagatatggatgagagattctattcagtggatcagaatcaaactggtacattgatccacttgagccgttaagtgctgccaattgtacaatatgcccaggcttgcagaataaagccaactttttattgtgaataataataaggacatatttttcttcagattatgttttatttctttgcattgagtgaggaacataaaatggcttggtaaaagtaataaaatcagtacaatcactaactttcctttgtacatattattttgcagtatagatgaatattactaatcagtttgattattctcagagggtgctgctctttaatgaaaatgaaaattatagctaatgttttttcctcaaactctgctttctgtaaccaatcagtgttttaatgtttgtgtgttcttcataaaatttaaatacaattcgttattctgtttccaatgttagtatgtatgtaaacatgatagtacagccatttttttcatatgtgagtaaaaataaaatagtatttttaaaaatat

SEQ ID NO: 1832 - protein, 70 aa, Homosapiens; identical to SEQ ID NO: 1824

SEQ ID NO: 1833 - DNA, 1412 bp, Homosapiens
ggaggggaggggcgcggccgccggacgcgccctcgcagcttccgccgggcccctccggaaatcccgtatcgtagggcgacggcggcttagaaagtgcttcctggagcgcagacgaggtcatgaatcatgtgacggtggcttgaggaggaacctgtctttaaagctgtccctgaagtgacagcggagagaaccaggcagcccagaaaccccaggcgtggagattgatcctgcgagagaagggggttcatcatggcggatgacctaaagcgattcttgtataaaaagttaccaagtgttgaagggctccatgccattgttgtgtcagatagagatggagtacctgttattaaagtggcaaatgacaatgctccagagcatgctttgcgacctggtttcttatccacttttgcccttgcaacagaccaaggaagcaaacttggactttccaaaaataaaagtatcatctgttactataacacctaccaggtggttcaatttaatcgtttacctttggtggtgagtttcatagccagcagcagtgccaatacaggactaattgtcagcctagaaaaggaacttgctccattgtttgaagaactgagacaagttgtggaagtttcttaatctgacagtggtttcagtgtgtaccttatcttcattataacaacacaatatcaatccagcaatctttagactacaataatacttttatccatgtgctcaagaaagggcccctttttccaacttatactaaagagctagcatatagatgtaatttatagatagatcagttgctatattttctggtgtagggtctttcttatttagtgagatctagggataccacagaaatggttcagtctatcacagctcccatggagttagtctggtcaccagatatggatgagagattctattcagtggatcagaatcaaactggtacattgatccacttgagccgttaagtgctgccaattgtacaatatgcccaggcttgcagaataaagccaactttttattgtgaataataataaggacatatttttcttcagattatgttttatttctttgcattgagtgaggaacataaaatggcttggtaaaagtaataaaatcagtacaatcactaactttcctttgtacatattattttgcagtatagatgaatattactaatcagtttgattattctcagagggtgctgctctttaatgaaaatgaaaattatagctaatgttttttcctcaaactctgctttctgtaaccaatcagtgttttaatgtttgtgtgttcttcataaaatttaaatacaattcgttattctgtttccaatgttagtatgtatgtaaacatgatagtacagccatttttttcatatgtgagtaaaaataaaatagtatttttaaaaatat

SEQ ID NO: 1834 - protein, 124 aa, Homosapiens; identical to SEQ ID NO: 173

SEQ ID NO: 1835 - DNA, 2294 bp, Homosapiens
gctttattagctcctctaactggtattctaacagtttagcagcacttatatttattaatgctttacatttttacccctttttgtgtaaacacaaatacacccatgcatatacacacaaacattattgtccttgtgagggtttgggggaaatgaaaaatagtacctttctcctcttcttttgattccttagttcccaaatagactggtgctagtcatttagtcatctgtaaatttcgaaatgtagtttgattaaatgtgaactgaattctcagcaatgaaaaatgtcaagttgaattcatctaataagtgaaaataatatattttgtaaacagattacatttgaacacctaaataagtatttgtttcataatcattacatgcttgtttatgatttacaaagatttggtagagaaaagtacagtccttaaggcatatatatgccaatgcattaaactactcagcttttgtgccagctcaggtgttcataggaacaggaatgtggaataccagctttttactttaattatacttttatgctgaatttttcttccagttaaacctttaattacactagtatgtaaagtagttactgagaaaaataagtttttgatttcccttctgttgatctgtaacatttttaaatgaagctatttaacacatgacatgctaatgttacttaatggattcctatgtatttcattaaaaaaaagtctcccacctgtgttaagacagctaaatatttcttgatgttggcttgaggaccaagtgagccatcttgccagttaagcaagttttatatcagaggaccaaatggttaagaagagaatttgtacatttcttgagcttccccatgtgaagcttgggttcagtactatcctattactatccatcttcataatgagtgaagcaaactgaaagggaattcataatcttttttcttatctgaacagaaaaactaatgaaaatcaacaataaatctttattttaattttcattcaacagctgaaaaaccatgtctgttgaccacattggaccattgcctagttaaaatccataaaattccctataaaccaatgaaaagaaacttgtctggcaataatttccaacattttaaattctaatttttagttacaaagaaaaaggatagaatgaggcttttcaaggaattcttgctcatcccttcaattatttggcaggtaaaacagtcctagaattcagtttttcctgttggtatgtgatatttttcatttaatatgactatctgctggtgttggggccaatagatttgtgaatattctgtggatgtgtctatgtataggtgtatatatatatatatatatttttttttttttttcccagctaattacctcaaatgtgtgattgtttaatatataccacactatgtttgcacagagcagggcttccattagcagtggatatttttatgtctgactttgaaaatcagtcaacacaatttcattggtgtgaattatttgttgctctttttcatattttaatggagagattcctattataaggcccatgcttcaaacataattatatctttctatatccagccatctggaaatacataggggtaagaagtatttcttgaaatgtccttgtttagtaagttagtaaaaactgggatgactagttgccaagatgtcttgtaactgcatagcagatgacacctggcatggcaagtctcattcacttcagcacaacactctgtacatttcagtctgatattctactttgccatttaaggacaccattaaaatcatagagattttcagtgacattggagtattgtaattattactttcaaaaaattatttttaataggatgattaaaccaatgagaagaaacacacataaatgatattttgcagtttatctgtattaagaaatgcttcttgccaatttctagttttagtttttggattgctacataagactttctttccatttactttatgtgtttttaaaagctgcaggtaatttttaaggtttgatggaattataatggaagccttgtataagttaaatgaaattggtaaaggagagcttactttgtctataatgcattcaggattaaaaattagatttcaaaatgaaatgtctgatttgtaaaatatttaatgttatatcagacttacataaaattttctgtgagaactcaaatgcatttgatttttaatgaatgttctgaatgaaatatgaatttttgtctttcagtctctgtagtttatctcaatatattaataaaaaggtctgttctcactgtaaaa

SEQ ID NO: 1836 - protein, 54 aa, Homosapiens [sequence omitted]

SEQ ID NO: 1837 - DNA, 5380 bp, Homosapiens
aaatggaagagctggttatagccaacaacatcagcatcgacatagtggacatgaaagagaagaggaaagaggagatcaatttaattacatgaagtggaaaggtaaatggaaagagcactagactagaaattaaaaggcctggcccccagctttgccactcatcagctcccatcttctaccctcaaatccaagggaggtttttctgtgtttatccagctgatgcccataattgtattgatcctcgtgtcattattaagccagttgatggtctctaatcctccttattccttatatcccagatctggaactgggcaaactattaaaatgcaaacagaaaacttgggtgttgtttattatgtcaacaaggacttcaaaaatgaatataaaggaatgttattacaaaaggtagaaaagagtgtggaggaagattatgtgactaatattcgaaataactgctggaaagaaagacaacaaaaaacagatatgcagtatgcagcaaaagtataccgtgatgatcgactccgaaggaaggcagatgccttgagcatggacaactgtaaagaattagagcggcttaccagtctttataaaggaggatgaactggaatttttatttataccttttagcgtactctttattttttctgtaagtaagtttggtttcatcatgagggatgaaggaaaagatttgatactgaaaactaaactgaatagttggttcctgaaatcttggactgtttatgacctactggctcctttaaatagtaactgaaaactaaaatggaatattttagttaacgcttctacaagtattttcattttaaaagcttacatgattcctaactaaagtgtcatgagaaaggattatcacacctgtagcaatttccagttttagtgattctccattttttcccttgtcatgtaaatatttatggaatgatcattttgtgtacatacaggttactgcttttttatttaaattcttttagtgtttagctccatgagacacttcagtttaaattgatggaataaatgttatatgacacatttacattttccttatcaaggtgtcaaatatgtggactttaaacaatgaaactttttcaaaaagaaaaaacaaaaactttaactttgtgtaaaatcttatagtattatcagcttagagggaattgatatttttaatattgccgttatattccaaaatatatattgagataaatgaactggtgtagaatatcagtttgctatttagttttatgaattactatacatatacatgcatagaaatgaaatgctatactgataaattttaaagaaaatatgaggaaatggctataaatattaaactaaaagggtcttcaacagtaaagtgcagttatgtcatttaaaattccaatactttaaaggccaccaaattttgatgtatatgtccttgaagggctgctaaaatttatgaagaggactcacattttcccccatagaaatttgcagtttcttggtgatcatttaagcaggatccaaagaagttcctttacaaataagtaataagaaaaatgagtactaaaatacagctttgtgccttttaaccctatgccaactcctaaacatataagtagattacagtatacttatctgatcagagcatgatctgtttggccacatgcaagtgtgagcagaaatagagcagcacgtagaatagtaacttaaagcaagtcatcctttaaaaattctgagctaaaatctatttaccattgagtaattgaattaatcccataggaataagctccttgtaagtaaatccatgatatgaattagaaaaaaaaaacagctggaaattgaagtttttgatgcctgtatactggatatgaaactatttgatttctagtcttctgtgtttagcagttgtaatattttaatgattttgcttcatactcggttaatggaacataaacatatctttgatacttctttgtgagtgagagaatgctagatagggtggctttgttctttgtttaagttttttttcctgaatgtagttaatttatggcatctgttgaataaaactgctaaaatgacctcttaaaaatgttctgttgtatccccttttccaggtgaatcaatagaaatgcctgattgaattagtaggttaaactaaacaacatactgtcataggaaaactggagagcttaaccaacttgctcttagaaatgttaccttaaaaaaaaaaaaaaagcagtgcttaagagaaaatacaattttaattattttgttgagcctgcagagtaagtttttaaaaatataagttcatagcattttaattaactttgaaagttcatatgcatcagaaaatttatgaaaatttgaatgaaaaaaatttcatctatttatttttctaattttaatggcaaatttacactattatggctgataattctgtgaacttaccttcttgttgactgattctttttcccttaatcccagctttaaggagataggtgaagttattgtacaaagttaagtgataccataaagtatatattataaagtcatacatggcttttggacagtattatatttcagttgcagtgctgcattccattaaatttcataaaatgctagggaaaatgtgtttgataaaattttctgcagtgagaaatgacagactgagtgcctgacaatttaagccacatatgaagtatgcaagtaaagattcagtccttaatgtcatctatatcatggtataaaagctcaacaagtatcttataatttggagttaactttataaagtaagaagagtttggatatcttgataaaagattttcatgtttgctgctttttttataataaaaatcccaacattttgccatcttatgtttagctacatgaacttcgcaatttcatcggctcattctaatgaccacctaaaagtcctcaatctttgaatattgctttattagctcctctaactggtattctaacagtttagcagcacttatatttattaatgctttacatttttacccctttttgtgtaaacacaaatacacccatgcatatacacacaaacattattgtccttgtgagggtttgggggaaatgaaaaatagtacctttctcctcttcttttgattccttagttcccaaatagactggtgctagtcatttagtcatctgtaaatttcgaaatgtagtttgattaaatgtgaactgaattctcagcaatgaaaaatgtcaagttgaattcatctaataagtgaaaataatatattttgtaaacagattacatttgaacacctaaataagtatttgtttcataatcattacatgcttgtttatgatttacaaagatttggtagagaaaagtacagtccttaaggcatatatatgccaatgcattaaactactcagcttttgtgccagctcaggtgttcataggaacaggaatgtggaataccagctttttactttaattatacttttatgctgaatttttcttccagttaaacctttaattacactagtatgtaaagtagttactgagaaaaataagtttttgatttcccttctgttgatctgtaacatttttaaatgaagctatttaacacatgacatgctaatgttacttaatggattcctatgtatttcattaaaaaaaagtctcccacctgtgttaagacagctaaatatttcttgatgttggcttgaggaccaagtgagccatcttgccagttaagcaagttttatatcagaggaccaaatggttaagaagagaatttgtacatttcttgagcttccccatgtgaagcttgggttcagtactatcctattactatccatcttcataatgagtgaagcaaactgaaagggaattcataatcttttttcttatctgaacagaaaaactaatgaaaatcaacaataaatctttattttaattttcattcaacagctgaaaaaccatgtctgttgaccacattggaccattgcctagttaaaatccataaaattccctataaaccaatgaaaagaaacttgtctggcaataatttccaacattttaaattctaatttttagttacaaagaaaaaggatagaatgaggcttttcaaggaattcttgctcatcccttcaattatttggcaggtaaaacagtcctagaattcagcttcctttttggttttattactattaaatagatactttcatataaatggaaacacttttcctcaaaacattaattcaaaacatactccttatattaaggattatagcaccatattttttgtatattccctatgtgtaactttttcctgttggtatgtgatatttttcatttaatatgactatctgctggtgttggggccaatagatttgtgaatattctgtggatgtgtctatgtataggtgtatatatatatatatatatttttttttttttttcccagctaattacctcaaatgtgtgattgtttaatatataccacactatgtttgcacagagcagggcttccattagcagtggatatttttatgtctgactttgaaaatcagtcaacacaatttcattggtgtgaattatttgttgctctttttcatattttaatggagagattcctattataaggcccatgcttcaaacataattatatctttctatatccagccatctggaaatacataggggtaagaagtatttcttgaaatgtccttgtttagtaagttagtaaaaactgggatgactagttgccaagatgtcttgtaactgcatagcagatgacacctggcatggcaagtctcattcacttcagcacaacactctgtacatttcagtctgatattctactttgccatttaaggacaccattaaaatcatagagattttcagtgacattggagtattgtaattattactttcaaaaaattatttttaataggatgattaaaccaatgagaagaaacacacataaatgatattttgcagtttatctgtattaagaaatgcttcttgccaatttctagttttagtttttggattgctacataagactttctttccatttactttatgtgtttttaaaagctgcaggtaatttttaaggtttgatggaattataatggaagccttgtataagttaaatgaaattggtaaaggagagcttactttgtctataatgcattcaggattaaaaattagatttcaaaatgaaatgtctgatttgtaaaatatttaatgttatatcagacttacataaaattttctgtgagaactcaaatgcatttgatttttaatgaatgttctgaatgaaatatgaatttttgtctttcagtctctgtagtttatctcaatatattaataaaaaggtctgttctcactgtaaaa

SEQ ID NO: 1838 - protein, 126 aa, Homosapiens
MPIIVLILVSLLSQLMVSNPPYSLYPRSGTGQTIKMQTENLGVVYYVNKDFKNEYKGMLLQKVEKSVEEDYVTNIRNNCWKERQQKTDMQYAAKVYRDDRLRRKADALSMDNCKELERLTSLYKGG

SEQ ID NO: 1839 - DNA, 7947 bp, Homosapiens
gagaaggttttactcttttagaaagcagcagattgtaaaaagtgtgacaaacacatgtagctgatgaaaaggagcatgatgaacaacagtatgaatgaaaataattatatgaatgataatttctcattcaggtgtgaaaacttaggtgaatgggtatatttggagcattacttcaaatacatagtcttcaggctgtccattggtgatgatgactgtaacttctggcttctcaagaatttcttctctaatatatgatgaaaaatttagtgcagaggagatatggtggagctggatacagctaagagttagtgaaataactgtttttcatgtctggcccccccttttttttttgtttgtctgtggcaattcttagctttatgaccctatctagagcactgcaaattttcacctactttgtctacagtatccagctgtctttttaagttgaccaggcttttgtgctcagtaattataaacaagacaatttagaggcttaatctggaacataattaaacatcctacacactcaaaccaagtagtaatggctttaggattgttcagtgtttaatttaccttttattttttgcattcaggtagtgtctgccatattcgtacctctccaccttgtctcacagtctgtttcacttctattaactgcttctcttctattccaaatgatttttagtactaactacattttcatgacagcattcatcacatttgatctgaacgtgactttttagatcctcaccatttctgctctcaaattgaaagtcatttgtccatccatccaacatatatggtgaacaaaacataatccctgccttcaaagaatctgtgatctagaagtgttatcagacaagtaaagaggcaactgtagtacactttggtaattgttgggataaggctaagttcagaggatgtggggaggatataagaggggcagcaaacctagtcctgaggaatttggattcttaggaaaaggaagagctaagtcagggtccggagaagttgtagaaactagctaaccaagaagagaggcagagaaggtgtgctcagcaccaaaagcaattgcaaagatctaggaggtaagagagtcagcttcaatactgatggtaagaaagaaataggaagatgataggtcactttgaagtctgaagggtatccttttttctgtattccagttctgagacagcaagattttcaagtcagataaacagatttgaattcttaactgtgaggccttcctttattacttatttgaaatagaaggcctgcccttcctttctctgtttctattagcttctttatttttctccagatatttatcaccatatgatgtacattatattttacttatatatttgtttattgcttgtttttctcccaattgtaaatttaatgtgattttgactgttttattcaccactgtagcatctgaaattgtgcctaacagaaagtaaatggttagtaaatttttgttgaagaaataagtccttattctcatctgttacttggttatgtgaatttaggcaatttacttaaccattcaaagattggtttccttattggttaaataggaataatatctaccaaatgaggagtaaatgagataatttgtgtaaaataatcagtataataaaattctacaattctttatgtgaaatctttgtgaccaaatgcaatttggaattcagaattcttcatattttagaaaggtactaatatagtcggctctccacatctatgggttctgcatctgtggatttaaccaactttgaattgaaagtatttggtgaaaaataacaatacaacaataaaaaataatacaaattaaacaaccaatatagtgtaacaaccatttacgtagcatttacattgtcttaggtactatttataacctagagattatttaaagtacatgggaagatgtgtaaaggttgtatgtaaatactgtaccattttatatcagggatttgagcatctgtagattttggtattcaaggagggaggatcctggaactaatcccctgtggataccaagggatgacagtgtattttatattatacatcttagagtctagggcagcagtccataacaaatagtaacatttctacagcaaaacatacaggtattcacacttaaatgggataaatgaagattctgtagtagcttcacatcttttcggtcagatttttgcctagaggcaaaatctacagttgaattcagttttttatgcagtcaaattagttatagaataactttgatttttcagagctttatggatattggaacattgatatgggatggtggacctgtacctaacacacacataaacaaatgtaaaaattactatgaagtacttggagttacgaaagatgctggtgatgaagatttgaaaaaagcttatagaaagcttgctttgaagtttcatccagacaaaaaccatgcacctggagcaacagatgcttttaaaaagattggaaatgcttatgctgttttaagtaatccagaaaagcgaaaacagtatgacctcacgggcaatgaagaacaagcatgtaaccaccaaaacaatggcagatttaatttccatagaggttgtgaagctgatataactccagaagacttgtttaatatattttttgggggtggatttccttcaggtagtgtacattctttttcaaatggaagagctggttatagccaacaacatcagcatcgacatagtggacatgaaagagaagaggaaagaggagatggaggtttttctgtgtttatccagctgatgcccataattgtattgatcctcgtgtcattattaagccagttgatggtctctaatcctccttattccttatatcccagatctggaactgggcaaactattaaaatgcaaacagaaaacttgggtgttgtttattatgtcaacaaggacttcaaaaatgaatataaaggaatgttattacaaaaggtagaaaagagtgtggaggaagattatgtgactaatattcgaaataactgctggaaagaaagacaacaaaaaacagatatgcagtatgcagcaaaagtataccgtgatgatcgactccgaaggaaggcagatgccttgagcatggacaactgtaaagaattagagcggcttaccagtctttataaaggaggatgaactggaatttttatttataccttttagcgtactctttattttttctgtaagtaagtttggtttcatcatgagggatgaaggaaaagatttgatactgaaaactaaactgaatagttggttcctgaaatcttggactgtttatgacctactggctcctttaaatagtaactgaaaactaaaatggaatattttagttaacgcttctacaagtattttcattttaaaagcttacatgattcctaactaaagtgtcatgagaaaggattatcacacctgtagcaatttccagttttagtgattctccattttttcccttgtcatgtaaatatttatggaatgatcattttgtgtacatacaggttactgcttttttatttaaattcttttagtgtttagctccatgagacacttcagtttaaattgatggaataaatgttatatgacacatttacattttccttatcaaggtgtcaaatatgtggactttaaacaatgaaactttttcaaaaagaaaaaacaaaaactttaactttgtgtaaaatcttatagtattatcagcttagagggaattgatatttttaatattgccgttatattccaaaatatatattgagataaatgaactggtgtagaatatcagtttgctatttagttttatgaattactatacatatacatgcatagaaatgaaatgctatactgataaattttaaagaaaatatgaggaaatggctataaatattaaactaaaagggtcttcaacagtaaagtgcagttatgtcatttaaaattccaatactttaaaggccaccaaattttgatgtatatgtccttgaagggctgctaaaatttatgaagaggactcacattttcccccatagaaatttgcagtttcttggtgatcatttaagcaggatccaaagaagttcctttacaaataagtaataagaaaaatgagtactaaaatacagctttgtgccttttaaccctatgccaactcctaaacatataagtagattacagtatacttatctgatcagagcatgatctgtttggccacatgcaagtgtgagcagaaatagagcagcacgtagaatagtaacttaaagcaagtcatcctttaaaaattctgagctaaaatctatttaccattgagtaattgaattaatcccataggaataagctccttgtaagtaaatccatgatatgaattagaaaaaaaaaacagctggaaattgaagtttttgatgcctgtatactggatatgaaactatttgatttctagtcttctgtgtttagcagttgtaatattttaatgattttgcttcatactcggttaatggaacataaacatatctttgatacttctttgtgagtgagagaatgctagatagggtggctttgttctttgtttaagttttttttcctgaatgtagttaatttatggcatctgttgaataaaactgctaaaatgacctcttaaaaatgttctgttgtatccccttttccaggtgaatcaatagaaatgcctgattgaattagtaggttaaactaaacaacatactgtcataggaaaactggagagcttaaccaacttgctcttagaaatgttaccttaaaaaaaaaaaaaaagcagtgcttaagagaaaatacaattttaattattttgttgagcctgcagagtaagtttttaaaaatataagttcatagcattttaattaactttgaaagttcatatgcatcagaaaatttatgaaaatttgaatgaaaaaaatttcatctatttatttttctaattttaatggcaaatttacactattatggctgataattctgtgaacttaccttcttgttgactgattctttttcccttaatcccagctttaaggagataggtgaagttattgtacaaagttaagtgataccataaagtatatattataaagtcatacatggcttttggacagtattatatttcagttgcagtgctgcattccattaaatttcataaaatgctagggaaaatgtgtttgataaaattttctgcagtgagaaatgacagactgagtgcctgacaatttaagccacatatgaagtatgcaagtaaagattcagtccttaatgtcatctatatcatggtataaaagctcaacaagtatcttataatttggagttaactttataaagtaagaagagtttggatatcttgataaaagattttcatgtttgctgctttttttataataaaaatcccaacattttgccatcttatgtttagctacatgaacttcgcaatttcatcggctcattctaatgaccacctaaaagtcctcaatctttgaatattgctttattagctcctctaactggtattctaacagtttagcagcacttatatttattaatgctttacatttttacccctttttgtgtaaacacaaatacacccatgcatatacacacaaacattattgtccttgtgagggtttgggggaaatgaaaaatagtacctttctcctcttcttttgattccttagttcccaaatagactggtgctagtcatttagtcatctgtaaatttcgaaatgtagtttgattaaatgtgaactgaattctcagcaatgaaaaatgtcaagttgaattcatctaataagtgaaaataatatattttgtaaacagattacatttgaacacctaaataagtatttgtttcataatcattacatgcttgtttatgatttacaaagatttggtagagaaaagtacagtccttaaggcatatatatgccaatgcattaaactactcagcttttgtgccagctcaggtgttcataggaacaggaatgtggaataccagctttttactttaattatacttttatgctgaatttttcttccagttaaacctttaattacactagtatgtaaagtagttactgagaaaaataagtttttgatttcccttctgttgatctgtaacatttttaaatgaagctatttaacacatgacatgctaatgttacttaatggattcctatgtatttcattaaaaaaaagtctcccacctgtgttaagacagctaaatatttcttgatgttggcttgaggaccaagtgagccatcttgccagttaagcaagttttatatcagaggaccaaatggttaagaagagaatttgtacatttcttgagcttccccatgtgaagcttgggttcagtactatcctattactatccatcttcataatgagtgaagcaaactgaaagggaattcataatcttttttcttatctgaacagaaaaactaatgaaaatcaacaataaatctttattttaattttcattcaacagctgaaaaaccatgtctgttgaccacattggaccattgcctagttaaaatccataaaattccctataaaccaatgaaaagaaacttgtctggcaataatttccaacattttaaattctaatttttagttacaaagaaaaaggatagaatgaggcttttcaaggaattcttgctcatcccttcaattatttggcaggtaaaacagtcctagaattcagcttcctttttggttttattactattaaatagatactttcatataaatggaaacacttttcctcaaaacattaattcaaaacatactccttatattaaggattatagcaccatattttttgtatattccctatgtgtaactttttcctgttggtatgtgatatttttcatttaatatgactatctgctggtgttggggccaatagatttgtgaatattctgtggatgtgtctatgtataggtgtatatatatatatatatatttttttttttttttcccagctaattacctcaaatgtgtgattgtttaatatataccacactatgtttgcacagagcagggcttccattagcagtggatatttttatgtctgactttgaaaatcagtcaacacaatttcattggtgtgaattatttgttgctctttttcatattttaatggagagattcctattataaggcccatgcttcaaacataattatatctttctatatccagccatctggaaatacataggggtaagaagtatttcttgaaatgtccttgtttagtaagttagtaaaaactgggatgactagttgccaagatgtcttgtaactgcatagcagatgacacctggcatggcaagtctcattcacttcagcacaacactctgtacatttcagtctgatattctactttgccatttaaggacaccattaaaatcatagagattttcagtgacattggagtattgtaattattactttcaaaaaattatttttaataggatgattaaaccaatgagaagaaacacacataaatgatattttgcagtttatctgtattaagaaatgcttcttgccaatttctagttttagtttttggattgctacataagactttctttccatttactttatgtgtttttaaaagctgcaggtaatttttaaggtttgatggaattataatggaagccttgtataagttaaatgaaattggtaaaggagagcttactttgtctataatgcattcaggattaaaaattagatttcaaaatgaaatgtctgatttgtaaaatatttaatgttatatcagacttacataaaattttctgtgagaactcaaatgcatttgatttttaatgaatgttctgaatgaaatatgaatttttgtctttcagtctctgtagtttatctcaatatattaataaaaaggtctgttctcactgtaaaa

SEQ ID NO: 1840 - protein, 294 aa, Homosapiens; identical to SEQ ID NO: 177

SEQ ID NO: 1841 - DNA, 5765 bp, Homosapiens
ggaagaaggagcaagctatggaggggaacagggatgaggctgagaaatgtgtcgagatcgcccgggaggccctgaacgccggcaaccgcgagaaggcccagcgcttcctgcagaaggccgagaagctctacccactgccctcggcccgcgcataaacaaatgtaaaaattactatgaagtacttggagttacgaaagatgctggtgatgaagatttgaaaaaagcttatagaaagcttgctttgaagtttcatccagacaaaaaccatgcacctggagcaacagatgcttttaaaaagattggaaatgcttatgctgttttaagtaatccagaaaagcgaaaacagtatgacctcacgggcaatgaagaacaagcatgtaaccaccaaaacaatggcagatttaatttccatagaggttgtgaagctgatataactccagaagacttgtttaatatattttttgggggtggatttccttcaggtagtgtacattctttttcaaatggaagagctggttatagccaacaacatcagcatcgacatagtggacatgaaagagaagaggaaagaggagatggaggtttttctgtgtttatccagctgatgcccataattgtattgatcctcgtgtcattattaagccagttgatggtctctaatcctccttattccttatatcccagatctggaactgggcaaactattaaaatgcaaacagaaaacttgggtgttgtttattatgtcaacaaggacttcaaaaatgaatataaaggaatgttattacaaaaggtagaaaagagtgtggaggaagattatgtgactaatattcgaaataactgctggaaagaaagacaacaaaaaacagatatgcagtatgcagcaaaagtataccgtgatgatcgactccgaaggaaggcagatgccttgagcatggacaactgtaaagaattagagcggcttaccagtctttataaaggaggatgaactggaatttttatttataccttttagcgtactctttattttttctgtaagtaagtttggtttcatcatgagggatgaaggaaaagatttgatactgaaaactaaactgaatagttggttcctgaaatcttggactgtttatgacctactggctcctttaaatagtaactgaaaactaaaatggaatattttagttaacgcttctacaagtattttcattttaaaagcttacatgattcctaactaaagtgtcatgagaaaggattatcacacctgtagcaatttccagttttagtgattctccattttttcccttgtcatgtaaatatttatggaatgatcattttgtgtacatacaggttactgcttttttatttaaattcttttagtgtttagctccatgagacacttcagtttaaattgatggaataaatgttatatgacacatttacattttccttatcaaggtgtcaaatatgtggactttaaacaatgaaactttttcaaaaagaaaaaacaaaaactttaactttgtgtaaaatcttatagtattatcagcttagagggaattgatatttttaatattgccgttatattccaaaatatatattgagataaatgaactggtgtagaatatcagtttgctatttagttttatgaattactatacatatacatgcatagaaatgaaatgctatactgataaattttaaagaaaatatgaggaaatggctataaatattaaactaaaagggtcttcaacagtaaagtgcagttatgtcatttaaaattccaatactttaaaggccaccaaattttgatgtatatgtccttgaagggctgctaaaatttatgaagaggactcacattttcccccatagaaatttgcagtttcttggtgatcatttaagcaggatccaaagaagttcctttacaaataagtaataagaaaaatgagtactaaaatacagctttgtgccttttaaccctatgccaactcctaaacatataagtagattacagtatacttatctgatcagagcatgatctgtttggccacatgcaagtgtgagcagaaatagagcagcacgtagaatagtaacttaaagcaagtcatcctttaaaaattctgagctaaaatctatttaccattgagtaattgaattaatcccataggaataagctccttgtaagtaaatccatgatatgaattagaaaaaaaaaacagctggaaattgaagtttttgatgcctgtatactggatatgaaactatttgatttctagtcttctgtgtttagcagttgtaatattttaatgattttgcttcatactcggttaatggaacataaacatatctttgatacttctttgtgagtgagagaatgctagatagggtggctttgttctttgtttaagttttttttcctgaatgtagttaatttatggcatctgttgaataaaactgctaaaatgacctcttaaaaatgttctgttgtatccccttttccaggtgaatcaatagaaatgcctgattgaattagtaggttaaactaaacaacatactgtcataggaaaactggagagcttaaccaacttgctcttagaaatgttaccttaaaaaaaaaaaaaaagcagtgcttaagagaaaatacaattttaattattttgttgagcctgcagagtaagtttttaaaaatataagttcatagcattttaattaactttgaaagttcatatgcatcagaaaatttatgaaaatttgaatgaaaaaaatttcatctatttatttttctaattttaatggcaaatttacactattatggctgataattctgtgaacttaccttcttgttgactgattctttttcccttaatcccagctttaaggagataggtgaagttattgtacaaagttaagtgataccataaagtatatattataaagtcatacatggcttttggacagtattatatttcagttgcagtgctgcattccattaaatttcataaaatgctagggaaaatgtgtttgataaaattttctgcagtgagaaatgacagactgagtgcctgacaatttaagccacatatgaagtatgcaagtaaagattcagtccttaatgtcatctatatcatggtataaaagctcaacaagtatcttataatttggagttaactttataaagtaagaagagtttggatatcttgataaaagattttcatgtttgctgctttttttataataaaaatcccaacattttgccatcttatgtttagctacatgaacttcgcaatttcatcggctcattctaatgaccacctaaaagtcctcaatctttgaatattgctttattagctcctctaactggtattctaacagtttagcagcacttatatttattaatgctttacatttttacccctttttgtgtaaacacaaatacacccatgcatatacacacaaacattattgtccttgtgagggtttgggggaaatgaaaaatagtacctttctcctcttcttttgattccttagttcccaaatagactggtgctagtcatttagtcatctgtaaatttcgaaatgtagtttgattaaatgtgaactgaattctcagcaatgaaaaatgtcaagttgaattcatctaataagtgaaaataatatattttgtaaacagattacatttgaacacctaaataagtatttgtttcataatcattacatgcttgtttatgatttacaaagatttggtagagaaaagtacagtccttaaggcatatatatgccaatgcattaaactactcagcttttgtgccagctcaggtgttcataggaacaggaatgtggaataccagctttttactttaattatacttttatgctgaatttttcttccagttaaacctttaattacactagtatgtaaagtagttactgagaaaaataagtttttgatttcccttctgttgatctgtaacatttttaaatgaagctatttaacacatgacatgctaatgttacttaatggattcctatgtatttcattaaaaaaaagtctcccacctgtgttaagacagctaaatatttcttgatgttggcttgaggaccaagtgagccatcttgccagttaagcaagttttatatcagaggaccaaatggttaagaagagaatttgtacatttcttgagcttccccatgtgaagcttgggttcagtactatcctattactatccatcttcataatgagtgaagcaaactgaaagggaattcataatcttttttcttatctgaacagaaaaactaatgaaaatcaacaataaatctttattttaattttcattcaacagctgaaaaaccatgtctgttgaccacattggaccattgcctagttaaaatccataaaattccctataaaccaatgaaaagaaacttgtctggcaataatttccaacattttaaattctaatttttagttacaaagaaaaaggatagaatgaggcttttcaaggaattcttgctcatcccttcaattatttggcaggtaaaacagtcctagaattcagcttcctttttggttttattactattaaatagatactttcatataaatggaaacacttttcctcaaaacattaattcaaaacatactccttatattaaggattatagcaccatattttttgtatattccctatgtgtaactttttcctgttggtatgtgatatttttcatttaatatgactatctgctggtgttggggccaatagatttgtgaatattctgtggatgtgtctatgtataggtgtatatatatatatatatatttttttttttttttcccagctaattacctcaaatgtgtgattgtttaatatataccacactatgtttgcacagagcagggcttccattagcagtggatatttttatgtctgactttgaaaatcagtcaacacaatttcattggtgtgaattatttgttgctctttttcatattttaatggagagattcctattataaggcccatgcttcaaacataattatatctttctatatccagccatctggaaatacataggggtaagaagtatttcttgaaatgtccttgtttagtaagttagtaaaaactgggatgactagttgccaagatgtcttgtaactgcatagcagatgacacctggcatggcaagtctcattcacttcagcacaacactctgtacatttcagtctgatattctactttgccatttaaggacaccattaaaatcatagagattttcagtgacattggagtattgtaattattactttcaaaaaattatttttaataggatgattaaaccaatgagaagaaacacacataaatgatattttgcagtttatctgtattaagaaatgcttcttgccaatttctagttttagtttttggattgctacataagactttctttccatttactttatgtgtttttaaaagctgcaggtaatttttaaggtttgatggaattataatggaagccttgtataagttaaatgaaattggtaaaggagagcttactttgtctataatgcattcaggattaaaaattagatttcaaaatgaaatgtctgatttgtaaaatatttaatgttatatcagacttacataaaattttctgtgagaactcaaatgcatttgatttttaatgaatgttctgaatgaaatatgaatttttgtctttcagtctctgtagtttatctcaatatattaataaaaaggtctgttctcactgtaaaa

SEQ ID NO: 1842 - protein, 312 aa, Homosapiens
MCRDRPGGPERRQPREGPALPAEGREALPTALGPRINKCKNYYEVLGVTKDAGDEDLKKAYRKLALKFHPDKNHAPGATDAFKKIGNAYAVLSNPEKRKQYDLTGNEEQACNHQNNGRFNFHRGCEADITPEDLFNIFFGGGFPSGSVHSFSNGRAGYSQQHQHRHSGHEREEERGDGGFSVFIQLMPIIVLILVSLLSQLMVSNPPYSLYPRSGTGQTIKMQTENLGVVYYVNKDFKNEYKGMLLQKVEKSVEEDYVTNIRNNCWKERQQKTDMQYAAKVYRDDRLRRKADALSMDNCKELERLTSLYKGG

SEQ ID NO: 1843 - DNA, 5982 bp, Homosapiens
gcggcggcggcttccgcccttcttagctgcgctgccggaggaaacggaagaaggagcaagctatggaggggaacagggatgaggctgagaaatgtgtcgagatcgcccgggaggccctgaacgccggcaaccgcgagaaggcccagcgcttcctgcagaaggccgagaagctctacccactgccctcggcccgcgcactattggaaataattatgaaaaatggaagcacggctggaaatagccctcattgccgaaaaccatcaggtagtggcgatcaaagcaagcctaattgcacaaaggacagcacatctggtagtggtgaaggtggaaaaggctataccaaagaccaagtagatggagttctcagcataaacaaatgtaaaaattactatgaagtacttggagttacgaaagatgctggtgatgaagatttgaaaaaagcttatagaaagcttgctttgaagtttcatccagacaaaaaccatgcacctggagcaacagatgcttttaaaaagattggaaatgcttatgctgttttaagtaatccagaaaagcgaaaacagtatgacctcacgggcaatgaagaacaagcatgtaaccaccaaaacaatggcagatttaatttccatagaggttgtgaagctgatataactccagaagacttgtttaatatattttttgggggtggatttccttcaggtagtgtacattctttttcaaatggaagagctggttatagccaacaacatcagcatcgacatagtggacatgaaagagaagaggaaagaggagatggaggtttttctgtgtttatccagctgatgcccataattgtattgatcctcgtgtcattattaagccagttgatggtctctaatcctccttattccttatatcccagatctggaactgggcaaactattaaaatgcaaacagaaaacttgggtgttgtttattatgtcaacaaggacttcaaaaatgaatataaaggaatgttattacaaaaggtagaaaagagtgtggaggaagattatgtgactaatattcgaaataactgctggaaagaaagacaacaaaaaacagatatgcagtatgcagcaaaagtataccgtgatgatcgactccgaaggaaggcagatgccttgagcatggacaactgtaaagaattagagcggcttaccagtctttataaaggaggatgaactggaatttttatttataccttttagcgtactctttattttttctgtaagtaagtttggtttcatcatgagggatgaaggaaaagatttgatactgaaaactaaactgaatagttggttcctgaaatcttggactgtttatgacctactggctcctttaaatagtaactgaaaactaaaatggaatattttagttaacgcttctacaagtattttcattttaaaagcttacatgattcctaactaaagtgtcatgagaaaggattatcacacctgtagcaatttccagttttagtgattctccattttttcccttgtcatgtaaatatttatggaatgatcattttgtgtacatacaggttactgcttttttatttaaattcttttagtgtttagctccatgagacacttcagtttaaattgatggaataaatgttatatgacacatttacattttccttatcaaggtgtcaaatatgtggactttaaacaatgaaactttttcaaaaagaaaaaacaaaaactttaactttgtgtaaaatcttatagtattatcagcttagagggaattgatatttttaatattgccgttatattccaaaatatatattgagataaatgaactggtgtagaatatcagtttgctatttagttttatgaattactatacatatacatgcatagaaatgaaatgctatactgataaattttaaagaaaatatgaggaaatggctataaatattaaactaaaagggtcttcaacagtaaagtgcagttatgtcatttaaaattccaatactttaaaggccaccaaattttgatgtatatgtccttgaagggctgctaaaatttatgaagaggactcacattttcccccatagaaatttgcagtttcttggtgatcatttaagcaggatccaaagaagttcctttacaaataagtaataagaaaaatgagtactaaaatacagctttgtgccttttaaccctatgccaactcctaaacatataagtagattacagtatacttatctgatcagagcatgatctgtttggccacatgcaagtgtgagcagaaatagagcagcacgtagaatagtaacttaaagcaagtcatcctttaaaaattctgagctaaaatctatttaccattgagtaattgaattaatcccataggaataagctccttgtaagtaaatccatgatatgaattagaaaaaaaaaacagctggaaattgaagtttttgatgcctgtatactggatatgaaactatttgatttctagtcttctgtgtttagcagttgtaatattttaatgattttgcttcatactcggttaatggaacataaacatatctttgatacttctttgtgagtgagagaatgctagatagggtggctttgttctttgtttaagttttttttcctgaatgtagttaatttatggcatctgttgaataaaactgctaaaatgacctcttaaaaatgttctgttgtatccccttttccaggtgaatcaatagaaatgcctgattgaattagtaggttaaactaaacaacatactgtcataggaaaactggagagcttaaccaacttgctcttagaaatgttaccttaaaaaaaaaaaaaaagcagtgcttaagagaaaatacaattttaattattttgttgagcctgcagagtaagtttttaaaaatataagttcatagcattttaattaactttgaaagttcatatgcatcagaaaatttatgaaaatttgaatgaaaaaaatttcatctatttatttttctaattttaatggcaaatttacactattatggctgataattctgtgaacttaccttcttgttgactgattctttttcccttaatcccagctttaaggagataggtgaagttattgtacaaagttaagtgataccataaagtatatattataaagtcatacatggcttttggacagtattatatttcagttgcagtgctgcattccattaaatttcataaaatgctagggaaaatgtgtttgataaaattttctgcagtgagaaatgacagactgagtgcctgacaatttaagccacatatgaagtatgcaagtaaagattcagtccttaatgtcatctatatcatggtataaaagctcaacaagtatcttataatttggagttaactttataaagtaagaagagtttggatatcttgataaaagattttcatgtttgctgctttttttataataaaaatcccaacattttgccatcttatgtttagctacatgaacttcgcaatttcatcggctcattctaatgaccacctaaaagtcctcaatctttgaatattgctttattagctcctctaactggtattctaacagtttagcagcacttatatttattaatgctttacatttttacccctttttgtgtaaacacaaatacacccatgcatatacacacaaacattattgtccttgtgagggtttgggggaaatgaaaaatagtacctttctcctcttcttttgattccttagttcccaaatagactggtgctagtcatttagtcatctgtaaatttcgaaatgtagtttgattaaatgtgaactgaattctcagcaatgaaaaatgtcaagttgaattcatctaataagtgaaaataatatattttgtaaacagattacatttgaacacctaaataagtatttgtttcataatcattacatgcttgtttatgatttacaaagatttggtagagaaaagtacagtccttaaggcatatatatgccaatgcattaaactactcagcttttgtgccagctcaggtgttcataggaacaggaatgtggaataccagctttttactttaattatacttttatgctgaatttttcttccagttaaacctttaattacactagtatgtaaagtagttactgagaaaaataagtttttgatttcccttctgttgatctgtaacatttttaaatgaagctatttaacacatgacatgctaatgttacttaatggattcctatgtatttcattaaaaaaaagtctcccacctgtgttaagacagctaaatatttcttgatgttggcttgaggaccaagtgagccatcttgccagttaagcaagttttatatcagaggaccaaatggttaagaagagaatttgtacatttcttgagcttccccatgtgaagcttgggttcagtactatcctattactatccatcttcataatgagtgaagcaaactgaaagggaattcataatcttttttcttatctgaacagaaaaactaatgaaaatcaacaataaatctttattttaattttcattcaacagctgaaaaaccatgtctgttgaccacattggaccattgcctagttaaaatccataaaattccctataaaccaatgaaaagaaacttgtctggcaataatttccaacattttaaattctaatttttagttacaaagaaaaaggatagaatgaggcttttcaaggaattcttgctcatcccttcaattatttggcaggtaaaacagtcctagaattcagcttcctttttggttttattactattaaatagatactttcatataaatggaaacacttttcctcaaaacattaattcaaaacatactccttatattaaggattatagcaccatattttttgtatattccctatgtgtaactttttcctgttggtatgtgatatttttcatttaatatgactatctgctggtgttggggccaatagatttgtgaatattctgtggatgtgtctatgtataggtgtatatatatatatatatatttttttttttttttcccagctaattacctcaaatgtgtgattgtttaatatataccacactatgtttgcacagagcagggcttccattagcagtggatatttttatgtctgactttgaaaatcagtcaacacaatttcattggtgtgaattatttgttgctctttttcatattttaatggagagattcctattataaggcccatgcttcaaacataattatatctttctatatccagccatctggaaatacataggggtaagaagtatttcttgaaatgtccttgtttagtaagttagtaaaaactgggatgactagttgccaagatgtcttgtaactgcatagcagatgacacctggcatggcaagtctcattcacttcagcacaacactctgtacatttcagtctgatattctactttgccatttaaggacaccattaaaatcatagagattttcagtgacattggagtattgtaattattactttcaaaaaattatttttaataggatgattaaaccaatgagaagaaacacacataaatgatattttgcagtttatctgtattaagaaatgcttcttgccaatttctagttttagtttttggattgctacataagactttctttccatttactttatgtgtttttaaaagctgcaggtaatttttaaggtttgatggaattataatggaagccttgtataagttaaatgaaattggtaaaggagagcttactttgtctataatgcattcaggattaaaaattagatttcaaaatgaaatgtctgatttgtaaaatatttaatgttatatcagacttacataaaattttctgtgagaactcaaatgcatttgatttttaatgaatgttctgaatgaaatatgaatttttgtctttcagtctctgtagtttatctcaatatattaataaaaaggtctgttctcactgtaaaa

SEQ ID NO: 1844 - protein, 379 aa, Homosapiens; identical to SEQ ID NO: 175

SEQ ID NO: 1845 - DNA, 2081 bp, Homosapiens
aaatggaagagctggttatagccaacaacatcagcatcgacatagtggacatgaaagagaagaggaaagaggagatcaatttaattacatgaagtggaaaggtaaatggaaagagcactagactagaaattaaaaggcctggcccccagctttgccactcatcagctcccatcttctaccctcaaatccaagggaggtttttctgtgtttatccagctgatgcccataattgtattgatcctcgtgtcattattaagccagttgatggtctctaatcctccttattccttatatcccagatctggaactgggcaaactattaaaatgcaaacagaaaacttgggtgttgtttattatgtcaacaaggacttcaaaaatgaatataaaggaatgttattacaaaaggtagaaaagagtgtggaggaagattatgtgactaatattcgaaataactgctggaaagaaagacaacaaaaaacagatatgcagtatgcagcaaaagtataccgtgatgatcgactccgaaggaaggcagatgccttgagcatggacaactgtaaagaattagagcggcttaccagtctttataaaggaggatgaactggaatttttatttataccttttagcgtactctttattttttctgtaagtaagtttggtttcatcatgagggatgaaggaaaagatttgatactgaaaactaaactgaatagttggttcctgaaatcttggactgtttatgacctactggctcctttaaatagtaactgaaaactaaaatggaatattttagttaacgcttctacaagtattttcattttaaaagcttacatgattcctaactaaagtgtcatgagaaaggattatcacacctgtagcaatttccagttttagtgattctccattttttcccttgtcatgtaaatatttatggaatgatcattttgtgtacatacaggttactgcttttttatttaaattcttttagtgtttagctccatgagacacttcagtttaaattgatggaataaatgttatatgacacatttacattttccttatcaaggtgtcaaatatgtggactttaaacaatgaaactttttcaaaaagaaaaaacaaaaactttaactttgtgtaaaatcttatagtattatcagcttagagggaattgatatttttaatattgccgttatattccaaaatatatattgagataaatgaactggtgtagaatatcagtttgctatttagttttatgaattactatacatatacatgcatagaaatgaaatgctatactgataaattttaaagaaaatatgaggaaatggctataaatattaaactaaaagggtcttcaacagtaaagtgcagttatgtcatttaaaattccaatactttaaaggccaccaaattttgatgtatatgtccttgaagggctgctaaaatttatgaagaggactcacattttcccccatagaaatttgcagtttcttggtgatcatttaagcaggatccaaagaagttcctttacaaataagtaataagaaaaatgagtactaaaatacagctttgtgccttttaaccctatgccaactcctaaacatataagtagattacagtatacttatctgatcagagcatgatctgtttggccacatgcaagtgtgagcagaaatagagcagcacgtagaatagtaacttaaagcaagtcatcctttaaaaattctgagctaaaatctatttaccattgagtaattgaattaatcccataggaataagctccttgtaagtaaatccatgatatgaattagaaaaaaaaaacagctggaaattgaagtttttgatgcctgtatactggatatgaaactatttgatttctagtcttctgtgtttagcagttgtaatattttaatgattttgcttcatactcggttaatggaacataaacatatctttgatacttctttgtgagtgagagaatgctagatagggtggctttgttctttgtttaagttttttttcctgaatgtagttaatttatggcatctgttgaataaaactgctaaaatgacctctt

SEQ ID NO: 1846 - protein, 126 aa, Homosapiens; identical to SEQ ID NO: 1838

SEQ ID NO: 1847 - DNA, 1707 bp, Homosapiens
gcggcggcggcttccgcccttcttagctgcgctgccggaggaaacggaagaaggagcaagctatggaggggaacagggatgaggctgagaaatgtgtcgagatcgcccgggaggccctgaacgccggcaaccgcgagaaggcccagcgcttcctgcagaaggccgagaagctctacccactgccctcggcccgcgcactattggaaataattatgaaaaatggaagcacggctggaaatagccctcattgccgaaaaccatcaggtagtggcgatcaaagcaagcctaattgcacaaaggacagcacatctggtagtggtgaaggtggaaaaggctataccaaagaccaagtagatggagttctcagcataaacaaatgtaaaaattactatgaagtacttggagttacgaaagatgctggtgatgaagatttgaaaaaagcttatagaaagcttgctttgaagtttcatccagacaaaaaccatgcacctggagcaacagatgcttttaaaaagattggaaatgcttatgctgttttaagtaatccagaaaagcgaaaacagtatgacctcacgggcaatgaagaacaagcatgtaaccaccaaaacaatggcagatttaatttccatagaggttgtgaagctgatataactccagaagacttgtttaatatattttttgggggtggatttccttcaggtagtgtacattctttttcaaatggaagagctggttatagccaacaacatcagcatcgacatagtggacatgaaagagaagaggaaagaggagatggaggtttttctgtgtttatccagctgatgcccataattgtattgatcctcgtgtcattattaagccagttgatggtctctaatcctccttattccttatatcccagatctggaactgggcaaactattaaaatgcaaacagaaaacttgggtgttgtttattatgtcaacaaggacttcaaaaatgaatataaaggaatgttattacaaaaggtagaaaagagtgtggaggaagattatgtgactaatattcgaaataactgctggaaagaaagacaacaaaaaacagatatgcagtatgcagcaaaagtataccgtgatgatcgactccgaaggaaggcagatgccttgagcatggacaactgtaaagaattagagcggcttaccagtctttataaaggaggatgaactggaatttttatttataccttttagcgtactctttattttttctgtaagtaagtttggtttcatcatgagggatgaaggaaaagatttgatactgaaaactaaactgaatagttggttcctgaaatcttggactgtttatgacctactggctcctttaaatagtaactgaaaactaaaatggaatattttagttaacgcttctacaagtattttcattttaaaagcttacatgattcctaactaaagtgtcatgagaaaggattatcacacctgtagcaatttccagttttagtgattctccattttttcccttgtcatgtaaatatttatggaatgatcattttgtgtacatacaggttactgcttttttatttaaattcttttagtgtttagctccatgagacacttcagtttaaattgatggaataaatgttatatgacacatttacattttccttatcaaggtgtcaaatatgtggactttaaacaatgaaactttttc

SEQ ID NO: 1848 - protein, 379 aa, Homosapiens; identical to SEQ ID NO: 175

SEQ ID NO: 1849 - DNA, 1070 bp, Homosapiens
gcggcggcggcttccgcccttcttagctgcgctgccggaggaaacggaagaaggagcaagctatggaggggaacagggatgaggctgagaaatgtgtcgagatcgcccgggaggccctgaacgccggcaaccgcgagaaggcccagcgcttcctgcagaaggccgagaagctctacccactgccctcggcccgcgcactattggaaataattatgaaaaatggaagcacggctggaaatagccctcattgccgaaaaccatcaggtagtggcgatcaaagcaagcctaattgcacaaaggacagcacatctggtagtggtgaaggtggaaaaggctataccaaagaccaagtagatggagttctcagcataaacaaatgtaaaaattactatgaagtacttggagttacgaaagatgctggtgatgaagatttgaaaaaagcttatagaaagcttgctttgaagtttcatccagacaaaaaccatgcacctggagcaacagatgcttttaaaagtaaagtaaaccttttaaagcaattttactaagctgtctttagaattcactttacggcgtttcagaatattaagttctgcttttggactggtgcatttagagaccagcacaagcaagagtctggaaaatcctttaaaacttcagtattaactggttatacccgaaggcaaacaaatgcagtttggcttcacaaaagcaacattccagttctgatacagtctcaagtaacttttctaggcacatatgcatgctttcttgtttaccaggaacaaatagggtgatgattatgcatgagcttctagcgtattgtcatctggttctaaatgaactaaaagcaaaatatagtttttttgagtttttaaggtacaagagactgtgtggaatttggatatttaagaaatagctccccagtgttcttttatttctattaaactttgcccagttttttcattttatatatgtagttttagctaatgttatttttttctttttaaaaattaatatctttcctcttgcctactatttatttttttattttccatcccaatattctttaa

SEQ ID NO: 1850 - protein, 160 aa, Homosapiens
MEGNRDEAEKCVEIAREALNAGNREKAQRFLQKAEKLYPLPSARALLEIIMKNGSTAGNSPHCRKPSGSGDQSKPNCTKDSTSGSGEGGKGYTKDQVDGVLSINKCKNYYEVLGVTKDAGDEDLKKAYRKLALKFHPDKNHAPGATDAFKSKVNLLKQFY

SEQ ID NO: 1851 - DNA, 1047 bp, Homosapiens
gcggcggcggcttccgcccttcttagctgcgctgccggaggaaacggaagaaggagcaagctatggaggggaacagggatgaggctgagaaatgtgtcgagatcgcccgggaggccctgaacgccggcaaccgcgagaaggcccagcgcttcctgcagaaggccgagaagctctacccactgccctcggcccgcgcactattggaaataattatgaaaaatggaagcacggctggaaatagccctcattgccgaaaaccatcaggtagtggcgatcaaagcaagcctaattgcacaaaggacagcacatctggtagtggtgaaggtggaaaaggctataccaaagaccaagtagatggagttctcagagctttatggatattggaacattgatatgggatggtggacctgtacctaacacacaagagtgatacagataaattatctttggcataacggggatggccgggtgcagtggtttatgcctataatcccagcactttggaaggctgagatgggaggatcatttgaggcccgaatttcaagactagcctcagccccaacataacaagaccccatctatatcaaaaataaataaatattgacatttaaaccatagaatactgctgttgttttgcgtgtactaaactgttgctttgatagttggttagatctacattatgcaagaacaaaatttttggaatgtaatgcatgttcattcttagctgtgacatacttttgaggagttttggaatttatttatccacttacaagtactaaaaaattattattattgtctcattttagttacaatatatgctctgactttcatccacaattattatgggctttgtttacttctctgtagttgtgatacattacactaaggacattttcatggtttactcttcttagattcgggaagaggttggaggaatggtctgtggtcgaaaaagagaatgaagcagactaatccttaaagggataagccttcattagattttgagaaagagtccacagatagttctttatagtattctaataaatt

SEQ ID NO: 1852 - protein, 109 aa, Homosapiens
MEGNRDEAEKCVEIAREALNAGNREKAQRFLQKAEKLYPLPSARALLEIIMKNGSTAGNSPHCRKPSGSGDQSKPNCTKDSTSGSGEGGKGYTKDQVDGVLRALWILEH

SEQ ID NO: 1853 - DNA, 6696 bp, Homosapiens
aagaaggagcaagctatggaggggaacagggatgaggctgagaaatgtgtcgagatcgcccgggaggccctgaacgccggcaaccgcgagaaggcccagcgcttcctgcagaaggccgagaagctctacccactgccctcggcccgcgcactattggaaataattatgaaaaatggaagcacggctggaaatagccctcattgccgaaaaccatcaggtagtggcgatcaaagcaagcctaattgcacaaaggacagcacatctggtagtggtgaaggtggaaaaggctataccaaagaccaagtagatggagttctcaggtaggaataaatatggtttacatctcaatcataattggtattaatgtactttttgatgttataacacctgaaaaaagtgaaatataacattagaagaatagacatcaaggaattgaactctgggtgtgtcttatgcttcatattctttataaaactggtctgtaaagtaccaactctatagaatattctattttttaaagtaacctcaagttacaaagctttttccaaataatttttttaagaaaaattattgcagctttttcacacaatatgttgtttatgtagcaatattaaaagaggatgaagaattgttttattttacatagatgaaaatgggagaatttcatgagaggaatattgagtgtaatagcaacattttcaatttcctacttatattagtgaaggatttttttctatttatattctttttgaagggctatctttatatatatgcagacactataatgtcctttcgcagaaatgttagagttgaaaagttatacactgggttttgggtatctggctttaattttataagtaaaaggttttctggaaatgaaatgaaactttgagtttgaaacactagagaaaagtctgttttgtttcctgctaaagcttatggaagctgtattgatgttgtgctgatattactttgctagggaaactaaagattaaggattttgaacagagattaattcaagaattctcatggagagtgaatcataatatagtgaactaactcaagtgaagagtagttaaaattagttaggttaagtctttctcatttgtcctttcttgtctgtttctcttttaattttatttcttttttcacctttttaccccattctcaactttttatttaccataatttgtaattgaagtgtattttgagatacaggttttatttattaaggaaagtgatttgttaccatatcttaattttaaaatcaaatacccatatatttatattttgcatttgtccctatatatttaaatgctaaagcttgattgtaacattttatttgagagtgattacaatgagaaaaaacgattctctgactgagtgtggtggctcacgcctgtaatcctagcactttgggaggccaaggcgggcagatcccctgaggtcaggagttcaagaccagcctggccaacatggcaaaacctcatttctactaaaaatagaaaaagtagccgggcgtggtgataggcacctgtaatcccagctactcgggaggctgaggctgaggaatcacttgaactcaagaggcagaggttgcagtgagccaagatcacaccactgcactccagcctgggcgacagagcaagacaccttctcaaacaaacaaacaaacaaacaaaaaaggattccttaatcatggtaaagccatggtagagtatttgattagtatgaatggtagtgaagcactttgagaatataaataatgctgctaaccatttttatacttatagtactgtgtcagaggtagctgaataagtgaaagaagtgaataagtaagagacttacttttgaatttattttgtaaaaaacgtttattagtaagcagtgtgcttgaaacacgtttctggaaaccacatcctaaaacaaattgtatttgcttataggatttaatttatgttgggagaacatattctcaatgaaggattcaaagaaagttaaatgtattttatatatatatatttaagaatatagaatcacctatatatttgaaagtttaccaaaaaactatggttgaaagttttgaaaaagaagactctcctaaatctggtgttattttaaaaagtctgtttcttcatttcctctaccctagccttgaaagaaaaagaagagtagtccaaggtgtggtagaaataaggaaggaagagcattgatgcctctttgttctggtattgattatatatatatgtggggtggggttggttttgtgtgtatgtgggtggttgtgtgtgtggttctccaaagcccagaggaactggctgtaggcaaggagacaccttgagaatggaagaatgaaagatgatgctgagtgtagatacactctgtatgtggccagagacatacagacatacaggtggagacataaaaggtggaaggaatttttctgttttctctgtcaaattggagatgaggctgtcttctgagagttagaagaaaagagatgaggttgaaagcttaagagagtggtaaaagtatggaatatttgcagaggagaaaagcaaagggaatgaagtattgctgatttagttttaaggcccagccacatttgggaccatgaattctttaagagtggaagaaatagcttagtagtatacctgtattagagattggtcctctggtcaataatctcattatacctttttaattaaatgtaatttttttttcttttggggactaaatatgattggaacagtctctaagagaatccccaagttttcaaaatactttagtctgtactttatgtgagtttcttagctgaatataccttttctcttatattagccttcataagtgttgctttagtgagggtacagatcaccagcaaacacttacatgatgtatgtttttgttttttcttttacctatacacaggggatttttctgaagaaagccatgttatcttgttggttagcacgattatgcaaacaagttgctcagtgacaatttggctcaatggggagaagtcttgcaataatactgcatccattgcataagtaagagctagcttacagtaagactgaagagaaagtgtgtaactttgtaaactaatattctgttaaacttggcgatttgttttttttgagttgaagtgtattgaaaaataattgagacaaagttgtcatggatcttatttgaaatttttaacataccattgaaaaactttaaaactttacaagatcagtgtgaaattattaactggagtatcattgtatttatcaattagaaacactgtacaactgttaattatggggatttgaatttaagatttgatttaagcttccgttctttcagaagaaatcatttcgctaaacttataaaataagtaattctttttctcaggaataaataaatgtttccttaaacactagttaaatttggagtatatttaaataattagctatatagcacacatgaaaaaaagagaatcgaaaaatgaccttcctctcccaccaactatgcttccatgcacataagagaagatataaagtctggaccaggcagagttttcccattgttgagctccacacagatccttttggccttgttgtacattatttccttccaagataggtaatgggttactcctttttaatttcttttaattcttcagtgaggcaggagaaggttttactcttttagaaagcagcagattgtaaaaagtgtgacaaacacatgtagctgatgaaaaggagcatgatgaacaacagtatgaatgaaaataattatatgaatgataatttctcattcaggtgtgaaaacttaggtgaatgggtatatttggagcattacttcaaatacatagtcttcaggctgtccattggtgatgatgactgtaacttctggcttctcaagaatttcttctctaatatatgatgaaaaatttagtgcagaggagatatggtggagctggatacagctaagagttagtgaaataactgtttttcatgtctggcccccccttttttttttgtttgtctgtggcaattcttagctttatgaccctatctagagcactgcaaattttcacctactttgtctacagtatccagctgtctttttaagttgaccaggcttttgtgctcagtaattataaacaagacaatttagaggcttaatctggaacataattaaacatcctacacactcaaaccaagtagtaatggctttaggattgttcagtgtttaatttaccttttattttttgcattcaggtagtgtctgccatattcgtacctctccaccttgtctcacagtctgtttcacttctattaactgcttctcttctattccaaatgatttttagtactaactacattttcatgacagcattcatcacatttgatctgaacgtgactttttagatcctcaccatttctgctctcaaattgaaagtcatttgtccatccatccaacatatatggtgaacaaaacataatccctgccttcaaagaatctgtgatctagaagtgttatcagacaagtaaagaggcaactgtagtacactttggtaattgttgggataaggctaagttcagaggatgtggggaggatataagaggggcagcaaacctagtcctgaggaatttggattcttaggaaaaggaagagctaagtcagggtccggagaagttgtagaaactagctaaccaagaagagaggcagagaaggtgtgctcagcaccaaaagcaattgcaaagatctaggaggtaagagagtcagcttcaatactgatggtaagaaagaaataggaagatgataggtcactttgaagtctgaagggtatccttttttctgtattccagttctgagacagcaagattttcaagtcagataaacagatttgaattcttaactgtgaggccttcctttattacttatttgaaatagaaggcctgcccttcctttctctgtttctattagcttctttatttttctccagatatttatcaccatatgatgtacattatattttacttatatatttgtttattgcttgtttttctcccaattgtaaatttaatgtgattttgactgttttattcaccactgtagcatctgaaattgtgcctaacagaaagtaaatggttagtaaatttttgttgaagaaataagtccttattctcatctgttacttggttatgtgaatttaggcaatttacttaaccattcaaagattggtttccttattggttaaataggaataatatctaccaaatgaggagtaaatgagataatttgtgtaaaataatcagtataataaaattctacaattctttatgtgaaatctttgtgaccaaatgcaatttggaattcagaattcttcatattttagaaaggtactaatatagtcggctctccacatctatgggttctgcatctgtggatttaaccaactttgaattgaaagtatttggtgaaaaataacaatacaacaataaaaaataatacaaattaaacaaccaatatagtgtaacaaccatttacgtagcatttacattgtcttaggtactatttataacctagagattatttaaagtacatgggaagatgtgtaaaggttgtatgtaaatactgtaccattttatatcagggatttgagcatctgtagattttggtattcaaggagggaggatcctggaactaatcccctgtggataccaagggatgacagtgtattttatattatacatcttagagtctagggcagcagtccataacaaatagtaacatttctacagcaaaacatacaggtattcacacttaaatgggataaatgaagattctgtagtagcttcacatcttttcggtcagatttttgcctagaggcaaaatctacagttgaattcagttttttatgcagtcaaattagttatagaataactttgatttttcagagctttatggatattggaacattgatatgggatggtggacctgtacctaacacacagtaggtattttataaatgccccccatttcctttttttctatcacatagcttctaaacatttctaggagaatgagtctctacacaggtgggatcattctctttttttgtttacagatatatgtcaaatgcctagaacactgtctgggcatagttagtattcaataaatattattgactaaataaaggaaatgtcatgtttttggaataaaattgatgtatgttaatgtttttaagtatctaaagtagaaaaatccaattttaatttctgtaaatttgtacaattttatattactttccctttttacccccaagttcatataacaaatgatagatgccttcattatataaagaaagctaaggctcatttacttcaaaaatatttactgagatccttttgtgtgccaagcactgtgataactaataggtgtaatagtaaaaaaaaaaaaaaaaaaatcttgtctcttttctttgaaaactttgagtcagtctttgcagttcttttgctgccagtgtccacttataccctagatcattttgcctgtcactaactctgtcatcaagccacctgcacatggaacacatctaaagttgcaaagtactctccaaaaattttgaaaatgtactgtggcttttgtgaaagtaaattactaggttgtggaagaaggttggcatccacatgtacgtaa

SEQ ID NO: 1854 - protein, 102 aa, Homosapiens [sequence omitted]

SEQ ID NO: 1855 - DNA, 1008 bp, Homosapiens
ctcaaggacgcgtcccgagggcgggtggcagccattggtgggatgagcaatccgagttcccggatgagggaacattctgcagtataaagggagcagggaaggcgggagacagcgcagtttgaatcgcggtgcgacgaaggagtaggtggtgggatctcaccgtgggtccgattagccttttctctgccttgcttgcttgagcttcagcggaattcgaaatggctggcggtaaggctggaaaggactccggaaaggccaagacaaaggcggtttcccgctcgcagagagccggcttgcagttcccagtgggccgtattcatcgacacctaaaatctaggacgaccagtcatggacgtgtgggcgcgactgccgctgtgtacagcgcagccatcctggagtacctcaccgcagaggtacttgaactggcaggaaatgcatcaaaagacttaaaggtaaagcgtattacccctcgtcacttgcaacttgctattcgtggagatgaagaattggattctctcatcaaggctacaattgctggtggtggtgtcattccacacatccacaaatctctgattgggaagaaaggacaacagaagactgtctaaaggatgcctggattccttgttatctcaggactctaaatactctaacagctgtccagtgttggtgattccagtggactgtatctctgtgaaaaacacaattttgcctttttgtaattctatttgagcaagttggaagtttaattagctttccaaccaaccaaatttctgcattcgagtcttaaccatatttaagtgttactgtggcttcaaagaagctattgattctgaagtagtgggttttgattgagttgactgtttttaaaaaactgtttggattttaattgtgatgcagaagttatagtaacaaacatttggttttgtacagacattatttccactctggtggataagttcaataaaggtcatatcccaaactagttgtgtattaaatttgcttggttgt

SEQ ID NO: 1856 - protein, 128 aa, Homosapiens; identical to SEQ ID NO: 179

SEQ ID NO: 1857 - DNA, 1399 bp, Homosapiens
gggcgtgtgcgcgccgcaggctggcggtaaggctggaaaggactccggaaaggccaagacaaaggcggtttcccgctcgcagagagccggcttgcaggtcagtagttgttcgtgcagtctgggagtcatgatgtttttctttgcatttccttttttgttattcatcgctctcgatgggcgttttgtgtatgcgtgggtgatgcggtgtcgcgacttgggctgcccatacgataaatatgggggggaggaatcacgtgtttcgatgtcgggacgcgttgctgcgcccgtgccccttgctttggcgcgcatataatttccccatctctagttctcatttttgtgcatttatgtttgtgtatgcttaaaatttaagttcccagtgggccgtattcatcgacacctaaaatctaggacgaccagtcatggacgtgtgggcgcgactgccgctgtgtacagcgcagccatcctggagtacctcaccgcagaggtaaatgggtgaacgcctataatccggagaaggtttggggggcggggaggcggcaagagggaaggaggaaagtgatgcaagaaaactcccaggccctgaacgcggcgagaggcctaagagaacgctagagggagctggtgttcaacaaggatcctactgagcttgagttctctgctcttggaattaaaattgcgtgccccctgtatatcttgccagtcagatagtgaggaacgattccagttggtagatctgcgtttgtgagggttttattctgttctctgaatcttggccaaaggaaagttggaaggcaactgacagattctgccttttaggtacttgaactggcaggaaatgcatcaaaagacttaaaggtaaagcgtattacccctcgtcacttgcaacttgctattcgtggagatgaagaattggattctctcatcaaggctacaattgctggtggtggtgtcattccacacatccacaaatctctgattgggaagaaaggacaacagaagactgtctaaaggatgcctggattccttgttatctcaggactctaaatactctaacagctgtccagtgttggtgattccagtggactgtatctctgtgaaaaacacaattttgcctttttgtaattctatttgagcaagttggaagtttaattagctttccaaccaaccaaatttctgcattcgagtcttaaccatatttaagtgttactgtggcttcaaagaagctattgattctgaagtagtgggttttgattgagttgactgtttttaaaaaactgtttggattttaattgtgatgcagaagttatagtaacaaacatttggttttgtacagacattatttccactctggtggataagttcaataaaggtcatatcccaaactagttgtgtatta

SEQ ID NO: 1858 - protein, 61 aa, Homosapiens
MMFFFAFPFLLFIALDGRFVYAWVMRCRDLGCPYDKYGGEESRVSMSGRVAAPVPLALARI

SEQ ID NO: 1859 - DNA, 1289 bp, Homosapiens
cgacgaaggagtaggtggtgggatctcaccgtgggtccgattagccttttctctgccttgcttgcttgagcttcagcggaattcgaaatggtaaacttcgcagagacgctcgatgactccgcgggtttttgccggcgagagaaaaacccgttacacagagggatgggggtgaagtggcgacggttgggaacgcgcggagacaggatttagaagagtggggggaggtgttttgtcggctgctagcggagcagcctcggatctcgcggcgggcggcgacggttgggtggcgcgcgcagcgccgctgggggccggcgggcggaggcgcgcggccgtggcgagcgcgcggcggggggcgaacgggcggggtcgcccctgcggcgcgccgcgggccggagaccccggcagggtgcggggacgcgctcgcggcgggacgcgccgcggtgggggatgggcgcgccgccttggtaattctatattctccgttcctcctccgctcgcgggcgtgtgcgcgccgcaggctggcggtaaggctggaaaggactccggaaaggccaagacaaaggcggtttcccgctcgcagagagccggcttgcagttcccagtgggccgtattcatcgacacctaaaatctaggacgaccagtcatggacgtgtgggcgcgactgccgctgtgtacagcgcagccatcctggagtacctcaccgcagaggtacttgaactggcaggaaatgcatcaaaagacttaaaggtaaagcgtattacccctcgtcacttgcaacttgctattcgtggagatgaagaattggattctctcatcaaggctacaattgctggtggtggtgtcattccacacatccacaaatctctgattgggaagaaaggacaacagaagactgtctaaaggatgcctggattccttgttatctcaggactctaaatactctaacagctgtccagtgttggtgattccagtggactgtatctctgtgaaaaacacaattttgcctttttgtaattctatttgagcaagttggaagtttaattagctttccaaccaaccaaatttctgcattcgagtcttaaccatatttaagtgttactgtggcttcaaagaagctattgattctgaagtagtgggttttgattgagttgactgtttttaaaaaactgtttggattttaattgtgatgcagaagttatagtaacaaacatttggttttgtacagacattatttccactctggtggataagttcaataaaggtcatatcccaaactagttgtgtatta

SEQ ID NO: 1860 - protein, 33 aa, Homosapiens
MDVWARLPLCTAQPSWSTSPQRYLNWQEMHQKT

SEQ ID NO: 1861 - DNA, 824 bp, Homosapiens
ggagcagggaaggcgggagacagcgcagtttgaatcgcggtgcgacgaaggagctggcggtaaggctggaaaggactccggaaaggccaagacaaaggcggtttcccgctcgcagagagccggcttgcagttcccagtgggccgtattcatcgacacctaaaatctaggacgaccagtcatggacgtgtgggcgcgactgccgctgtgtacagcgcagccatcctggagtacctcaccgcagaggtacttgaactggcaggaaatgcatcaaaagacttaaaggtaaagcgtattacccctcgtcacttgcaacttgctattcgtggagatgaagaattggattctctcatcaaggctacaattgctggtggtggtgtcattccacacatccacaaatctctgattgggaagaaaggacaacagaagactgtctaaaggatgcctggattccttgttatctcaggactctaaatactctaacagctgtccagtgttggtgattccagtggactgtatctctgtgaaaaacacaattttgcctttttgtaattctatttgagcaagttggaagtttaattagctttccaaccaaccaaatttctgcattcgagtcttaaccatatttaagtgttactgtggcttcaaagaagctattgattctgaagtagtgggttttgattgagttgactgtttttaaaaaactgtttggattttaattgtgatgcagaagttatagtaacaaacatttggttttgtacagacattatttccactctggtggataagttcaataaaggtcatatcccaaactagttgtgtatta

SEQ ID NO: 1862 - protein, 33 aa, Homosapiens; identical to SEQ ID NO: 1860

SEQ ID NO: 1863 - DNA, 1894 bp, Homosapiens
ggagcagggaaggcgggagacagcgcagtttgaatcgcggtgcgacgaaggagtaggtggtgggatctcaccgtgggtccgattagccttttctctgccttgcttgcttgagcttcagcggaattcgaaatggtaaacttcgcagagacgctcgatgactccgcgggtttttgccggcgagagaaaaacccgttacacagagggatgggggtgaagtggcgacggttgggaacgcgcggagacaggatttagaagagtggggggaggtgttttgtcggctgctagcggagcagcctcggatctcgcggcgggcggcgacggttgggtggcgcgcgcagcgccgctgggggccggcgggcggaggcgcgcggccgtggcgagcgcgcggcggggggcgaacgggcggggtcgcccctgcggcgcgccgcgggccggagaccccggcagggtgcggggacgcgctcgcggcgggacgcgccgcggtgggggatgggcgcgccgccttggtaattctatattctccgttcctcctccgctcgcgggcgtgtgcgcgccgcaggctggcggtaaggctggaaaggactccggaaaggccaagacaaaggcggtttcccgctcgcagagagccggcttgcaggtcagtagttgttcgtgcagtctgggagtcatgatgtttttctttgcatttccttttttgttattcatcgctctcgatgggcgttttgtgtatgcgtgggtgatgcggtgtcgcgacttgggctgcccatacgataaatatgggggggaggaatcacgtgtttcgatgtcgggacgcgttgctgcgcccgtgccccttgctttggcgcgcatataatttccccatctctagttctcatttttgtgcatttatgtttgtgtatgcttaaaatttaagttcccagtgggccgtattcatcgacacctaaaatctaggacgaccagtcatggacgtgtgggcgcgactgccgctgtgtacagcgcagccatcctggagtacctcaccgcagaggtacttgaactggcaggaaatgcatcaaaagacttaaaggtaaagcgtattacccctcgtcacttgcaacttgctattcgtggagatgaagaattggattctctcatcaaggctacaattgctggtggtggtatgttaacttctaacattttaaaaaatttcttcagaggaaggaattttttgctgcttttaattagtttttccaggagaggaaatttaagtatattttcaatgatggaagtatggttgtatcatgaaatttgatttatatgtataactcaatgaatttttacttcatacttgagctgcatgtttttaaagatacctttcaagttgaacagtatacactttcttggtttcaaatactgtgattttttaaaaaatcttaagtagaattaattcctgtcactctcctaggtgtcattccacacatccacaaatctctgattgggaagaaaggacaacagaagactgtctaaaggatgcctggattccttgttatctcaggactctaaatactctaacagctgtccagtgttggtgattccagtggactgtatctctgtgaaaaacacaattttgcctttttgtaattctatttgagcaagttggaagtttaattagctttccaaccaaccaaatttctgcattcgagtcttaaccatatttaagtgttactgtggcttcaaagaagctattgattctgaagtagtgggttttgattgagttgactgtttttaaaaaactgtttggattttaattgtgatgcagaagttatagtaacaaacatttggttttgtacagacattatttccactctggtggataagttcaataaaggtcatatcccaaactagttgtgtatta

SEQ ID NO: 1864 - protein, 33 aa, Homosapiens; identical to SEQ ID NO: 1860

SEQ ID NO: 1865 - DNA, 1855 bp, Homosapiens
attggtgggatgagcaatccgagttcccggatgagggaacattctgcagtataaagggagcagggaaggcgggagacagcgcagtttgaatcgcggtgcgacgaaggagtaggtggtgggatctcaccgtgggtccgattagccttttctctgccttgcttgcttgagcttcagcggaattcgaaatggctggcggtaaggctggaaaggactccggaaaggccaagacaaaggcggtttcccgctcgcagagagccggcttgcaggtcagtagttgttcgtgcagtctgggagtcatgatgtttttctttgcatttccttttttgttattcatcgctctcgatgggcgttttgtgtatgcgtgggtgatgcggtgtcgcgacttgggctgcccatacgataaatatgggggggaggaatcacgtgtttcgatgtcgggacgcgttgctgcgcccgtgccccttgctttggcgcgcatataatttccccatctctagttctcatttttgtgcatttatgtttgtgtatgcttaaaatttaagttcccagtgggccgtattcatcgacacctaaaatctaggacgaccagtcatggacgtgtgggcgcgactgccgctgtgtacagcgcagccatcctggagtacctcaccgcagaggtaaatgggtgaacgcctataatccggagaaggtttggggggcggggaggcggcaagagggaaggaggaaagtgatgcaagaaaactcccaggccctgaacgcggcgagaggcctaagagaacgctagagggagctggtgttcaacaaggatcctactgagcttgagttctctgctcttggaattaaaattgcgtgccccctgtatatcttgccagtcagatagtgaggaacgattccagttggtagatctgcgtttgtgagggttttattctgttctctgaatcttggccaaaggaaagttggaaggcaactgacagattctgccttttaggtacttgaactggcaggaaatgcatcaaaagacttaaaggtaaagcgtattacccctcgtcacttgcaacttgctattcgtggagatgaagaattggattctctcatcaaggctacaattgctggtggtggtatgttaacttctaacattttaaaaaatttcttcagaggaaggaattttttgctgcttttaattagtttttccaggagaggaaatttaagtatattttcaatgatggaagtatggttgtatcatgaaatttgatttatatgtataactcaatgaatttttacttcatacttgagctgcatgtttttaaagatacctttcaagttgaacagtatacactttcttggtttcaaatactgtgattttttaaaaaatcttaagtagaattaattcctgtcactctcctaggtgtcattccacacatccacaaatctctgattgggaagaaaggacaacagaagactgtctaaaggatgcctggattccttgttatctcaggactctaaatactctaacagctgtccagtgttggtgattccagtggactgtatctctgtgaaaaacacaattttgcctttttgtaattctatttgagcaagttggaagtttaattagctttccaaccaaccaaatttctgcattcgagtcttaaccatatttaagtgttactgtggcttcaaagaagctattgattctgaagtagtgggttttgattgagttgactgtttttaaaaaactgtttggattttaattgtgatgcagaagttatagtaacaaacatttggttttgtacagacattatttccactctggtggataagttcaataaaggtcatatcccaaactagttgtgtatta

SEQ ID NO: 1866 - protein, 98 aa, Homosapiens [sequence omitted]

SEQ ID NO: 1867 - DNA, 941 bp, Homosapiens
acgcgtcccgagggcgggtggcagccattggtgggatgagcaatccgagttcccggatgagggaacattctgcagtataaagggagcagggaaggcgggagacagcgcagtttgaatcgcggtgcgacgaaggagtaggtggtgggatctcaccgtgggtccgattagccttttctctgccttgcttgcttgagcttcagcggaattcgaaatggctggcggtaaggctggaaaggactccggaaaggccaagacaaaggcggtttcccgctcgcagagagccggcttgcagttcccagtgggccgtattcatcgacacctaaaatctaggacgaccagtcatggacgtgtgggcgcgaaggtacttgaactggcaggaaatgcatcaaaagacttaaaggtaaagcgtattacccctcgtcacttgcaacttgctattcgtggagatgaagaattggattctctcatcaaggctacaattgctggtggtggtgtcattccacacatccacaaatctctgattgggaagaaaggacaacagaagactgtctaaaggatgcctggattccttgttatctcaggactctaaatactctaacagctgtccagtgttggtgattccagtggactgtatctctgtgaaaaacacaattttgcctttttgtaattctatttgagcaagttggaagtttaattagctttccaaccaaccaaatttctgcattcgagtcttaaccatatttaagtgttactgtggcttcaaagaagctattgattctgaagtagtgggttttgattgagttgactgtttttaaaaaactgtttggattttaattgtgatgcagaagttatagtaacaaacatttggttttgtacagacattatttccactctggtggataagttcaataaaggtcatatcccaaactagttgtgtatta

SEQ ID NO: 1868 - protein, 113 aa, Homosapiens
MAGGKAGKDSGKAKTKAVSRSQRAGLQFPVGRIHRHLKSRTTSHGRVGAKVLELAGNASKDLKVKRITPRHLQLAIRGDEELDSLIKATIAGGGVIPHIHKSLIGKKGQQKTV

SEQ ID NO: 1869 - DNA, 791 bp, Homosapiens
attggtgggatgagcaatccgagttcccggatgagggaacattctgcagtataaagggagcagggaaggcgggagacagcgcagtttgaatcgcggtgcgacgaaggagtaggtggtgggatctcaccgtgggtccgattagccttttctctgccttgcttgcttgagcttcagcggaattcgaaatggctggcggtaaggctggaaaggactccggaaaggccaagacaaaggcggtttcccgctcgcagagagccggcttgcagttcccagtgggccgtattcatcgacacctaaaatctaggacgaccagtcatggacgtgtgggcgcgactgccgctgtgtacagcgcagccatcctggagtacctcaccgcagaggtacttgaactggcaggaaatgcatcaaaagacttaaaggtaaagcgtattacccctcgtcacttgcaacttgctattcgtggagatgaagaattggattctctctggactgtatctctgtgaaaaacacaattttgcctttttgtaattctatttgagcaagttggaagtttaattagctttccaaccaaccaaatttctgcattcgagtcttaaccatatttaagtgttactgtggcttcaaagaagctattgattctgaagtagtgggttttgattgagttgactgtttttaaaaaactgtttggattttaattgtgatgcagaagttatagtaacaaacatttggttttgtacagacattatttccactctggtggataagttcaataaaggtcatatcccaaacta

SEQ ID NO: 1870 - protein, 105 aa, Homosapiens
MAGGKAGKDSGKAKTKAVSRSQRAGLQFPVGRIHRHLKSRTTSHGRVGATAAVYSAAILEYLTAEVLELAGNASKDLKVKRITPRHLQLAIRGDEELDSLWTVSL

SEQ ID NO: 1871 - DNA, 730 bp, Homosapiens
attggtgggatgagcaatccgagttcccggatgagggaacattctgcagtataaagggagcagggaaggcgggagacagcgcagtttgaatcgcggtgcgacgaaggagtaggtggtgggatctcaccgtgggtccgattagccttttctctgccttgcttgcttgagcttcagcggaattcgaaatggctggcggtaaggctggaaaggactccggaaaggccaagacaaaggcggtttcccgctcgcagagagccggcttgcaggtcagtagttgttcgtgcagtctgggagtcatgatgtttttctttgcatttccttttttgttattcatcgctctcgatgggcgttttgtgtatgcgtgggtgatgcggtgtcgcgacttgggctgcccatacgataaatatgggggggaggaatcacgtgtttcgatgtcgggacgcgttgctgcgcccgtgccccttgctttggcgcgcatataatttccccatctctagttctcatttttgtgcatttatgtttgtgtatgcttaaaatttaagttcccagtgggccgtattcatcgacacctaaaatctaggacgaccagtcatggacgtgtgggcgcgactgccgctgtgtacagcgcagccatcctggagtacctcaccgcagaggtacttgaactggcaggaaatgcatcaaaagacttaaaggtaaagcgtattacccctcgtcacttgcaacttgc

SEQ ID NO: 1872 - protein, 98 aa, Homosapiens [sequence omitted]

SEQ ID NO: 1873 - DNA, 522 bp, Homosapiens
gctgctccgctagcagccgacaaaacacctccccccactcttctaaatcctgtctccgcgcgttcccaaccgtcgccacttcacccccatccctctgtgtaacgggtttttctctcgccggcaaaaacccgcggagtcatcgagcgtctctgcgaagtttaccatttcgaattccgctgaagctcaagcaagcaaggcagagaaaaggctaatcggacccacgagaacttgaacatgaaacacaaacggtaagaggcaaagatgcagcagtggaaaaaaagaggaaaattgaattcagaacaaactggatttgacatttatgcttcccagctaagagacgttggtctaatcaacctatgtgagcattccacttctcttgggcagaatgggactattgtgaagactgcatgagctaagtcatgtgcttttttaactgtaatgcatcataccaagataaaatattattagcatgaagaatgaatgctggcaatatttcatgactattttcattttacaaaagtg

SEQ ID NO: 1874 - protein, 49 aa, Homosapiens [sequence omitted]

SEQ ID NO: 1875 - DNA, 936 bp, Homosapiens
ggaacgggggagaagaagggcaccgcggcgggagggaagaaacagagcgagctacgctgcaggagcgcagttaccagccggctgcgatcacgtgcctgggaggaggagctgagacctcaggggaggggcgcgcggtagcgtcccgggtcccctagcagggctctagagaccacgtgaagtctcctcgacagctgctttgcctcaggcataaatcagaagaggaaaaccagcttctggacctggagagaggatgaaagggaataggaattgagggaagcggaagggaagaataagggacccctggagagtccctaccaagccagacataacaaacaaaagtcctctactactgaggaagacagaacagggaagccagcaggggaagaaaaagatgctgctgctcttgatgcctcaaaaacagcaaggaagaacccaagcaactgatgtacacacccttggaacaaatctgccccagaagtacaagacacactcttcgaattcatggaataaatgggaggagctggtgtagtgaaggatgaagagaaggcaatgcattggtttagacaagcctcccagcaggaccatcctggtgctgcctttaaccttgcagtaggaacactgaaaaacatgactgcctccatggaagcaggggatgtagaaatgctccttaatgttgctgcaaaatgggggatccaagaagcccaagaacttctggagaatgttatttggactaaaagcaagctcttgccaactgaaagaaccaggagttcttataaaccataatgtgtgcctgcatgctcttcctggaacatgggatgttctgctctcacttgtccactgtggccttgcaatgctttgtggcattttcaatggaagctccttttacttatagtctcatatgctgctgcagcattaatttgctggttaaaatccttt

SEQ ID NO: 1876 - protein, 90 aa, Homosapiens
MGGAGVVKDEEKAMHWFRQASQQDHPGAAFNLAVGTLKNMTASMEAGDVEMLLNVAAKWGIQEAQELLENVIWTKSKLLPTERTRSSYKP

SEQ ID NO: 1877 - DNA, 5250 bp, Homosapiens
atggacttagcaccagacagggctactggccgcccgtggctcccgttgcacactctatcagtatctcagctccttcgagtgttttggctactgtcattgcttccggggcaggcctgggtccacggggccgagccgcgccaggtgttccaagtgctggaagagcaacctccaggcactctggtaggcaccatccagacgcgccccggcttcacctacaggctcagcgaaagccacgccctgtttgccataaacagtagcaccggagccctgtacaccacctccaccatcgaccgcgagagcctgcccagcgacgtgatcaacctggtggtcctttccagcgcgcccacctaccccaccgaagtgcgagtgctggtgcgggacctcaatgacaacgcccccgttttcccggacccctctatcgtggtcactttcaaggaagacagtagcagcggacgccaagtcatcttagacaccgccaccgactcggacatcggctcaaacggtgtggaccaccgctcctaccgcatcatccgcggcaatgaggcggggcgcttccgtctggacatcaccctgaacccgagcggcgagggagcgttcctgcatctggtgtccaagggcggactggaccgtgaggtcactccgcagtaccagctcctggttgaggtggaggacaagggtgagcctaagcggcggggctaccttcaggtaaacgtgactgtgcaagacattaatgacaaccccccggtttttggcagttctcactaccaggcgggggtgcctgaggacgcggttgtgggttccagcgtcctccaggtggcggcggcggacgcggacgagggcaccaacgcggacatccgctatcgcctgcaggacgaggggacccccttccaaatggaccctgagacgggacttatcacggtgcgggagcccctggacttcgaagctcggcgccaatactcgcttacggtgcaggcgatggacagaggcgtgccttccctcactgggcgcgccgaggcgctgattcagctgctggacgtgaatgacaatgacccggtagtgaagttccgctacttcccggccacctcgcgctacgcctcggtagatgagaatgctcaagtgggcaccgtggtggctctgctcaccgtgacggacgcagattctcccgcggccaacgggaacatctccgtgcaaattctcgggggcaatgagcagcgccactttgaagtgcaaagcagcaaagtgccgaacctgagcctaatcaaggtggccagcgccttggaccgcgagcgcatcccttcctacaacctcacagtttccgtctctgataactacggggcgccccctggcgcagcagtccaggcgcgctcttctgtggcaagcctggtgatttttgttaatgacatcaatgaccatcctcctgtcttttcacagcaagtgtacagagtgaacctgagcgaggaggcgcctccgggaagctatgtgagtgggatatctgccactgatggcgactctggtctcaatgctaatctgcgttacagcattgtctctggcaatggactgggatggttccatatcagtgaacatagcggcctcgtgaccactgggtcctctgggggcctggaccgtgaacttgcttcccagattgttctgaatataagtgcccgggaccagggagttcaccccaaggtgtcctatgcccagcttgtagtaactctcctagatgtgaatgatgaaaagccagtatttagccagccagaagggtatgatgtgtctgtggttgagaatgccccaacagggacagaactgttgatgctcagggcaactgacggggacctgggtgacaacggaacagtgcgcttctccttacaagaggcagagactgaccggaggtccttccgtctggatcctgtgtctgggaggttgagtactatttcctccttggacagagaagagcaagccttctactccctgttggttctggccacagatctgggctcccctccccagtcatcaatggctcgcataaatgtgagtcttctggatataaatgataacagccctgtcttctacccggtccaatactttgctcacattaaggagaatgagcctggaggtagctacatcaccactgtgtctgccactgacccagacttgggtaccaatggtactgtcaaatatagcatatctgctggggacaggtctcggtttcaggtcaatgctcagagtggggttatttctacaagaatggccctagacagagaagaaaaaacagcttatcagttgcaaatagtagctactgatggtggcaatttacaatctcccaaccaggcaatagtaaccatcactgtattggacactcaagacaacccacctgtattcagtcaggttgcctacagctttgtggtttttgagaacgtggcgctgggatatcatgtgggtagtgtgtctgcatccaccatggatctcaattccaacatcagttatctcattactactggggatcagaaaggtatgtttgctatcaaccaggtcactgggcagcttaccacagcaaatgtgattgatagagaagagcaatccttttatcagctgaaggtagtggccagtgggggcacagtgactggagacactatggttaacataacagttaaggatttgaatgacaactctccccatttccttcaggcaatagagagtgtaaatgtggtggagaattggcaggcaggtcacagcattttccaggccaaagctgtggaccctgatgaaggtgtcaatggcatggtactctatagtctgaagcaaaaccccaagaacctgtttgctatcaatgaaaagaatggcactattagtctgcttgggcccctggatgttcatgctggctcctaccaaatagagatcttggcatctgacatgggtgtcccacagctctcctctagtgtcatcttaacagtttatgtccatgatgtaaatgacaattcaccagtgtttgaccaactctcttatgaagtcaccctttctgagtcagaacctgtgaattctcgattctttaaagtacaagcttctgataaggattcaggagcaaatggtgaaattgcatacaccattgctgaaggaaatacaggggatgcttttggcatattcccagatggtcaattgtatataaaaagtgaactggaccgtgaacttcaagacagatatgttttaatggttgttgcttctgacagagcagtggaaccccttagtgctactgtgaatgttactgtaattttagaagatgtaaatgataacagacctctttttaacagtaccaattacacattttacttcgaagaagagcagagggctgggtcgtttgtgggcaaagtaagtgctgtagataaagactttgggccaaatggagaagtaaggtattcttttgaaatggtgcagccagattttgagttgcatgccatcagtggggaaattacaaatactcatcagtttgacagggagtctcttatgaggcggagagggactgctgtgtttagctttacagtcatagcaacagatcaggggatccctcagcctctcaaggatcaggccactgtacatgtttacatgaaggatataaatgataatgctcccaaatttttaaaagacttttaccaagctacaatatcagaatcagcagccaatctgacacaagtgttaagagtatctgcctcagatgttgatgaaggtaataatggacttattcactattctataataaaaggaaatgaagaaagacagtttgctatagacagtacctctggtcaggtaacactaattggcaaattagactatgaagcaacacctgcctattcccttgtaattcaagcagtggattcagggacaatccccctcaattcaacgtgtactttaaatattgatattttagatgaaaatgacaataccccttctttccctaaatcaacactctttgttgatgttttggaaaacatgagaattggtgaactcgtgtcctctgttactgcaactgattccgattcaggtgacaatgctgatttatattacagtattactgggactaacaaccacggaacttttagcattagcccaaacactgggagtatttttcttgccaaaaaactggactttgaaacacagtctttgtataaattaaatataacagcaaaagaccaaggaagacctcctcgttcatctacaatgtcagtggttattcacgtgagggactttaatgacaatcctcctagctttcctcctggagatattttcaagtctattgttgagaacattcccatcggtacatctgtcatttcagtgactgcacatgaccctgatgcagacattaatggtcaactatcctacacaatcattcaacagatgccaagaggcaaccactttaccatagatgaagtcaaagggactatatatactaatgctgaaatagatcgggaatttgctaatctctttgagttgactgtaaaagccaatgatcaagctgtgccaatagaaactagacggtatgctttgaagaacgtgaccattttggttacagacctcaatgacaatgtcccaatgtttatatcacaaaacgcccttgctgcagacccatcagctgtgattggttccgttctgacaacaattatggctgctgacccagatgaaggtgctaatggagaaatagagtatgagatcatcaatggggacacagacaccttcattgttgatcgttatagtggagacctgagagtggcttcagcgttggtgccttcacagttgatctacaatctcatagtttcagcaacagaccttgggcctgaaaggaggaaatcgaccactgaattgaccatcattcttcagggccttgatggacctgtttttactcaacccaaatatataactattttgaaggaaggagaacccattggcacaaacgtgatatcaatagaagcagctagccccagaggatctgaggccccagtggagtattatattgtttcagttcgttgtgaagaaaaaactgttggacgcctctttactattggacgacatactggtataattcagaccgcagccattctggaccgggagcaaggagcatgtctttacctggtggatgtttatgccatagaaaaatcaactgcttttcccagaacacagagagcagaggcccctcaaagacattctagtgtcagtcagccaaaaacacaaacatcaaatgtggtttgtgatacttggcagtga

SEQ ID NO: 1878 - protein, 1749 aa, Homosapiens
MDLAPDRATGRPWLPLHTLSVSQLLRVFWLLSLLPGQAWVHGAEPRQVFQVLEEQPPGTLVGTIQTRPGFTYRLSESHALFAINSSTGALYTTSTIDRESLPSDVINLVVLSSAPTYPTEVRVLVRDLNDNAPVFPDPSIVVTFKEDSSSGRQVILDTATDSDIGSNGVDHRSYRIIRGNEAGRFRLDITLNPSGEGAFLHLVSKGGLDREVTPQYQLLVEVEDKGEPKRRGYLQVNVTVQDINDNPPVFGSSHYQAGVPEDAVVGSSVLQVAAADADEGTNADIRYRLQDEGTPFQMDPETGLITVREPLDFEARRQYSLTVQAMDRGVPSLTGRAEALIQLLDVNDNDPVVKFRYFPATSRYASVDENAQVGTVVALLTVTDADSPAANGNISVQILGGNEQRHFEVQSSKVPNLSLIKVASALDRERIPSYNLTVSVSDNYGAPPGAAVQARSSVASLVIFVNDINDHPPVFSQQVYRVNLSEEAPPGSYVSGISATDGDSGLNANLRYSIVSGNGLGWFHISEHSGLVTTGSSGGLDRELASQIVLNISARDQGVHPKVSYAQLVVTLLDVNDEKPVFSQPEGYDVSVVENAPTGTELLMLRATDGDLGDNGTVRFSLQEAETDRRSFRLDPVSGRLSTISSLDREEQAFYSLLVLATDLGSPPQSSMARINVSLLDINDNSPVFYPVQYFAHIKENEPGGSYITTVSATDPDLGTNGTVKYSISAGDRSRFQVNAQSGVISTRMALDREEKTAYQLQIVATDGGNLQSPNQAIVTITVLDTQDNPPVFSQVAYSFVVFENVALGYHVGSVSASTMDLNSNISYLITTGDQKGMFAINQVTGQLTTANVIDREEQSFYQLKVVASGGTVTGDTMVNITVKDLNDNSPHFLQAIESVNVVENWQAGHSIFQAKAVDPDEGVNGMVLYSLKQNPKNLFAINEKNGTISLLGPLDVHAGSYQIEILASDMGVPQLSSSVILTVYVHDVNDNSPVFDQLSYEVTLSESEPVNSRFFKVQASDKDSGANGEIAYTIAEGNTGDAFGIFPDGQLYIKSELDRELQDRYVLMVVASDRAVEPLSATVNVTVILEDVNDNRPLFNSTNYTFYFEEEQRAGSFVGKVSAVDKDFGPNGEVRYSFEMVQPDFELHAISGEITNTHQFDRESLMRRRGTAVFSFTVIATDQGIPQPLKDQATVHVYMKDINDNAPKFLKDFYQATISESAANLTQVLRVSASDVDEGNNGLIHYSIIKGNEERQFAIDSTSGQVTLIGKLDYEATPAYSLVIQAVDSGTIPLNSTCTLNIDILDENDNTPSFPKSTLFVDVLENMRIGELVSSVTATDSDSGDNADLYYSITGTNNHGTFSISPNTGSIFLAKKLDFETQSLYKLNITAKDQGRPPRSSTMSVVIHVRDFNDNPPSFPPGDIFKSIVENIPIGTSVISVTAHDPDADINGQLSYTIIQQMPRGNHFTIDEVKGTIYTNAEIDREFANLFELTVKANDQAVPIETRRYALKNVTILVTDLNDNVPMFISQNALAADPSAVIGSVLTTIMAADPDEGANGEIEYEIINGDTDTFIVDRYSGDLRVASALVPSQLIYNLIVSATDLGPERRKSTTELTIILQGLDGPVFTQPKYITILKEGEPIGTNVISIEAASPRGSEAPVEYYIVSVRCEEKTVGRLFTIGRHTGIIQTAAILDREQGACLYLVDVYAIEKSTAFPRTQRAEAPQRHSSVSQPKTQTSNVVCDTWQ

SEQ ID NO: 1879 - DNA, 4408 bp, Homosapiens
atatcaatgagtgcctgcagagtccttgcaagaatggtgccatctgccagaattttccaggaagcttcaactgtgtttgcaaaactggatacacagggaaaatgtgtgaatcttcagtcaattactgtgaatgcaacccctgctttaatggtggttcctgccaaagtggtgtggattcttattattgtcattgtccatttggtgtctttggaaaacactgcgagttgaacagttatggatttgaggagttatcatacatggaatttccaagcttggaccccaataacaactatatttatgtcaaatttgccacgattaaaagtcatgccttattgctttacaactatgacaaccagacaggcgaccgggctgagtttttggcccttgaaattgccgaagaaagactaagattctcttataatttaggcagtggtacatataagctcaccaccatgaagaaggtgtcagatggacattttcacactgtgattgccaggagagcaggaatggcagcctccttaactgtggactcctgttctgagaaccaagagccaggatattgtactgtcagtaatgtggcagtttcagatgactggactcttgatgttcagccaaatagagttacagttggaggtatcagatctctagaaccaatccttcagagaagaggacacgtggaaagccatgattttgttgggtgtataatggagtttgcagtcaatggaaggcctctggaacccagccaagctttggcagcacaaggcatcctagatcaatgccctaggctggaaggcgcttgtactcgcagcccatgccaacatggtggcacatgtatggattactggtcatggcagcagtgtcattgcaaagagggactcactgggaaatactgtgaaaaatctgttactcctgacactgccttatcattagaaggcaaagggcgcttggactaccacatgagtcagaatgagaagcgggaatatttgttaaggcaaagcttacgaggtgccatgttggagccttttggtgtgaacagtctggaagtaaaatttaggaccagaagcgagaatggcgttttaatccatatccaagaaagcagcaattacactactgtgaagattaagaatggcaaagtatattttacatccgatgcaggaattgctgggaaagtggagagaaatattcctgaagtatatgttgcagacggccactggcacacttttctaattgggaaaaatggaacagcaacagtattgtctgttgacagaatatataacagagatattatccaccctactcaggacttcggtggccttgatgtgcttactatatcacttggaggaattccacccaatcaagcacatcgagatgcccaaacaggttttgatggctgcattgcttctatgtggtatggtggagaaagtcttcctttcagcgggaagcatagcttggcctccatctcaaaaacagatccctcagtgaagattggctgccgtggcccgaacatttgtgccagcaacccctgctggggtgatttgctgtgcattaatcagtggtatgcctacaggtgtgtccctcctggggactgtgcctcccacccgtgccagaatggtggcagctgtgagccaggcctgcactccggcttcacctgtagctgcccagactcgcacacgggaaggacctgtgagatggtggtggcctgtcttggcgtcctctgtcctcaggggaaggtgtgcaaagctggaagtcctgcggggcatgtctgtgttctgagtcagggccctgaagagatctctctgcctttgtgggctgtgcctgccatcgtgggcagctgcgcaaccgtcttggccctcctggtccttagcctgatcctgtgtaaccagtgcagggggaagaaggccaaaaatcccaaagaggagaagaaaccgaaggagaagaagaaaaagggaagtgagaacgttgcttttgatgaccctgacaatatccctccctatggggatgacatgactgtgaggaagcagcctgaagggaacccaaaaccagatatcattgaaagggaaaacccctaccttatctatgatgaaactgatattcctcacaactcagaaaccatccccagcgcccctttggcatctccagagcaggagatagagcactatgacattgacaacgccagcagcatcgccccttcggatgcagacatcattcaacactacaagcagttccgcagccacacaccaaaattttcaatccagaggcacagtcccctaggctttgcaaggcaatcccccatgcccttaggagcaagcagtttgacttaccagccttcatatggtcaaggtttgagaaccagctccctaagccactcagcatgcccaactcccaaccctctgtctcgacacagtccagcccctttctccaaatcttctacgttctatagaaacagcccagcaagggaattgcatcttcctataagggatggtaatactttggaaatgcatggtgacacctgccaacctggcattttcaactatgccacaaggctgggaaggagaagcaagagtcctcaggccatggcatcacatggttctagaccagggagtcgcctaaagcagccgattgggcagattccactggaatcttctcctccagtcggactttctattgaagaagtggagaggctcaacacacctcgccctagaaacccaagtatctgcagtgcagaccatgggaggtcttcttcagaggaggactgcagaaggccactgtctagaacaaggaatccagcggatggcattccagctccagaatcctcttctgatagtgactcccatgaatctttcacttgctcagaaatggaatatgacagggagaagccaatggtatatacttccagaatgcccaaattatctcaagtcaatgaatctgatgcagatgatgaagataattatggagccagactgaagcctcgaaggtaccacggtcgcagggccgagggaggacctgtgggcacccaggcagcagcaccaggcactgctgacaacacactgcccatgaagctagggcagcaagcagggactttcaactgggacaaccttttgaactggggccctggctttggccattatgtagatgtttttaaagatttggcatctcttccagaaaaagcagcagcaaatgaagaaggcaaagctgggacaactaaaccagtccccaaagatggggaagcagaacagtatgtgtgaagtttatgtactggcactataaaatataaaaacaagaaataatactcaaaccattgtaaagttgctgactaggttgggtcacatttgaaaaacaggccagtatggactagtggtggagggaaaactttaaaaataataaccacaatgctgctgaaacagactcacaacaactcttaatttaaacatgtgtggttgaatttatttccctgcatgcattgtgttttgtaactagttatgtggcatgcagcatttggaaaatttttcttatttaccagtgtttgatttgtgatttttaaaaattgatacctttaccattgcagaaaagaacttgtgctttcccagtggcgtatgtgtattgtttcaactgtattattataattatattttgcattgcaagattcttgatgttaaaccaatccttgtaaagtgtaaaaaggaaccctcctatcgtggaatgaaagattaagtatattaacacttttcagaatgatagtttctgtatttgatgttgctcagaaatgtctcagtatttgagtaagttttacatgacagtgggtactgaaattaagtcattttgttcagcactttaacgctttcttatagaattgtcttaaaacttctggatccttgagcaaatgattatagtctcctgactttcatgaggcttccattaggaacagaatgattgcatgttgtccccagaacactgccaccttgctatgcgaatgatgttctcagcagcacttctaagaaacactcttaaaagttatttattgaaaatttttcgtatgcttttaatattttaaagaattgacctaaggaaagcttatgattggacttattttccaaccagataacatttactctaagtacccagtttttataatttatatgaaatcagatttcaacacttactttgtcattttgtagatcatttttttaaaatactgtgtaaaaactttttttacacctaagctgtgtttttgatactgatattttcctatgctgaatagttttcttactttcagggaaggtaagaaaatactttttttatatttgttacttatgtaacattcatatttttctcattttgatatttgtaacatactgtatgctttctacttgtaaatgtcaacaatagaattaaaatatttatttaaaat

SEQ ID NO: 1880 - protein, 1047 aa, Homosapiens
MCESSVNYCECNPCFNGGSCQSGVDSYYCHCPFGVFGKHCELNSYGFEELSYMEFPSLDPNNNYIYVKFATIKSHALLLYNYDNQTGDRAEFLALEIAEERLRFSYNLGSGTYKLTTMKKVSDGHFHTVIARRAGMAASLTVDSCSENQEPGYCTVSNVAVSDDWTLDVQPNRVTVGGIRSLEPILQRRGHVESHDFVGCIMEFAVNGRPLEPSQALAAQGILDQCPRLEGACTRSPCQHGGTCMDYWSWQQCHCKEGLTGKYCEKSVTPDTALSLEGKGRLDYHMSQNEKREYLLRQSLRGAMLEPFGVNSLEVKFRTRSENGVLIHIQESSNYTTVKIKNGKVYFTSDAGIAGKVERNIPEVYVADGHWHTFLIGKNGTATVLSVDRIYNRDIIHPTQDFGGLDVLTISLGGIPPNQAHRDAQTGFDGCIASMWYGGESLPFSGKHSLASISKTDPSVKIGCRGPNICASNPCWGDLLCINQWYAYRCVPPGDCASHPCQNGGSCEPGLHSGFTCSCPDSHTGRTCEMVVACLGVLCPQGKVCKAGSPAGHVCVLSQGPEEISLPLWAVPAIVGSCATVLALLVLSLILCNQCRGKKAKNPKEEKKPKEKKKKGSENVAFDDPDNIPPYGDDMTVRKQPEGNPKPDIIERENPYLIYDETDIPHNSETIPSAPLASPEQEIEHYDIDNASSIAPSDADIIQHYKQFRSHTPKFSIQRHSPLGFARQSPMPLGASSLTYQPSYGQGLRTSSLSHSACPTPNPLSRHSPAPFSKSSTFYRNSPARELHLPIRDGNTLEMHGDTCQPGIFNYATRLGRRSKSPQAMASHGSRPGSRLKQPIGQIPLESSPPVGLSIEEVERLNTPRPRNPSICSADHGRSSSEEDCRRPLSRTRNPADGIPAPESSSDSDSHESFTCSEMEYDREKPMVYTSRMPKLSQVNESDADDEDNYGARLKPRRYHGRRAEGGPVGTQAAAPGTADNTLPMKLGQQAGTFNWDNLLNWGPGFGHYVDVFKDLASLPEKAAANEEGKAGTTKPVPKDGEAEQYV

SEQ ID NO: 1881 - DNA, 2754 bp, Homosapiens
tgtagctgcccagactcgcacacgggaaggacctgtgagatggtggtggcctgtcttggcgtcctctgtcctcaggggaaggtgtgcaaagctggaagtcctgcggggcatgtctgtgttctgagtcagggccctgaagagatctctctgcctttgtgggctgtgcctgccatcgtgggcagctgcgcaaccgtcttggccctcctggtccttagcctgatcctgtgtaaccagtgcagggggaagaaggccaaaaatcccaaagaggagaagaaaccgaaggagaagaagaaaaagggaagtgagaacgttgcttttgatgaccctgacaatatccctccctatggggatgacatgactgtgaggaagcagcctgaagggaacccaaaaccagatatcattgaaagggaaaacccctaccttatctatgatgaaactgatattcctcacaactcagaaaccatccccagcgcccctttggcatctccagagcaggagatagagcactatgacattgacaacgccagcagcatcgccccttcggatgcagacatcattcaacactacaagcagttccgcagccacacaccaaaattttcaatccagaggcacagtcccctaggctttgcaaggcaatcccccatgcccttaggagcaagcagtttgacttaccagccttcatatggtcaaggtttgagaaccagctccctaagccactcagcatgcccaactcccaaccctctgtctcgacacagtccagcccctttctccaaatcttctacgttctatagaaacagcccagcaagggaattgcatcttcctataagggatggtaatactttggaaatgcatggtgacacctgccaacctggcattttcaactatgccacaaggctgggaaggagaagcaagagtcctcaggccatggcatcacatggttctagaccagggagtcgcctaaagcagccgattgggcagattccactggaatcttctcctccagtcggactttctattgaagaagtggagaggctcaacacacctcgccctagaaacccaagtatctgcagtgcagaccatgggaggtcttcttcagaggaggactgcagaaggccactgtctagaacaaggaatccagcggatggcattccagctccagaatcctcttctgatagtgactcccatgaatctttcacttgctcagaaatggaatatgacagggagaagccaatggtatatacttccagaatgcccaaattatctcaagtcaatgaatctgatgcagatgatgaagataattatggagccagactgaagcctcgaaggtaccacggtcgcagggccgagggaggacctgtgggcacccaggcagcagcaccaggcactgctgacaacacactgcccatgaagctagggcagcaagcagggactttcaactgggacaaccttttgaactggggccctggctttggccattatgtagatgtttttaaagatttggcatctcttccagaaaaagcagcagcaaatgaagaaggcaaagctgggacaactaaaccagtccccaaagatggggaagcagaacagtatgtgtgaagtttatgtactggcactataaaatataaaaacaagaaataatactcaaaccattgtaaagttgctgactaggttgggtcacatttgaaaaacaggccagtatggactagtggtggagggaaaactttaaaaataataaccacaatgctgctgaaacagactcacaacaactcttaatttaaacatgtgtggttgaatttatttccctgcatgcattgtgttttgtaactagttatgtggcatgcagcatttggaaaatttttcttatttaccagtgtttgatttgtgatttttaaaaattgatacctttaccattgcagaaaagaacttgtgctttcccagtggcgtatgtgtattgtttcaactgtattattataattatattttgcattgcaagattcttgatgttaaaccaatccttgtaaagtgtaaaaaggaaccctcctatcgtggaatgaaagattaagtatattaacacttttcagaatgatagtttctgtatttgatgttgctcagaaatgtctcagtatttgagtaagttttacatgacagtgggtactgaaattaagtcattttgttcagcactttaacgctttcttatagaattgtcttaaaacttctggatccttgagcaaatgattatagtctcctgactttcatgaggcttccattaggaacagaatgattgcatgttgtccccagaacactgccaccttgctatgcgaatgatgttctcagcagcacttctaagaaacactcttaaaagttatttattgaaaatttttcgtatgcttttaatattttaaagaattgacctaaggaaagcttatgattggacttattttccaaccagataacatttactctaagtacccagtttttataatttatatgaaatcagatttcaacacttactttgtcattttgtagatcatttttttaaaatactgtgtaaaaactttttttacacctaagctgtgtttttgatactgatattttcctatgctgaatagttttcttactttcagggaaggtaagaaaatactttttttatatttgttacttatgtaacattcatatttttctcattttgatatttgtaacatactgtatgctttctacttgtaaatgtcaacaatagaattaaaatatttattt

SEQ ID NO: 1882 - protein, 518 aa, Homosapiens
MVVACLGVLCPQGKVCKAGSPAGHVCVLSQGPEEISLPLWAVPAIVGSCATVLALLVLSLILCNQCRGKKAKNPKEEKKPKEKKKKGSENVAFDDPDNIPPYGDDMTVRKQPEGNPKPDIIERENPYLIYDETDIPHNSETIPSAPLASPEQEIEHYDIDNASSIAPSDADIIQHYKQFRSHTPKFSIQRHSPLGFARQSPMPLGASSLTYQPSYGQGLRTSSLSHSACPTPNPLSRHSPAPFSKSSTFYRNSPARELHLPIRDGNTLEMHGDTCQPGIFNYATRLGRRSKSPQAMASHGSRPGSRLKQPIGQIPLESSPPVGLSIEEVERLNTPRPRNPSICSADHGRSSSEEDCRRPLSRTRNPADGIPAPESSSDSDSHESFTCSEMEYDREKPMVYTSRMPKLSQVNESDADDEDNYGARLKPRRYHGRRAEGGPVGTQAAAPGTADNTLPMKLGQQAGTFNWDNLLNWGPGFGHYVDVFKDLASLPEKAAANEEGKAGTTKPVPKDGEAEQYV

SEQ ID NO: 1883 - DNA, 393 bp, Homosapiens
aacactcaaccctagacgctgccgtggggtcagagcccatgctcccaacgacctgcccgtctgcatgctcctcccctaggggtttgagctgctgcagcagagcgccaaagaagcaagccacacgccatcacacgccctgccagggggataagggaacttttcctgtttcaactgggacctcgcccaggatcccggaagggattccagcatttgtcccagcatgttttatgcagaaagaagtgatcaaggaaagtgtccaagacatggtaagccaaatgtagaatgaggcagtcatagtgagaggattgtccactctgttatgcatgattgagagtcatatttattcctaaactacattcttttattattactgttaacttttctctgaagtcc

SEQ ID NO: 1884 - protein, 80 aa, Homosapiens
MLPTTCPSACSSPRGLSCCSRAPKKQATRHHTPCQGDKGTFPVSTGTSPRIPEGIPAFVPACFMQKEVIKESVQDMVSQM

SEQ ID NO: 1885 - DNA, 5144 bp, Homosapiens
ccaagaggggtcttactcatccttttccattttggagaggttctgctgactctacattaagcccagacagggtggtgtcctgctttgctcctttctgctctctgcgttcctctgctgccttgatggattctgatgtggttgctcagatgatcagcctgcaggagccttgaaaccagcgaaacaataatcaaagagcagttctgtcaaagaaaacaacataaatcaggtacagaatttcagagtgggatatcagatctttagtgtgaagatacatctacattaaaccaggaatcactagaactgacatttggacaagaaaatttggaaaattttaaaactgtgaaggttgatcatggaaattaaagaggaaggggcatcagaagaagggcagcactttcttcctacagcccaggccaatgatcccggggactgtcagttcacaagtatccagaagactccaaatgaaccgcagttggaattcatccttgcatgcaaggatctcgtggctcctgtccgtgatcgtaaactgaatacactggtgcagatctccgtaatccaccccgtggagcagagtctgacaagatactccagcaccgaaattgtggagggaacaagggacccactgtttttgactggtgtcacattcccatctgagtatcccatctatgaggagaccaaaataaaactaacagtctatgatgtcaaggataagtctcatgacaccgttcgaaccagtgtcctaccagaacataaggatcccccgccagaagttgggcgaagtttcttgggctatgccagttttaaagtgggagagctgctgaagtcaaaggagcaattgctggtcctgagcctgagaacttcagatggtggcaaagtggttggcaccatagaagtcagtgtcgtgaagatgggggagattgaggatggggaagccgaccacatcaccacagatgtacagggacaaaagtgtgccctggtatgtgaatgtacagccccggaaagtgtgagcggaaaagataacttaccttttttgaattcagtgttaaagaacccagtatgtaaattatatagatttcccacatctgacaataagtggatgcgaattcgagagcagatgtcagagagcattctttcctttcatattcctaaggaattgatttcccttcacattaaagaagatttgtgcagaaaccaggagataaaagaacttggtgagctttctccacattgggacaatctgcgaaaaaatgtccttactcactgtgatcaaatggtgaatatgtaccaagacattctgacagaacttagcaaggaaacagggtcctctttcaaatcaagcagcagcaaaggagagaaaacattagaatttgttccaataaatctacatctgcaaagaatgcaggtacacagccctcacttgaaagatgctctctacgatgtcatcactgtgggagccccagctgcccattttcagggatttaagaatggtggtcttcggaagctactccatagatttgaaacagaaagaagaaataccggataccagtttatttactattcacctgaaaacacagccaaagcaaaggaagttctcagcaacatcaatcaactacaacctcttatagcaacccatgcagacctactgcttaattctgcaagccagcattctccagacagcttgaagaattctttaaagatgctttcagaaaaaacagagctttttgtacatgccttcaaggatcaacttgtcaggagtgctcttttagcactctacactgcaaggccaggaggcattcttaagaagccaccctctcctaagagcagcacagaggagagcagtccccaagaccaacccccagtgatgagagggcaggactccataccacatcattcagactatgatgaggaagagtgggacagggtgtgggccaatgtggggaagagcctgaactgcattattgctatggtggacaaactgattgaaagagatggtggcagtgaaggcagtggcggcaacaatgatggagaaaaggaaccttcattaacagatgccattccctctcacccaagagaggactggtatgaacagttgtatcccctcatccttaccctgaaggactgcatgggagaagtggtgaaccgagccaagcagtccctgacatttgtgctccttcaggaacttgcgtacagcttgccccagtgtctgatgctgacgctaagaagagacatcgtcttcagccaagcacttgctggattggtttgtggttttatcatcaaattacagacaagtctgtatgacccaggcttcctacagcagcttcacacagtggggttgatagtacaatatgaaggactgctaagtacatacagcgatgaaattggaatgctagaggacatggccgttggcatttccgatttaaagaaagttgcatttaaaataattgaagccaaatccaatgatgtgttgccagttataacaggaagacgagaacattacgtggtagaggtcaagcttccagccagaatgtttgagtcactacctctacagattaaagaaggacagttgcttcatgtgtatccagtactttttaatgttggaatcaatgaacagcaaactctggctgaaaggtttggagatgtctctttgcaagaaagtattaatcaggaaaacttcgaacttctacaagaatattacaagatatttatggaaaagatgcctcctgattatatttcacattttcaggaacaaaatgatttaaaagcattgctagaaaatctccttcaaaatatccaatccaaaaaaagaaagaatgtagaaattatgtggctggctgcaacgatttgccgcaaactgaatggtattcgtttcacctgttgtaaaagtgccaaagacaggacatcgatgtcagtgacacttgaacaatgctcaatcttgagagatgagcaccagttacacaaggacttctttatccgagcgctggattgcatgagaagagaaggatgccgcatagagaatgtactgaagaatatcaaatgcagaaagtatgctttcaacatgctacagctgatggctttccccaagtactacagacctccagaggggacttatggaaaagctgacacctaagtttaccaacatgttaataaacaggaacacaaatacatttcagttggataatcttcaccttggtcttttttgtttgtttttattgtcatgaatttgtggtgggggagatgatcacagatgtttcccaaaatctaggaactacttcaattcatcatcagcatattgctctgaaagaaatccattttaaaaaatcttacatgattcagtactgtcatttctagttctaagcttctatgtgttgagcctagctgattgagattggttcacaaagtgtaaatttcattcatgagtatttaaatgtttctgaggaaacatggatcatttcaataggactaggggtgattcacagagcaccactctccaaccaaatggaagagaggagagggggaaaaggaacatattttttttgtgatacaacttaatagcctatgagaacacagtcaacctgagaatcaatgtaagggatttaaaaaaaatgtgtagccactcaattaggtagagttaactcatgatctggaatactgaggcagtttgcaggtatgttccacaatgatctctatcatccagtcaaggtgtgactcctcccttgcaacaggcatatgcatggagtgagtaaagtggtcaacagacctttcaaaaccatggcatcttttcagaactctgacttgggttgtgtgatctagctgtgaatgtagcaatatagaacgtttaatagaatgataagcaaaacactgcaatgatctaaaattacaaataaaataaaaatgaacaacattttgatacccaaaatgaaaattcccatcagcctgaactttatgttgtgaagttcatgaatgtcagtgaggtatctctgagatgtttcttagcagtcatcctggtgtaagcatgcagttatggcataggtttgtgtgtgttaataagcctttaaaacatatgcaaccacaacaaatgataaagtaaaacaattattttctgttgccctgaatatcaaacttgcccttgcccttactcagcaaaataacatttataagttttccaaaatcccaaagtagaagtttccttaaaaaaatcatcttgtataataccagtattcaaacatgggtaaggttaatcacccccaatcactcaggagatagttgcagaatttgaattacaatctcttcttactttcctagcctgtggcttgtcacttctccaaattgccatgctaaatatgcatgaaaattgagggagaatgctagttaaaaagaaattaggatttatcactggaattgaaactaagagtacaaaagtctgaacgaatgaaacttttctccaaattttacaaattcttgttcctttctcattagaagagcatgctatccaaagcataaatctcccttgaaaataacagaggcttcttaagccctctcttagctatgatcaatggatgatattatgcttcccatagctaatgtgatagctccttgcctaggattcctgttgaaataaggattctagccccatgttaagtttttcaaattactacaaattttagataagcatttggagctttttatactagaattatcaattttttattttagctaattacctgtgggcattatacttgaggcaggtaccaaactacttacagcctttttaatgaaaatgtgctgtgtactttgaatccattcatagacaaaattaccttgatgttctcttaactcattctttattttagtgattaaatacaacctttgagttgttcaatatcatttgaaaatggtaggatttgtggttattttcattaccctattagatttaagataggctgggatgacagaggcctccttgaatagctatgaagcctcattcagcatatcaaatggtagtctgagttctaagaaaccttaagtaatttatcattctgtaaatactcttataagcaataatttttatttgtatttttgaaaacaaactacttaaatatggaaaaatattaactggaaagccagcagtagggttttctattttt

SEQ ID NO: 1886 - protein, 924 aa, Homosapiens
MEIKEEGASEEGQHFLPTAQANDPGDCQFTSIQKTPNEPQLEFILACKDLVAPVRDRKLNTLVQISVIHPVEQSLTRYSSTEIVEGTRDPLFLTGVTFPSEYPIYEETKIKLTVYDVKDKSHDTVRTSVLPEHKDPPPEVGRSFLGYASFKVGELLKSKEQLLVLSLRTSDGGKVVGTIEVSVVKMGEIEDGEADHITTDVQGQKCALVCECTAPESVSGKDNLPFLNSVLKNPVCKLYRFPTSDNKWMRIREQMSESILSFHIPKELISLHIKEDLCRNQEIKELGELSPHWDNLRKNVLTHCDQMVNMYQDILTELSKETGSSFKSSSSKGEKTLEFVPINLHLQRMQVHSPHLKDALYDVITVGAPAAHFQGFKNGGLRKLLHRFETERRNTGYQFIYYSPENTAKAKEVLSNINQLQPLIATHADLLLNSASQHSPDSLKNSLKMLSEKTELFVHAFKDQLVRSALLALYTARPGGILKKPPSPKSSTEESSPQDQPPVMRGQDSIPHHSDYDEEEWDRVWANVGKSLNCIIAMVDKLIERDGGSEGSGGNNDGEKEPSLTDAIPSHPREDWYEQLYPLILTLKDCMGEVVNRAKQSLTFVLLQELAYSLPQCLMLTLRRDIVFSQALAGLVCGFIIKLQTSLYDPGFLQQLHTVGLIVQYEGLLSTYSDEIGMLEDMAVGISDLKKVAFKIIEAKSNDVLPVITGRREHYVVEVKLPARMFESLPLQIKEGQLLHVYPVLFNVGINEQQTLAERFGDVSLQESINQENFELLQEYYKIFMEKMPPDYISHFQEQNDLKALLENLLQNIQSKKRKNVEIMWLAATICRKLNGIRFTCCKSAKDRTSMSVTLEQCSILRDEHQLHKDFFIRALDCMRREGCRIENVLKNIKCRKYAFNMLQLMAFPKYYRPPEGTYGKADT

SEQ ID NO: 1887 - DNA, 5026 bp, Homosapiens
gagttcagacagaagagggatcatcggactggaagctctggcagagccttgaaaccagcgaaacaataatcaaagagcagttctgtcaaagaaaacaacataaatcaggtacagaatttcagagtgggatatcagatctttagtgtgaagatacatctacattaaaccaggaatcactagaactgacatttggacaagaaaatttggaaaattttaaaactgtgaaggttgatcatggaaattaaagaggaaggggcatcagaagaagggcagcactttcttcctacagcccaggccaatgatcccggggactgtcagttcacaagtatccagaagactccaaatgaaccgcagttggaattcatccttgcatgcaaggatctcgtggctcctgtccgtgatcgtaaactgaatacactggtgcagatctccgtaatccaccccgtggagcagagtctgacaagatactccagcaccgaaattgtggagggaacaagggacccactgtttttgactggtgtcacattcccatctgagtatcccatctatgaggagaccaaaataaaactaacagtctatgatgtcaaggataagtctcatgacaccgttcgaaccagtgtcctaccagaacataaggatcccccgccagaagttgggcgaagtttcttgggctatgccagttttaaagtgggagagctgctgaagtcaaaggagcaattgctggtcctgagcctgagaacttcagatggtggcaaagtggttggcaccatagaagtcagtgtcgtgaagatgggggagattgaggatggggaagccgaccacatcaccacagatgtacagggacaaaagtgtgccctggtatgtgaatgtacagccccggaaagtgtgagcggaaaagataacttaccttttttgaattcagtgttaaagaacccagtatgtaaattatatagatttcccacatctgacaataagtggatgcgaattcgagagcagatgtcagagagcattctttcctttcatattcctaaggaattgatttcccttcacattaaagaagatttgtgcagaaaccaggagataaaagaacttggtgagctttctccacattgggacaatctgcgaaaaaatgtccttactcactgtgatcaaatggtgaatatgtaccaagacattctgacagaacttagcaaggaaacagggtcctctttcaaatcaagcagcagcaaaggagagaaaacattagaatttgttccaataaatctacatctgcaaagaatgcaggtacacagccctcacttgaaagatgctctctacgatgtcatcactgtgggagccccagctgcccattttcagggatttaagaatggtggtcttcggaagctactccatagatttgaaacagaaagaagaaataccggataccagtttatttactattcacctgaaaacacagccaaagcaaaggaagttctcagcaacatcaatcaactacaacctcttatagcaacccatgcagacctactgcttaattctgcaagccagcattctccagacagcttgaagaattctttaaagatgctttcagaaaaaacagagctttttgtacatgccttcaaggatcaacttgtcaggagtgctcttttagcactctacactgcaaggccaggaggcattcttaagaagccaccctctcctaagagcagcacagaggagagcagtccccaagaccaacccccagtgatgagagggcaggactccataccacatcattcagactatgatgaggaagagtgggacagggtgtgggccaatgtggggaagagcctgaactgcattattgctatggtggacaaactgattgaaagagatggtggcagtgaaggcagtggcggcaacaatgatggagaaaaggaaccttcattaacagatgccattccctctcacccaagagaggactggtatgaacagttgtatcccctcatccttaccctgaaggactgcatgggagaagtggtgaaccgagccaagcagtccctgacatttgtgctccttcaggaacttgcgtacagcttgccccagtgtctgatgctgacgctaagaagagacatcgtcttcagccaagcacttgctggattggtttgtggttttatcatcaaattacagacaagtctgtatgacccaggcttcctacagcagcttcacacagtggggttgatagtacaatatgaaggactgctaagtacatacagcgatgaaattggaatgctagaggacatggccgttggcatttccgatttaaagaaagttgcatttaaaataattgaagccaaatccaatgatgtgttgccagttataacaggaagacgagaacattacgtggtagaggtcaagcttccagccagaatgtttgagtcactacctctacagattaaagaaggacagttgcttcatgtgtatccagtactttttaatgttggaatcaatgaacagcaaactctggctgaaaggtttggagatgtctctttgcaagaaagtattaatcaggaaaacttcgaacttctacaagaatattacaagatatttatggaaaagatgcctcctgattatatttcacattttcaggaacaaaatgatttaaaagcattgctagaaaatctccttcaaaatatccaatccaaaaaaagaaagaatgtagaaattatgtggctggctgcaacgatttgccgcaaactgaatggtattcgtttcacctgttgtaaaagtgccaaagacaggacatcgatgtcagtgacacttgaacaatgctcaatcttgagagatgagcaccagttacacaaggacttctttatccgagcgctggattgcatgagaagagaaggatgccgcatagagaatgtactgaagaatatcaaatgcagaaagtatgctttcaacatgctacagctgatggctttccccaagtactacagacctccagaggggacttatggaaaagctgacacctaagtttaccaacatgttaataaacaggaacacaaatacatttcagttggataatcttcaccttggtcttttttgtttgtttttattgtcatgaatttgtggtgggggagatgatcacagatgtttcccaaaatctaggaactacttcaattcatcatcagcatattgctctgaaagaaatccattttaaaaaatcttacatgattcagtactgtcatttctagttctaagcttctatgtgttgagcctagctgattgagattggttcacaaagtgtaaatttcattcatgagtatttaaatgtttctgaggaaacatggatcatttcaataggactaggggtgattcacagagcaccactctccaaccaaatggaagagaggagagggggaaaaggaacatattttttttgtgatacaacttaatagcctatgagaacacagtcaacctgagaatcaatgtaagggatttaaaaaaaatgtgtagccactcaattaggtagagttaactcatgatctggaatactgaggcagtttgcaggtatgttccacaatgatctctatcatccagtcaaggtgtgactcctcccttgcaacaggcatatgcatggagtgagtaaagtggtcaacagacctttcaaaaccatggcatcttttcagaactctgacttgggttgtgtgatctagctgtgaatgtagcaatatagaacgtttaatagaatgataagcaaaacactgcaatgatctaaaattacaaataaaataaaaatgaacaacattttgatacccaaaatgaaaattcccatcagcctgaactttatgttgtgaagttcatgaatgtcagtgaggtatctctgagatgtttcttagcagtcatcctggtgtaagcatgcagttatggcataggtttgtgtgtgttaataagcctttaaaacatatgcaaccacaacaaatgataaagtaaaacaattattttctgttgccctgaatatcaaacttgcccttgcccttactcagcaaaataacatttataagttttccaaaatcccaaagtagaagtttccttaaaaaaatcatcttgtataataccagtattcaaacatgggtaaggttaatcacccccaatcactcaggagatagttgcagaatttgaattacaatctcttcttactttcctagcctgtggcttgtcacttctccaaattgccatgctaaatatgcatgaaaattgagggagaatgctagttaaaaagaaattaggatttatcactggaattgaaactaagagtacaaaagtctgaacgaatgaaacttttctccaaattttacaaattcttgttcctttctcattagaagagcatgctatccaaagcataaatctcccttgaaaataacagaggcttcttaagccctctcttagctatgatcaatggatgatattatgcttcccatagctaatgtgatagctccttgcctaggattcctgttgaaataaggattctagccccatgttaagtttttcaaattactacaaattttagataagcatttggagctttttatactagaattatcaattttttattttagctaattacctgtgggcattatacttgaggcaggtaccaaactacttacagcctttttaatgaaaatgtgctgtgtactttgaatccattcatagacaaaattaccttgatgttctcttaactcattctttattttagtgattaaatacaacctttgagttgttcaatatcatttgaaaatggtaggatttgtggttattttcattaccctattagatttaagataggctgggatgacagaggcctccttgaatagctatgaagcctcattcagcatatcaaatggtagtctgagttctaagaaaccttaagtaatttatcattctgtaaatactcttataagcaataatttttatttgtatttttgaaaacaaactacttaaatatggaaaaatattaactggaaagccagcagtagggttttctattttt

SEQ ID NO: 1888 - protein, 924 aa, Homosapiens; identical to SEQ ID NO: 1886

SEQ ID NO: 1889 - DNA, 5329 bp, Homosapiens
agacagcagaaggatcactgggctggaagctctaacaggcattgccagcctagctacctgcagtttgaggcaagggcagggtcacttaccctgctgtctgaatgtctcctgggacaacaggaggctgcactcactggctgagttcagacagaagagggatcatcggactggaagctctggcaggtatggctagcctggttacccgtagtgagaatggagagggccacctgcccagctacacagatgtttcccaggacaacaggaggctgtgtccactgacagttcagacagaagtggaaccactggaccggaagctctagcaagtgttgcccacctggctactagtgagccttgaaaccagcgaaacaataatcaaagagcagttctgtcaaagaaaacaacataaatcaggtacagaatttcagagtgggatatcagatctttagtgtgaagatacatctacattaaaccaggaatcactagaactgacatttggacaagaaaatttggaaaattttaaaactgtgaaggttgatcatggaaattaaagaggaaggggcatcagaagaagggcagcactttcttcctacagcccaggccaatgatcccggggactgtcagttcacaagtatccagaagactccaaatgaaccgcagttggaattcatccttgcatgcaaggatctcgtggctcctgtccgtgatcgtaaactgaatacactggtgcagatctccgtaatccaccccgtggagcagagtctgacaagatactccagcaccgaaattgtggagggaacaagggacccactgtttttgactggtgtcacattcccatctgagtatcccatctatgaggagaccaaaataaaactaacagtctatgatgtcaaggataagtctcatgacaccgttcgaaccagtgtcctaccagaacataaggatcccccgccagaagttgggcgaagtttcttgggctatgccagttttaaagtgggagagctgctgaagtcaaaggagcaattgctggtcctgagcctgagaacttcagatggtggcaaagtggttggcaccatagaagtcagtgtcgtgaagatgggggagattgaggatggggaagccgaccacatcaccacagatgtacagggacaaaagtgtgccctggtatgtgaatgtacagccccggaaagtgtgagcggaaaagataacttaccttttttgaattcagtgttaaagaacccagtatgtaaattatatagatttcccacatctgacaataagtggatgcgaattcgagagcagatgtcagagagcattctttcctttcatattcctaaggaattgatttcccttcacattaaagaagatttgtgcagaaaccaggagataaaagaacttggtgagctttctccacattgggacaatctgcgaaaaaatgtccttactcactgtgatcaaatggtgaatatgtaccaagacattctgacagaacttagcaaggaaacagggtcctctttcaaatcaagcagcagcaaaggagagaaaacattagaatttgttccaataaatctacatctgcaaagaatgcaggtacacagccctcacttgaaagatgctctctacgatgtcatcactgtgggagccccagctgcccattttcagggatttaagaatggtggtcttcggaagctactccatagatttgaaacagaaagaagaaataccggataccagtttatttactattcacctgaaaacacagccaaagcaaaggaagttctcagcaacatcaatcaactacaacctcttatagcaacccatgcagacctactgcttaattctgcaagccagcattctccagacagcttgaagaattctttaaagatgctttcagaaaaaacagagctttttgtacatgccttcaaggatcaacttgtcaggagtgctcttttagcactctacactgcaaggccaggaggcattcttaagaagccaccctctcctaagagcagcacagaggagagcagtccccaagaccaacccccagtgatgagagggcaggactccataccacatcattcagactatgatgaggaagagtgggacagggtgtgggccaatgtggggaagagcctgaactgcattattgctatggtggacaaactgattgaaagagatggtggcagtgaaggcagtggcggcaacaatgatggagaaaaggaaccttcattaacagatgccattccctctcacccaagagaggactggtatgaacagttgtatcccctcatccttaccctgaaggactgcatgggagaagtggtgaaccgagccaagcagtccctgacatttgtgctccttcaggaacttgcgtacagcttgccccagtgtctgatgctgacgctaagaagagacatcgtcttcagccaagcacttgctggattggtttgtggttttatcatcaaattacagacaagtctgtatgacccaggcttcctacagcagcttcacacagtggggttgatagtacaatatgaaggactgctaagtacatacagcgatgaaattggaatgctagaggacatggccgttggcatttccgatttaaagaaagttgcatttaaaataattgaagccaaatccaatgatgtgttgccagttataacaggaagacgagaacattacgtggtagaggtcaagcttccagccagaatgtttgagtcactacctctacagattaaagaaggacagttgcttcatgtgtatccagtactttttaatgttggaatcaatgaacagcaaactctggctgaaaggtttggagatgtctctttgcaagaaagtattaatcaggaaaacttcgaacttctacaagaatattacaagatatttatggaaaagatgcctcctgattatatttcacattttcaggaacaaaatgatttaaaagcattgctagaaaatctccttcaaaatatccaatccaaaaaaagaaagaatgtagaaattatgtggctggctgcaacgatttgccgcaaactgaatggtattcgtttcacctgttgtaaaagtgccaaagacaggacatcgatgtcagtgacacttgaacaatgctcaatcttgagagatgagcaccagttacacaaggacttctttatccgagcgctggattgcatgagaagagaaggatgccgcatagagaatgtactgaagaatatcaaatgcagaaagtatgctttcaacatgctacagctgatggctttccccaagtactacagacctccagaggggacttatggaaaagctgacacctaagtttaccaacatgttaataaacaggaacacaaatacatttcagttggataatcttcaccttggtcttttttgtttgtttttattgtcatgaatttgtggtgggggagatgatcacagatgtttcccaaaatctaggaactacttcaattcatcatcagcatattgctctgaaagaaatccattttaaaaaatcttacatgattcagtactgtcatttctagttctaagcttctatgtgttgagcctagctgattgagattggttcacaaagtgtaaatttcattcatgagtatttaaatgtttctgaggaaacatggatcatttcaataggactaggggtgattcacagagcaccactctccaaccaaatggaagagaggagagggggaaaaggaacatattttttttgtgatacaacttaatagcctatgagaacacagtcaacctgagaatcaatgtaagggatttaaaaaaaatgtgtagccactcaattaggtagagttaactcatgatctggaatactgaggcagtttgcaggtatgttccacaatgatctctatcatccagtcaaggtgtgactcctcccttgcaacaggcatatgcatggagtgagtaaagtggtcaacagacctttcaaaaccatggcatcttttcagaactctgacttgggttgtgtgatctagctgtgaatgtagcaatatagaacgtttaatagaatgataagcaaaacactgcaatgatctaaaattacaaataaaataaaaatgaacaacattttgatacccaaaatgaaaattcccatcagcctgaactttatgttgtgaagttcatgaatgtcagtgaggtatctctgagatgtttcttagcagtcatcctggtgtaagcatgcagttatggcataggtttgtgtgtgttaataagcctttaaaacatatgcaaccacaacaaatgataaagtaaaacaattattttctgttgccctgaatatcaaacttgcccttgcccttactcagcaaaataacatttataagttttccaaaatcccaaagtagaagtttccttaaaaaaatcatcttgtataataccagtattcaaacatgggtaaggttaatcacccccaatcactcaggagatagttgcagaatttgaattacaatctcttcttactttcctagcctgtggcttgtcacttctccaaattgccatgctaaatatgcatgaaaattgagggagaatgctagttaaaaagaaattaggatttatcactggaattgaaactaagagtacaaaagtctgaacgaatgaaacttttctccaaattttacaaattcttgttcctttctcattagaagagcatgctatccaaagcataaatctcccttgaaaataacagaggcttcttaagccctctcttagctatgatcaatggatgatattatgcttcccatagctaatgtgatagctccttgcctaggattcctgttgaaataaggattctagccccatgttaagtttttcaaattactacaaattttagataagcatttggagctttttatactagaattatcaattttttattttagctaattacctgtgggcattatacttgaggcaggtaccaaactacttacagcctttttaatgaaaatgtgctgtgtactttgaatccattcatagacaaaattaccttgatgttctcttaactcattctttattttagtgattaaatacaacctttgagttgttcaatatcatttgaaaatggtaggatttgtggttattttcattaccctattagatttaagataggctgggatgacagaggcctccttgaatagctatgaagcctcattcagcatatcaaatggtagtctgagttctaagaaaccttaagtaatttatcattctgtaaatactcttataagcaataatttttatttgtatttttgaaaacaaactacttaaatatggaaaaatattaactggaaagccagcagtagggttttctattttt

SEQ ID NO: 1890 - protein, 924 aa, Homosapiens; identical to SEQ ID NO: 1886

SEQ ID NO: 1891 - DNA, 5129 bp, Homosapiens
gacctgaggaagaccacatgagggctgatggggaagaggcatttgaaggctttacaggaggcatagtactggaaatctgctcctgatgaggtctcagaaagcttccactcgtggtggaaggcaaaggaggagcaggcacatcacatgagccttgaaaccagcgaaacaataatcaaagagcagttctgtcaaagaaaacaacataaatcaggtacagaatttcagagtgggatatcagatctttagtgtgaagatacatctacattaaaccaggaatcactagaactgacatttggacaagaaaatttggaaaattttaaaactgtgaaggttgatcatggaaattaaagaggaaggggcatcagaagaagggcagcactttcttcctacagcccaggccaatgatcccggggactgtcagttcacaagtatccagaagactccaaatgaaccgcagttggaattcatccttgcatgcaaggatctcgtggctcctgtccgtgatcgtaaactgaatacactggtgcagatctccgtaatccaccccgtggagcagagtctgacaagatactccagcaccgaaattgtggagggaacaagggacccactgtttttgactggtgtcacattcccatctgagtatcccatctatgaggagaccaaaataaaactaacagtctatgatgtcaaggataagtctcatgacaccgttcgaaccagtgtcctaccagaacataaggatcccccgccagaagttgggcgaagtttcttgggctatgccagttttaaagtgggagagctgctgaagtcaaaggagcaattgctggtcctgagcctgagaacttcagatggtggcaaagtggttggcaccatagaagtcagtgtcgtgaagatgggggagattgaggatggggaagccgaccacatcaccacagatgtacagggacaaaagtgtgccctggtatgtgaatgtacagccccggaaagtgtgagcggaaaagataacttaccttttttgaattcagtgttaaagaacccagtatgtaaattatatagatttcccacatctgacaataagtggatgcgaattcgagagcagatgtcagagagcattctttcctttcatattcctaaggaattgatttcccttcacattaaagaagatttgtgcagaaaccaggagataaaagaacttggtgagctttctccacattgggacaatctgcgaaaaaatgtccttactcactgtgatcaaatggtgaatatgtaccaagacattctgacagaacttagcaaggaaacagggtcctctttcaaatcaagcagcagcaaaggagagaaaacattagaatttgttccaataaatctacatctgcaaagaatgcaggtacacagccctcacttgaaagatgctctctacgatgtcatcactgtgggagccccagctgcccattttcagggatttaagaatggtggtcttcggaagctactccatagatttgaaacagaaagaagaaataccggataccagtttatttactattcacctgaaaacacagccaaagcaaaggaagttctcagcaacatcaatcaactacaacctcttatagcaacccatgcagacctactgcttaattctgcaagccagcattctccagacagcttgaagaattctttaaagatgctttcagaaaaaacagagctttttgtacatgccttcaaggatcaacttgtcaggagtgctcttttagcactctacactgcaaggccaggaggcattcttaagaagccaccctctcctaagagcagcacagaggagagcagtccccaagaccaacccccagtgatgagagggcaggactccataccacatcattcagactatgatgaggaagagtgggacagggtgtgggccaatgtggggaagagcctgaactgcattattgctatggtggacaaactgattgaaagagatggtggcagtgaaggcagtggcggcaacaatgatggagaaaaggaaccttcattaacagatgccattccctctcacccaagagaggactggtatgaacagttgtatcccctcatccttaccctgaaggactgcatgggagaagtggtgaaccgagccaagcagtccctgacatttgtgctccttcaggaacttgcgtacagcttgccccagtgtctgatgctgacgctaagaagagacatcgtcttcagccaagcacttgctggattggtttgtggttttatcatcaaattacagacaagtctgtatgacccaggcttcctacagcagcttcacacagtggggttgatagtacaatatgaaggactgctaagtacatacagcgatgaaattggaatgctagaggacatggccgttggcatttccgatttaaagaaagttgcatttaaaataattgaagccaaatccaatgatgtgttgccagttataacaggaagacgagaacattacgtggtagaggtcaagcttccagccagaatgtttgagtcactacctctacagattaaagaaggacagttgcttcatgtgtatccagtactttttaatgttggaatcaatgaacagcaaactctggctgaaaggtttggagatgtctctttgcaagaaagtattaatcaggaaaacttcgaacttctacaagaatattacaagatatttatggaaaagatgcctcctgattatatttcacattttcaggaacaaaatgatttaaaagcattgctagaaaatctccttcaaaatatccaatccaaaaaaagaaagaatgtagaaattatgtggctggctgcaacgatttgccgcaaactgaatggtattcgtttcacctgttgtaaaagtgccaaagacaggacatcgatgtcagtgacacttgaacaatgctcaatcttgagagatgagcaccagttacacaaggacttctttatccgagcgctggattgcatgagaagagaaggatgccgcatagagaatgtactgaagaatatcaaatgcagaaagtatgctttcaacatgctacagctgatggctttccccaagtactacagacctccagaggggacttatggaaaagctgacacctaagtttaccaacatgttaataaacaggaacacaaatacatttcagttggataatcttcaccttggtcttttttgtttgtttttattgtcatgaatttgtggtgggggagatgatcacagatgtttcccaaaatctaggaactacttcaattcatcatcagcatattgctctgaaagaaatccattttaaaaaatcttacatgattcagtactgtcatttctagttctaagcttctatgtgttgagcctagctgattgagattggttcacaaagtgtaaatttcattcatgagtatttaaatgtttctgaggaaacatggatcatttcaataggactaggggtgattcacagagcaccactctccaaccaaatggaagagaggagagggggaaaaggaacatattttttttgtgatacaacttaatagcctatgagaacacagtcaacctgagaatcaatgtaagggatttaaaaaaaatgtgtagccactcaattaggtagagttaactcatgatctggaatactgaggcagtttgcaggtatgttccacaatgatctctatcatccagtcaaggtgtgactcctcccttgcaacaggcatatgcatggagtgagtaaagtggtcaacagacctttcaaaaccatggcatcttttcagaactctgacttgggttgtgtgatctagctgtgaatgtagcaatatagaacgtttaatagaatgataagcaaaacactgcaatgatctaaaattacaaataaaataaaaatgaacaacattttgatacccaaaatgaaaattcccatcagcctgaactttatgttgtgaagttcatgaatgtcagtgaggtatctctgagatgtttcttagcagtcatcctggtgtaagcatgcagttatggcataggtttgtgtgtgttaataagcctttaaaacatatgcaaccacaacaaatgataaagtaaaacaattattttctgttgccctgaatatcaaacttgcccttgcccttactcagcaaaataacatttataagttttccaaaatcccaaagtagaagtttccttaaaaaaatcatcttgtataataccagtattcaaacatgggtaaggttaatcacccccaatcactcaggagatagttgcagaatttgaattacaatctcttcttactttcctagcctgtggcttgtcacttctccaaattgccatgctaaatatgcatgaaaattgagggagaatgctagttaaaaagaaattaggatttatcactggaattgaaactaagagtacaaaagtctgaacgaatgaaacttttctccaaattttacaaattcttgttcctttctcattagaagagcatgctatccaaagcataaatctcccttgaaaataacagaggcttcttaagccctctcttagctatgatcaatggatgatattatgcttcccatagctaatgtgatagctccttgcctaggattcctgttgaaataaggattctagccccatgttaagtttttcaaattactacaaattttagataagcatttggagctttttatactagaattatcaattttttattttagctaattacctgtgggcattatacttgaggcaggtaccaaactacttacagcctttttaatgaaaatgtgctgtgtactttgaatccattcatagacaaaattaccttgatgttctcttaactcattctttattttagtgattaaatacaacctttgagttgttcaatatcatttgaaaatggtaggatttgtggttattttcattaccctattagatttaagataggctgggatgacagaggcctccttgaatagctatgaagcctcattcagcatatcaaatggtagtctgagttctaagaaaccttaagtaatttatcattctgtaaatactcttataagcaataatttttatttgtatttttgaaaacaaactacttaaatatggaaaaatattaactggaaagccagcagtagggttttctattttt

SEQ ID NO: 1892 - protein, 924 aa, Homosapiens; identical to SEQ ID NO: 1886

SEQ ID NO: 1893 - DNA, 5193 bp, Homosapiens
atgtttcctgccctcgaacatcagaatccatgtttttcagcttttgggctcttggacttacaccagtggtttgccagggccccccagccttcgaccacagattgaaggctacactgttggcctccctacttttgaggttttggaacttggactggcttccttgctcctcagtttgcagacagcctattgtggaacttcaccttgtgatcgtagccttgaaaccagcgaaacaataatcaaagagcagttctgtcaaagaaaacaacataaatcaggtacagaatttcagagtgggatatcagatctttagtgtgaagatacatctacattaaaccaggaatcactagaactgacatttggacaagaaaatttggaaaattttaaaactgtgaaggttgatcatggaaattaaagaggaaggggcatcagaagaagggcagcactttcttcctacagcccaggccaatgatcccggggactgtcagttcacaagtatccagaagactccaaatgaaccgcagttggaattcatccttgcatgcaaggatctcgtggctcctgtccgtgatcgtaaactgaatacactggtgcagatctccgtaatccaccccgtggagcagagtctgacaagatactccagcaccgaaattgtggagggaacaagggacccactgtttttgactggtgtcacattcccatctgagtatcccatctatgaggagaccaaaataaaactaacagtctatgatgtcaaggataagtctcatgacaccgttcgaaccagtgtcctaccagaacataaggatcccccgccagaagttgggcgaagtttcttgggctatgccagttttaaagtgggagagctgctgaagtcaaaggagcaattgctggtcctgagcctgagaacttcagatggtggcaaagtggttggcaccatagaagtcagtgtcgtgaagatgggggagattgaggatggggaagccgaccacatcaccacagatgtacagggacaaaagtgtgccctggtatgtgaatgtacagccccggaaagtgtgagcggaaaagataacttaccttttttgaattcagtgttaaagaacccagtatgtaaattatatagatttcccacatctgacaataagtggatgcgaattcgagagcagatgtcagagagcattctttcctttcatattcctaaggaattgatttcccttcacattaaagaagatttgtgcagaaaccaggagataaaagaacttggtgagctttctccacattgggacaatctgcgaaaaaatgtccttactcactgtgatcaaatggtgaatatgtaccaagacattctgacagaacttagcaaggaaacagggtcctctttcaaatcaagcagcagcaaaggagagaaaacattagaatttgttccaataaatctacatctgcaaagaatgcaggtacacagccctcacttgaaagatgctctctacgatgtcatcactgtgggagccccagctgcccattttcagggatttaagaatggtggtcttcggaagctactccatagatttgaaacagaaagaagaaataccggataccagtttatttactattcacctgaaaacacagccaaagcaaaggaagttctcagcaacatcaatcaactacaacctcttatagcaacccatgcagacctactgcttaattctgcaagccagcattctccagacagcttgaagaattctttaaagatgctttcagaaaaaacagagctttttgtacatgccttcaaggatcaacttgtcaggagtgctcttttagcactctacactgcaaggccaggaggcattcttaagaagccaccctctcctaagagcagcacagaggagagcagtccccaagaccaacccccagtgatgagagggcaggactccataccacatcattcagactatgatgaggaagagtgggacagggtgtgggccaatgtggggaagagcctgaactgcattattgctatggtggacaaactgattgaaagagatggtggcagtgaaggcagtggcggcaacaatgatggagaaaaggaaccttcattaacagatgccattccctctcacccaagagaggactggtatgaacagttgtatcccctcatccttaccctgaaggactgcatgggagaagtggtgaaccgagccaagcagtccctgacatttgtgctccttcaggaacttgcgtacagcttgccccagtgtctgatgctgacgctaagaagagacatcgtcttcagccaagcacttgctggattggtttgtggttttatcatcaaattacagacaagtctgtatgacccaggcttcctacagcagcttcacacagtggggttgatagtacaatatgaaggactgctaagtacatacagcgatgaaattggaatgctagaggacatggccgttggcatttccgatttaaagaaagttgcatttaaaataattgaagccaaatccaatgatgtgttgccagttataacaggaagacgagaacattacgtggtagaggtcaagcttccagccagaatgtttgagtcactacctctacagattaaagaaggacagttgcttcatgtgtatccagtactttttaatgttggaatcaatgaacagcaaactctggctgaaaggtttggagatgtctctttgcaagaaagtattaatcaggaaaacttcgaacttctacaagaatattacaagatatttatggaaaagatgcctcctgattatatttcacattttcaggaacaaaatgatttaaaagcattgctagaaaatctccttcaaaatatccaatccaaaaaaagaaagaatgtagaaattatgtggctggctgcaacgatttgccgcaaactgaatggtattcgtttcacctgttgtaaaagtgccaaagacaggacatcgatgtcagtgacacttgaacaatgctcaatcttgagagatgagcaccagttacacaaggacttctttatccgagcgctggattgcatgagaagagaaggatgccgcatagagaatgtactgaagaatatcaaatgcagaaagtatgctttcaacatgctacagctgatggctttccccaagtactacagacctccagaggggacttatggaaaagctgacacctaagtttaccaacatgttaataaacaggaacacaaatacatttcagttggataatcttcaccttggtcttttttgtttgtttttattgtcatgaatttgtggtgggggagatgatcacagatgtttcccaaaatctaggaactacttcaattcatcatcagcatattgctctgaaagaaatccattttaaaaaatcttacatgattcagtactgtcatttctagttctaagcttctatgtgttgagcctagctgattgagattggttcacaaagtgtaaatttcattcatgagtatttaaatgtttctgaggaaacatggatcatttcaataggactaggggtgattcacagagcaccactctccaaccaaatggaagagaggagagggggaaaaggaacatattttttttgtgatacaacttaatagcctatgagaacacagtcaacctgagaatcaatgtaagggatttaaaaaaaatgtgtagccactcaattaggtagagttaactcatgatctggaatactgaggcagtttgcaggtatgttccacaatgatctctatcatccagtcaaggtgtgactcctcccttgcaacaggcatatgcatggagtgagtaaagtggtcaacagacctttcaaaaccatggcatcttttcagaactctgacttgggttgtgtgatctagctgtgaatgtagcaatatagaacgtttaatagaatgataagcaaaacactgcaatgatctaaaattacaaataaaataaaaatgaacaacattttgatacccaaaatgaaaattcccatcagcctgaactttatgttgtgaagttcatgaatgtcagtgaggtatctctgagatgtttcttagcagtcatcctggtgtaagcatgcagttatggcataggtttgtgtgtgttaataagcctttaaaacatatgcaaccacaacaaatgataaagtaaaacaattattttctgttgccctgaatatcaaacttgcccttgcccttactcagcaaaataacatttataagttttccaaaatcccaaagtagaagtttccttaaaaaaatcatcttgtataataccagtattcaaacatgggtaaggttaatcacccccaatcactcaggagatagttgcagaatttgaattacaatctcttcttactttcctagcctgtggcttgtcacttctccaaattgccatgctaaatatgcatgaaaattgagggagaatgctagttaaaaagaaattaggatttatcactggaattgaaactaagagtacaaaagtctgaacgaatgaaacttttctccaaattttacaaattcttgttcctttctcattagaagagcatgctatccaaagcataaatctcccttgaaaataacagaggcttcttaagccctctcttagctatgatcaatggatgatattatgcttcccatagctaatgtgatagctccttgcctaggattcctgttgaaataaggattctagccccatgttaagtttttcaaattactacaaattttagataagcatttggagctttttatactagaattatcaattttttattttagctaattacctgtgggcattatacttgaggcaggtaccaaactacttacagcctttttaatgaaaatgtgctgtgtactttgaatccattcatagacaaaattaccttgatgttctcttaactcattctttattttagtgattaaatacaacctttgagttgttcaatatcatttgaaaatggtaggatttgtggttattttcattaccctattagatttaagataggctgggatgacagaggcctccttgaatagctatgaagcctcattcagcatatcaaatggtagtctgagttctaagaaaccttaagtaatttatcattctgtaaatactcttataagcaataatttttatttgtatttttgaaaacaaactacttaaatatggaaaaatattaactggaaagccagcagtagggttttctattttt

SEQ ID NO: 1894 - protein, 924 aa, Homosapiens; identical to SEQ ID NO: 1886

SEQ ID NO: 1895 - DNA, 5044 bp, Homosapiens
atacaaagaaatggtgttacctggcaagaggtcttctgtcttttatgaaaaattagacaaagagccttgaaaccagcgaaacaataatcaaagagcagttctgtcaaagaaaacaacataaatcaggtacagaatttcagagtgggatatcagatctttagtgtgaagatacatctacattaaaccaggaatcactagaactgacatttggacaagaaaatttggaaaattttaaaactgtgaaggttgatcatggaaattaaagaggaaggggcatcagaagaagggcagcactttcttcctacagcccaggccaatgatcccggggactgtcagttcacaagtatccagaagactccaaatgaaccgcagttggaattcatccttgcatgcaaggatctcgtggctcctgtccgtgatcgtaaactgaatacactggtgcagatctccgtaatccaccccgtggagcagagtctgacaagatactccagcaccgaaattgtggagggaacaagggacccactgtttttgactggtgtcacattcccatctgagtatcccatctatgaggagaccaaaataaaactaacagtctatgatgtcaaggataagtctcatgacaccgttcgaaccagtgtcctaccagaacataaggatcccccgccagaagttgggcgaagtttcttgggctatgccagttttaaagtgggagagctgctgaagtcaaaggagcaattgctggtcctgagcctgagaacttcagatggtggcaaagtggttggcaccatagaagtcagtgtcgtgaagatgggggagattgaggatggggaagccgaccacatcaccacagatgtacagggacaaaagtgtgccctggtatgtgaatgtacagccccggaaagtgtgagcggaaaagataacttaccttttttgaattcagtgttaaagaacccagtatgtaaattatatagatttcccacatctgacaataagtggatgcgaattcgagagcagatgtcagagagcattctttcctttcatattcctaaggaattgatttcccttcacattaaagaagatttgtgcagaaaccaggagataaaagaacttggtgagctttctccacattgggacaatctgcgaaaaaatgtccttactcactgtgatcaaatggtgaatatgtaccaagacattctgacagaacttagcaaggaaacagggtcctctttcaaatcaagcagcagcaaaggagagaaaacattagaatttgttccaataaatctacatctgcaaagaatgcaggtacacagccctcacttgaaagatgctctctacgatgtcatcactgtgggagccccagctgcccattttcagggatttaagaatggtggtcttcggaagctactccatagatttgaaacagaaagaagaaataccggataccagtttatttactattcacctgaaaacacagccaaagcaaaggaagttctcagcaacatcaatcaactacaacctcttatagcaacccatgcagacctactgcttaattctgcaagccagcattctccagacagcttgaagaattctttaaagatgctttcagaaaaaacagagctttttgtacatgccttcaaggatcaacttgtcaggagtgctcttttagcactctacactgcaaggccaggaggcattcttaagaagccaccctctcctaagagcagcacagaggagagcagtccccaagaccaacccccagtgatgagagggcaggactccataccacatcattcagactatgatgaggaagagtgggacagggtgtgggccaatgtggggaagagcctgaactgcattattgctatggtggacaaactgattgaaagagatggtggcagtgaaggcagtggcggcaacaatgatggagaaaaggaaccttcattaacagatgccattccctctcacccaagagaggactggtatgaacagttgtatcccctcatccttaccctgaaggactgcatgggagaagtggtgaaccgagccaagcagtccctgacatttgtgctccttcaggaacttgcgtacagcttgccccagtgtctgatgctgacgctaagaagagacatcgtcttcagccaagcacttgctggattggtttgtggttttatcatcaaattacagacaagtctgtatgacccaggcttcctacagcagcttcacacagtggggttgatagtacaatatgaaggactgctaagtacatacagcgatgaaattggaatgctagaggacatggccgttggcatttccgatttaaagaaagttgcatttaaaataattgaagccaaatccaatgatgtgttgccagttataacaggaagacgagaacattacgtggtagaggtcaagcttccagccagaatgtttgagtcactacctctacagattaaagaaggacagttgcttcatgtgtatccagtactttttaatgttggaatcaatgaacagcaaactctggctgaaaggtttggagatgtctctttgcaagaaagtattaatcaggaaaacttcgaacttctacaagaatattacaagatatttatggaaaagatgcctcctgattatatttcacattttcaggaacaaaatgatttaaaagcattgctagaaaatctccttcaaaatatccaatccaaaaaaagaaagaatgtagaaattatgtggctggctgcaacgatttgccgcaaactgaatggtattcgtttcacctgttgtaaaagtgccaaagacaggacatcgatgtcagtgacacttgaacaatgctcaatcttgagagatgagcaccagttacacaaggacttctttatccgagcgctggattgcatgagaagagaaggatgccgcatagagaatgtactgaagaatatcaaatgcagaaagtatgctttcaacatgctacagctgatggctttccccaagtactacagacctccagaggggacttatggaaaagctgacacctaagtttaccaacatgttaataaacaggaacacaaatacatttcagttggataatcttcaccttggtcttttttgtttgtttttattgtcatgaatttgtggtgggggagatgatcacagatgtttcccaaaatctaggaactacttcaattcatcatcagcatattgctctgaaagaaatccattttaaaaaatcttacatgattcagtactgtcatttctagttctaagcttctatgtgttgagcctagctgattgagattggttcacaaagtgtaaatttcattcatgagtatttaaatgtttctgaggaaacatggatcatttcaataggactaggggtgattcacagagcaccactctccaaccaaatggaagagaggagagggggaaaaggaacatattttttttgtgatacaacttaatagcctatgagaacacagtcaacctgagaatcaatgtaagggatttaaaaaaaatgtgtagccactcaattaggtagagttaactcatgatctggaatactgaggcagtttgcaggtatgttccacaatgatctctatcatccagtcaaggtgtgactcctcccttgcaacaggcatatgcatggagtgagtaaagtggtcaacagacctttcaaaaccatggcatcttttcagaactctgacttgggttgtgtgatctagctgtgaatgtagcaatatagaacgtttaatagaatgataagcaaaacactgcaatgatctaaaattacaaataaaataaaaatgaacaacattttgatacccaaaatgaaaattcccatcagcctgaactttatgttgtgaagttcatgaatgtcagtgaggtatctctgagatgtttcttagcagtcatcctggtgtaagcatgcagttatggcataggtttgtgtgtgttaataagcctttaaaacatatgcaaccacaacaaatgataaagtaaaacaattattttctgttgccctgaatatcaaacttgcccttgcccttactcagcaaaataacatttataagttttccaaaatcccaaagtagaagtttccttaaaaaaatcatcttgtataataccagtattcaaacatgggtaaggttaatcacccccaatcactcaggagatagttgcagaatttgaattacaatctcttcttactttcctagcctgtggcttgtcacttctccaaattgccatgctaaatatgcatgaaaattgagggagaatgctagttaaaaagaaattaggatttatcactggaattgaaactaagagtacaaaagtctgaacgaatgaaacttttctccaaattttacaaattcttgttcctttctcattagaagagcatgctatccaaagcataaatctcccttgaaaataacagaggcttcttaagccctctcttagctatgatcaatggatgatattatgcttcccatagctaatgtgatagctccttgcctaggattcctgttgaaataaggattctagccccatgttaagtttttcaaattactacaaattttagataagcatttggagctttttatactagaattatcaattttttattttagctaattacctgtgggcattatacttgaggcaggtaccaaactacttacagcctttttaatgaaaatgtgctgtgtactttgaatccattcatagacaaaattaccttgatgttctcttaactcattctttattttagtgattaaatacaacctttgagttgttcaatatcatttgaaaatggtaggatttgtggttattttcattaccctattagatttaagataggctgggatgacagaggcctccttgaatagctatgaagcctcattcagcatatcaaatggtagtctgagttctaagaaaccttaagtaatttatcattctgtaaatactcttataagcaataatttttatttgtatttttgaaaacaaactacttaaatatggaaaaatattaactggaaagccagcagtagggttttctattttt

SEQ ID NO: 1896 - protein, 924 aa, Homosapiens; identical to SEQ ID NO: 1886

SEQ ID NO: 1897 - DNA, 3183 bp, Homosapiens
ccaagaggggtcttactcatccttttccattttggagaggttctgctgactctacattaagcccagacagggtggtgtcctgctttgctcctttctgctctctgcgttcctctgctgccttgatggattctgatgtggttgctcagatgatcagcctgcaggagccttgaaaccagcgaaacaataatcaaagagcagttctgtcaaagaaaacaacataaatcaggtacagaatttcagagtgggatatcagatctttagtgtgaagatacatctacattaaaccaggaatcactagaactgacatttggacaagaaaatttggaaaattttaaaactgtgaaggttgatcatggaaattaaagaggaaggggcatcagaagaagggcagcactttcttcctacagcccaggccaatgatcccggggactgtcagttcacaagtatccagaagactccaaatgaaccgcagttggaattcatccttgcatgcaaggatctcgtggctcctgtccgtgatcgtaaactgaatacactggtgcagatctccgtaatccaccccgtggagcagagtctgacaagatactccagcaccgaaattgtggagggaacaagggacccactgtttttgactggtgtcacattcccatctgagtatcccatctatgaggagaccaaaataaaactaacagtctatgatgtcaaggataagtctcatgacaccgttcgaaccagtgtcctaccagaacataaggatcccccgccagaagttgggcgaagtttcttgggctatgccagttttaaagtgggagagctgctgaagtcaaaggagcaattgctggtcctgagcctgagaacttcagatggtggcaaagtggttggcaccatagaagtcagtgtcgtgaagatgggggagattgaggatggggaagccgaccacatcaccacagatgtacagggacaaaagtgtgccctggtatgtgaatgtacagccccggaaagtgtgagcggaaaagataacttaccttttttgaattcagtgttaaagaacccagtatgtaaattatatagatttcccacatctgacaataagtggatgcgaattcgagagcagatgtcagagagcattctttcctttcatattcctaaggaattgatttcccttcacattaaagaagatttgtgcagaaaccaggagataaaagaacttggtgagctttctccacattgggacaatctgcgaaaaaatgtccttactcactgtgatcaaatggtgaatatgtaccaagacattctgacagaacttagcaaggaaacagggtcctctttcaaatcaagcagcagcaaaggagagaaaacattagaatttgttccaataaatctacatctgcaaagaatgcaggtacacagccctcacttgaaagatgctctctacgatgtcatcactgtgggagccccagctgcccattttcagggatttaagaatggtggtcttcggaagctactccatagatttgaaacagaaagaagaaataccggataccagtttatttactattcacctgaaaacacagccaaagcaaaggaagttctcagcaacatcaatcaactacaacctcttatagcaacccatgcagacctactgcttaattctgcaagccagcattctccagacagcttgaagaattctttaaagatgctttcagaaaaaacagagctttttgtacatgccttcaaggatcaacttgtcaggagtgctcttttagcactctacactgcaaggccaggaggcattcttaagaagccaccctctcctaagagcagcacagaggagagcagtccccaagaccaacccccagtgatgagagggcaggactccataccacatcattcagactatgatgaggaagagtgggacagggtgtgggccaatgtggggaagagcctgaactgcattattgctatggtggacaaactgattgaaagagatggtggcagtgaaggcagtggcggcaacaatgatggagaaaaggaaccttcattaacagatgccattccctctcacccaagagaggactggtatgaacagttgtatcccctcatccttaccctgaaggactgcatgggagaagtggtgaaccgagccaagcagtccctgacatttgtgctccttcaggaacttgcgtacagcttgccccagtgtctgatgctgacgctaagaagagacatcgtcttcagccaagcacttgctggattggtttgtggttttatcatcaaattacagacaagtctgtatgacccaggcttcctacagcagcttcacacagtggggttgatagtacaatatgaaggactgctaagtacatacagcgatgaaattggaatgctagaggacatggccgttggcatttccgatttaaagaaagttgcatttaaaataattgaagccaaatccaatgatgtgttgccagttataacaggaagacgagaacattacgtggtagaggtcaagcttccagccagaatgtttgagtcactacctctacagattaaagaaggacagttgcttcatgtgtatccagtactttttaatgttggaatcaatgaacagcaaactctggctgaaaggtttggagatgtctctttgcaagaaagtattaatcaggaaaacttcgaacttctacaagaatattacaagatatttatggaaaagatgcctcctgattatatttcacattttcaggaacaaaatgatttaaaagcattgctagaaaatctccttcaaaatatccaatccaaaaaaagaaagaatgtagaaattatgtggctggctgcaacgatttgccgcaaactgaatggtattcgtttcacctgttgtaaaagtgccaaagacaggacatcgatgtcagtgacacttgaacaatgctcaatcttgagagatgagcaccagttacacaaggacttctttatccgagcgctggattgcatgagaagagaaggatgccgcatagagaatgtactgaagaatatcaaatgcagaaagtatgctttcaacatgctacagctgatggctttccccaagtactacagacctccagaggggacttatggaaaagctgacacctaagtttaccaacatgttaataaacaggaacacaaatacatttcagttggataatcttc

SEQ ID NO: 1898 - protein, 924 aa, Homosapiens; identical to SEQ ID NO: 1886

SEQ ID NO: 1899 - DNA, 3065 bp, Homosapiens
gagttcagacagaagagggatcatcggactggaagctctggcagagccttgaaaccagcgaaacaataatcaaagagcagttctgtcaaagaaaacaacataaatcaggtacagaatttcagagtgggatatcagatctttagtgtgaagatacatctacattaaaccaggaatcactagaactgacatttggacaagaaaatttggaaaattttaaaactgtgaaggttgatcatggaaattaaagaggaaggggcatcagaagaagggcagcactttcttcctacagcccaggccaatgatcccggggactgtcagttcacaagtatccagaagactccaaatgaaccgcagttggaattcatccttgcatgcaaggatctcgtggctcctgtccgtgatcgtaaactgaatacactggtgcagatctccgtaatccaccccgtggagcagagtctgacaagatactccagcaccgaaattgtggagggaacaagggacccactgtttttgactggtgtcacattcccatctgagtatcccatctatgaggagaccaaaataaaactaacagtctatgatgtcaaggataagtctcatgacaccgttcgaaccagtgtcctaccagaacataaggatcccccgccagaagttgggcgaagtttcttgggctatgccagttttaaagtgggagagctgctgaagtcaaaggagcaattgctggtcctgagcctgagaacttcagatggtggcaaagtggttggcaccatagaagtcagtgtcgtgaagatgggggagattgaggatggggaagccgaccacatcaccacagatgtacagggacaaaagtgtgccctggtatgtgaatgtacagccccggaaagtgtgagcggaaaagataacttaccttttttgaattcagtgttaaagaacccagtatgtaaattatatagatttcccacatctgacaataagtggatgcgaattcgagagcagatgtcagagagcattctttcctttcatattcctaaggaattgatttcccttcacattaaagaagatttgtgcagaaaccaggagataaaagaacttggtgagctttctccacattgggacaatctgcgaaaaaatgtccttactcactgtgatcaaatggtgaatatgtaccaagacattctgacagaacttagcaaggaaacagggtcctctttcaaatcaagcagcagcaaaggagagaaaacattagaatttgttccaataaatctacatctgcaaagaatgcaggtacacagccctcacttgaaagatgctctctacgatgtcatcactgtgggagccccagctgcccattttcagggatttaagaatggtggtcttcggaagctactccatagatttgaaacagaaagaagaaataccggataccagtttatttactattcacctgaaaacacagccaaagcaaaggaagttctcagcaacatcaatcaactacaacctcttatagcaacccatgcagacctactgcttaattctgcaagccagcattctccagacagcttgaagaattctttaaagatgctttcagaaaaaacagagctttttgtacatgccttcaaggatcaacttgtcaggagtgctcttttagcactctacactgcaaggccaggaggcattcttaagaagccaccctctcctaagagcagcacagaggagagcagtccccaagaccaacccccagtgatgagagggcaggactccataccacatcattcagactatgatgaggaagagtgggacagggtgtgggccaatgtggggaagagcctgaactgcattattgctatggtggacaaactgattgaaagagatggtggcagtgaaggcagtggcggcaacaatgatggagaaaaggaaccttcattaacagatgccattccctctcacccaagagaggactggtatgaacagttgtatcccctcatccttaccctgaaggactgcatgggagaagtggtgaaccgagccaagcagtccctgacatttgtgctccttcaggaacttgcgtacagcttgccccagtgtctgatgctgacgctaagaagagacatcgtcttcagccaagcacttgctggattggtttgtggttttatcatcaaattacagacaagtctgtatgacccaggcttcctacagcagcttcacacagtggggttgatagtacaatatgaaggactgctaagtacatacagcgatgaaattggaatgctagaggacatggccgttggcatttccgatttaaagaaagttgcatttaaaataattgaagccaaatccaatgatgtgttgccagttataacaggaagacgagaacattacgtggtagaggtcaagcttccagccagaatgtttgagtcactacctctacagattaaagaaggacagttgcttcatgtgtatccagtactttttaatgttggaatcaatgaacagcaaactctggctgaaaggtttggagatgtctctttgcaagaaagtattaatcaggaaaacttcgaacttctacaagaatattacaagatatttatggaaaagatgcctcctgattatatttcacattttcaggaacaaaatgatttaaaagcattgctagaaaatctccttcaaaatatccaatccaaaaaaagaaagaatgtagaaattatgtggctggctgcaacgatttgccgcaaactgaatggtattcgtttcacctgttgtaaaagtgccaaagacaggacatcgatgtcagtgacacttgaacaatgctcaatcttgagagatgagcaccagttacacaaggacttctttatccgagcgctggattgcatgagaagagaaggatgccgcatagagaatgtactgaagaatatcaaatgcagaaagtatgctttcaacatgctacagctgatggctttccccaagtactacagacctccagaggggacttatggaaaagctgacacctaagtttaccaacatgttaataaacaggaacacaaatacatttcagttggataatcttc

SEQ ID NO: 1900 - protein, 924 aa, Homosapiens; identical to SEQ ID NO: 1886

SEQ ID NO: 1901 - DNA, 3368 bp, Homosapiens
agacagcagaaggatcactgggctggaagctctaacaggcattgccagcctagctacctgcagtttgaggcaagggcagggtcacttaccctgctgtctgaatgtctcctgggacaacaggaggctgcactcactggctgagttcagacagaagagggatcatcggactggaagctctggcaggtatggctagcctggttacccgtagtgagaatggagagggccacctgcccagctacacagatgtttcccaggacaacaggaggctgtgtccactgacagttcagacagaagtggaaccactggaccggaagctctagcaagtgttgcccacctggctactagtgagccttgaaaccagcgaaacaataatcaaagagcagttctgtcaaagaaaacaacataaatcaggtacagaatttcagagtgggatatcagatctttagtgtgaagatacatctacattaaaccaggaatcactagaactgacatttggacaagaaaatttggaaaattttaaaactgtgaaggttgatcatggaaattaaagaggaaggggcatcagaagaagggcagcactttcttcctacagcccaggccaatgatcccggggactgtcagttcacaagtatccagaagactccaaatgaaccgcagttggaattcatccttgcatgcaaggatctcgtggctcctgtccgtgatcgtaaactgaatacactggtgcagatctccgtaatccaccccgtggagcagagtctgacaagatactccagcaccgaaattgtggagggaacaagggacccactgtttttgactggtgtcacattcccatctgagtatcccatctatgaggagaccaaaataaaactaacagtctatgatgtcaaggataagtctcatgacaccgttcgaaccagtgtcctaccagaacataaggatcccccgccagaagttgggcgaagtttcttgggctatgccagttttaaagtgggagagctgctgaagtcaaaggagcaattgctggtcctgagcctgagaacttcagatggtggcaaagtggttggcaccatagaagtcagtgtcgtgaagatgggggagattgaggatggggaagccgaccacatcaccacagatgtacagggacaaaagtgtgccctggtatgtgaatgtacagccccggaaagtgtgagcggaaaagataacttaccttttttgaattcagtgttaaagaacccagtatgtaaattatatagatttcccacatctgacaataagtggatgcgaattcgagagcagatgtcagagagcattctttcctttcatattcctaaggaattgatttcccttcacattaaagaagatttgtgcagaaaccaggagataaaagaacttggtgagctttctccacattgggacaatctgcgaaaaaatgtccttactcactgtgatcaaatggtgaatatgtaccaagacattctgacagaacttagcaaggaaacagggtcctctttcaaatcaagcagcagcaaaggagagaaaacattagaatttgttccaataaatctacatctgcaaagaatgcaggtacacagccctcacttgaaagatgctctctacgatgtcatcactgtgggagccccagctgcccattttcagggatttaagaatggtggtcttcggaagctactccatagatttgaaacagaaagaagaaataccggataccagtttatttactattcacctgaaaacacagccaaagcaaaggaagttctcagcaacatcaatcaactacaacctcttatagcaacccatgcagacctactgcttaattctgcaagccagcattctccagacagcttgaagaattctttaaagatgctttcagaaaaaacagagctttttgtacatgccttcaaggatcaacttgtcaggagtgctcttttagcactctacactgcaaggccaggaggcattcttaagaagccaccctctcctaagagcagcacagaggagagcagtccccaagaccaacccccagtgatgagagggcaggactccataccacatcattcagactatgatgaggaagagtgggacagggtgtgggccaatgtggggaagagcctgaactgcattattgctatggtggacaaactgattgaaagagatggtggcagtgaaggcagtggcggcaacaatgatggagaaaaggaaccttcattaacagatgccattccctctcacccaagagaggactggtatgaacagttgtatcccctcatccttaccctgaaggactgcatgggagaagtggtgaaccgagccaagcagtccctgacatttgtgctccttcaggaacttgcgtacagcttgccccagtgtctgatgctgacgctaagaagagacatcgtcttcagccaagcacttgctggattggtttgtggttttatcatcaaattacagacaagtctgtatgacccaggcttcctacagcagcttcacacagtggggttgatagtacaatatgaaggactgctaagtacatacagcgatgaaattggaatgctagaggacatggccgttggcatttccgatttaaagaaagttgcatttaaaataattgaagccaaatccaatgatgtgttgccagttataacaggaagacgagaacattacgtggtagaggtcaagcttccagccagaatgtttgagtcactacctctacagattaaagaaggacagttgcttcatgtgtatccagtactttttaatgttggaatcaatgaacagcaaactctggctgaaaggtttggagatgtctctttgcaagaaagtattaatcaggaaaacttcgaacttctacaagaatattacaagatatttatggaaaagatgcctcctgattatatttcacattttcaggaacaaaatgatttaaaagcattgctagaaaatctccttcaaaatatccaatccaaaaaaagaaagaatgtagaaattatgtggctggctgcaacgatttgccgcaaactgaatggtattcgtttcacctgttgtaaaagtgccaaagacaggacatcgatgtcagtgacacttgaacaatgctcaatcttgagagatgagcaccagttacacaaggacttctttatccgagcgctggattgcatgagaagagaaggatgccgcatagagaatgtactgaagaatatcaaatgcagaaagtatgctttcaacatgctacagctgatggctttccccaagtactacagacctccagaggggacttatggaaaagctgacacctaagtttaccaacatgttaataaacaggaacacaaatacatttcagttggataatcttc

SEQ ID NO: 1902 - protein, 924 aa, Homosapiens; identical to SEQ ID NO: 1886

SEQ ID NO: 1903 - DNA, 3168 bp, Homosapiens
gacctgaggaagaccacatgagggctgatggggaagaggcatttgaaggctttacaggaggcatagtactggaaatctgctcctgatgaggtctcagaaagcttccactcgtggtggaaggcaaaggaggagcaggcacatcacatgagccttgaaaccagcgaaacaataatcaaagagcagttctgtcaaagaaaacaacataaatcaggtacagaatttcagagtgggatatcagatctttagtgtgaagatacatctacattaaaccaggaatcactagaactgacatttggacaagaaaatttggaaaattttaaaactgtgaaggttgatcatggaaattaaagaggaaggggcatcagaagaagggcagcactttcttcctacagcccaggccaatgatcccggggactgtcagttcacaagtatccagaagactccaaatgaaccgcagttggaattcatccttgcatgcaaggatctcgtggctcctgtccgtgatcgtaaactgaatacactggtgcagatctccgtaatccaccccgtggagcagagtctgacaagatactccagcaccgaaattgtggagggaacaagggacccactgtttttgactggtgtcacattcccatctgagtatcccatctatgaggagaccaaaataaaactaacagtctatgatgtcaaggataagtctcatgacaccgttcgaaccagtgtcctaccagaacataaggatcccccgccagaagttgggcgaagtttcttgggctatgccagttttaaagtgggagagctgctgaagtcaaaggagcaattgctggtcctgagcctgagaacttcagatggtggcaaagtggttggcaccatagaagtcagtgtcgtgaagatgggggagattgaggatggggaagccgaccacatcaccacagatgtacagggacaaaagtgtgccctggtatgtgaatgtacagccccggaaagtgtgagcggaaaagataacttaccttttttgaattcagtgttaaagaacccagtatgtaaattatatagatttcccacatctgacaataagtggatgcgaattcgagagcagatgtcagagagcattctttcctttcatattcctaaggaattgatttcccttcacattaaagaagatttgtgcagaaaccaggagataaaagaacttggtgagctttctccacattgggacaatctgcgaaaaaatgtccttactcactgtgatcaaatggtgaatatgtaccaagacattctgacagaacttagcaaggaaacagggtcctctttcaaatcaagcagcagcaaaggagagaaaacattagaatttgttccaataaatctacatctgcaaagaatgcaggtacacagccctcacttgaaagatgctctctacgatgtcatcactgtgggagccccagctgcccattttcagggatttaagaatggtggtcttcggaagctactccatagatttgaaacagaaagaagaaataccggataccagtttatttactattcacctgaaaacacagccaaagcaaaggaagttctcagcaacatcaatcaactacaacctcttatagcaacccatgcagacctactgcttaattctgcaagccagcattctccagacagcttgaagaattctttaaagatgctttcagaaaaaacagagctttttgtacatgccttcaaggatcaacttgtcaggagtgctcttttagcactctacactgcaaggccaggaggcattcttaagaagccaccctctcctaagagcagcacagaggagagcagtccccaagaccaacccccagtgatgagagggcaggactccataccacatcattcagactatgatgaggaagagtgggacagggtgtgggccaatgtggggaagagcctgaactgcattattgctatggtggacaaactgattgaaagagatggtggcagtgaaggcagtggcggcaacaatgatggagaaaaggaaccttcattaacagatgccattccctctcacccaagagaggactggtatgaacagttgtatcccctcatccttaccctgaaggactgcatgggagaagtggtgaaccgagccaagcagtccctgacatttgtgctccttcaggaacttgcgtacagcttgccccagtgtctgatgctgacgctaagaagagacatcgtcttcagccaagcacttgctggattggtttgtggttttatcatcaaattacagacaagtctgtatgacccaggcttcctacagcagcttcacacagtggggttgatagtacaatatgaaggactgctaagtacatacagcgatgaaattggaatgctagaggacatggccgttggcatttccgatttaaagaaagttgcatttaaaataattgaagccaaatccaatgatgtgttgccagttataacaggaagacgagaacattacgtggtagaggtcaagcttccagccagaatgtttgagtcactacctctacagattaaagaaggacagttgcttcatgtgtatccagtactttttaatgttggaatcaatgaacagcaaactctggctgaaaggtttggagatgtctctttgcaagaaagtattaatcaggaaaacttcgaacttctacaagaatattacaagatatttatggaaaagatgcctcctgattatatttcacattttcaggaacaaaatgatttaaaagcattgctagaaaatctccttcaaaatatccaatccaaaaaaagaaagaatgtagaaattatgtggctggctgcaacgatttgccgcaaactgaatggtattcgtttcacctgttgtaaaagtgccaaagacaggacatcgatgtcagtgacacttgaacaatgctcaatcttgagagatgagcaccagttacacaaggacttctttatccgagcgctggattgcatgagaagagaaggatgccgcatagagaatgtactgaagaatatcaaatgcagaaagtatgctttcaacatgctacagctgatggctttccccaagtactacagacctccagaggggacttatggaaaagctgacacctaagtttaccaacatgttaataaacaggaacacaaatacatttcagttggataatcttc

SEQ ID NO: 1904 - protein, 924 aa, Homosapiens; identical to SEQ ID NO: 1886

SEQ ID NO: 1905 - DNA, 3232 bp, Homosapiens
atgtttcctgccctcgaacatcagaatccatgtttttcagcttttgggctcttggacttacaccagtggtttgccagggccccccagccttcgaccacagattgaaggctacactgttggcctccctacttttgaggttttggaacttggactggcttccttgctcctcagtttgcagacagcctattgtggaacttcaccttgtgatcgtagccttgaaaccagcgaaacaataatcaaagagcagttctgtcaaagaaaacaacataaatcaggtacagaatttcagagtgggatatcagatctttagtgtgaagatacatctacattaaaccaggaatcactagaactgacatttggacaagaaaatttggaaaattttaaaactgtgaaggttgatcatggaaattaaagaggaaggggcatcagaagaagggcagcactttcttcctacagcccaggccaatgatcccggggactgtcagttcacaagtatccagaagactccaaatgaaccgcagttggaattcatccttgcatgcaaggatctcgtggctcctgtccgtgatcgtaaactgaatacactggtgcagatctccgtaatccaccccgtggagcagagtctgacaagatactccagcaccgaaattgtggagggaacaagggacccactgtttttgactggtgtcacattcccatctgagtatcccatctatgaggagaccaaaataaaactaacagtctatgatgtcaaggataagtctcatgacaccgttcgaaccagtgtcctaccagaacataaggatcccccgccagaagttgggcgaagtttcttgggctatgccagttttaaagtgggagagctgctgaagtcaaaggagcaattgctggtcctgagcctgagaacttcagatggtggcaaagtggttggcaccatagaagtcagtgtcgtgaagatgggggagattgaggatggggaagccgaccacatcaccacagatgtacagggacaaaagtgtgccctggtatgtgaatgtacagccccggaaagtgtgagcggaaaagataacttaccttttttgaattcagtgttaaagaacccagtatgtaaattatatagatttcccacatctgacaataagtggatgcgaattcgagagcagatgtcagagagcattctttcctttcatattcctaaggaattgatttcccttcacattaaagaagatttgtgcagaaaccaggagataaaagaacttggtgagctttctccacattgggacaatctgcgaaaaaatgtccttactcactgtgatcaaatggtgaatatgtaccaagacattctgacagaacttagcaaggaaacagggtcctctttcaaatcaagcagcagcaaaggagagaaaacattagaatttgttccaataaatctacatctgcaaagaatgcaggtacacagccctcacttgaaagatgctctctacgatgtcatcactgtgggagccccagctgcccattttcagggatttaagaatggtggtcttcggaagctactccatagatttgaaacagaaagaagaaataccggataccagtttatttactattcacctgaaaacacagccaaagcaaaggaagttctcagcaacatcaatcaactacaacctcttatagcaacccatgcagacctactgcttaattctgcaagccagcattctccagacagcttgaagaattctttaaagatgctttcagaaaaaacagagctttttgtacatgccttcaaggatcaacttgtcaggagtgctcttttagcactctacactgcaaggccaggaggcattcttaagaagccaccctctcctaagagcagcacagaggagagcagtccccaagaccaacccccagtgatgagagggcaggactccataccacatcattcagactatgatgaggaagagtgggacagggtgtgggccaatgtggggaagagcctgaactgcattattgctatggtggacaaactgattgaaagagatggtggcagtgaaggcagtggcggcaacaatgatggagaaaaggaaccttcattaacagatgccattccctctcacccaagagaggactggtatgaacagttgtatcccctcatccttaccctgaaggactgcatgggagaagtggtgaaccgagccaagcagtccctgacatttgtgctccttcaggaacttgcgtacagcttgccccagtgtctgatgctgacgctaagaagagacatcgtcttcagccaagcacttgctggattggtttgtggttttatcatcaaattacagacaagtctgtatgacccaggcttcctacagcagcttcacacagtggggttgatagtacaatatgaaggactgctaagtacatacagcgatgaaattggaatgctagaggacatggccgttggcatttccgatttaaagaaagttgcatttaaaataattgaagccaaatccaatgatgtgttgccagttataacaggaagacgagaacattacgtggtagaggtcaagcttccagccagaatgtttgagtcactacctctacagattaaagaaggacagttgcttcatgtgtatccagtactttttaatgttggaatcaatgaacagcaaactctggctgaaaggtttggagatgtctctttgcaagaaagtattaatcaggaaaacttcgaacttctacaagaatattacaagatatttatggaaaagatgcctcctgattatatttcacattttcaggaacaaaatgatttaaaagcattgctagaaaatctccttcaaaatatccaatccaaaaaaagaaagaatgtagaaattatgtggctggctgcaacgatttgccgcaaactgaatggtattcgtttcacctgttgtaaaagtgccaaagacaggacatcgatgtcagtgacacttgaacaatgctcaatcttgagagatgagcaccagttacacaaggacttctttatccgagcgctggattgcatgagaagagaaggatgccgcatagagaatgtactgaagaatatcaaatgcagaaagtatgctttcaacatgctacagctgatggctttccccaagtactacagacctccagaggggacttatggaaaagctgacacctaagtttaccaacatgttaataaacaggaacacaaatacatttcagttggataatcttc

SEQ ID NO: 1906 - protein, 924 aa, Homosapiens; identical to SEQ ID NO: 1886

SEQ ID NO: 1907 - DNA, 3083 bp, Homosapiens
atacaaagaaatggtgttacctggcaagaggtcttctgtcttttatgaaaaattagacaaagagccttgaaaccagcgaaacaataatcaaagagcagttctgtcaaagaaaacaacataaatcaggtacagaatttcagagtgggatatcagatctttagtgtgaagatacatctacattaaaccaggaatcactagaactgacatttggacaagaaaatttggaaaattttaaaactgtgaaggttgatcatggaaattaaagaggaaggggcatcagaagaagggcagcactttcttcctacagcccaggccaatgatcccggggactgtcagttcacaagtatccagaagactccaaatgaaccgcagttggaattcatccttgcatgcaaggatctcgtggctcctgtccgtgatcgtaaactgaatacactggtgcagatctccgtaatccaccccgtggagcagagtctgacaagatactccagcaccgaaattgtggagggaacaagggacccactgtttttgactggtgtcacattcccatctgagtatcccatctatgaggagaccaaaataaaactaacagtctatgatgtcaaggataagtctcatgacaccgttcgaaccagtgtcctaccagaacataaggatcccccgccagaagttgggcgaagtttcttgggctatgccagttttaaagtgggagagctgctgaagtcaaaggagcaattgctggtcctgagcctgagaacttcagatggtggcaaagtggttggcaccatagaagtcagtgtcgtgaagatgggggagattgaggatggggaagccgaccacatcaccacagatgtacagggacaaaagtgtgccctggtatgtgaatgtacagccccggaaagtgtgagcggaaaagataacttaccttttttgaattcagtgttaaagaacccagtatgtaaattatatagatttcccacatctgacaataagtggatgcgaattcgagagcagatgtcagagagcattctttcctttcatattcctaaggaattgatttcccttcacattaaagaagatttgtgcagaaaccaggagataaaagaacttggtgagctttctccacattgggacaatctgcgaaaaaatgtccttactcactgtgatcaaatggtgaatatgtaccaagacattctgacagaacttagcaaggaaacagggtcctctttcaaatcaagcagcagcaaaggagagaaaacattagaatttgttccaataaatctacatctgcaaagaatgcaggtacacagccctcacttgaaagatgctctctacgatgtcatcactgtgggagccccagctgcccattttcagggatttaagaatggtggtcttcggaagctactccatagatttgaaacagaaagaagaaataccggataccagtttatttactattcacctgaaaacacagccaaagcaaaggaagttctcagcaacatcaatcaactacaacctcttatagcaacccatgcagacctactgcttaattctgcaagccagcattctccagacagcttgaagaattctttaaagatgctttcagaaaaaacagagctttttgtacatgccttcaaggatcaacttgtcaggagtgctcttttagcactctacactgcaaggccaggaggcattcttaagaagccaccctctcctaagagcagcacagaggagagcagtccccaagaccaacccccagtgatgagagggcaggactccataccacatcattcagactatgatgaggaagagtgggacagggtgtgggccaatgtggggaagagcctgaactgcattattgctatggtggacaaactgattgaaagagatggtggcagtgaaggcagtggcggcaacaatgatggagaaaaggaaccttcattaacagatgccattccctctcacccaagagaggactggtatgaacagttgtatcccctcatccttaccctgaaggactgcatgggagaagtggtgaaccgagccaagcagtccctgacatttgtgctccttcaggaacttgcgtacagcttgccccagtgtctgatgctgacgctaagaagagacatcgtcttcagccaagcacttgctggattggtttgtggttttatcatcaaattacagacaagtctgtatgacccaggcttcctacagcagcttcacacagtggggttgatagtacaatatgaaggactgctaagtacatacagcgatgaaattggaatgctagaggacatggccgttggcatttccgatttaaagaaagttgcatttaaaataattgaagccaaatccaatgatgtgttgccagttataacaggaagacgagaacattacgtggtagaggtcaagcttccagccagaatgtttgagtcactacctctacagattaaagaaggacagttgcttcatgtgtatccagtactttttaatgttggaatcaatgaacagcaaactctggctgaaaggtttggagatgtctctttgcaagaaagtattaatcaggaaaacttcgaacttctacaagaatattacaagatatttatggaaaagatgcctcctgattatatttcacattttcaggaacaaaatgatttaaaagcattgctagaaaatctccttcaaaatatccaatccaaaaaaagaaagaatgtagaaattatgtggctggctgcaacgatttgccgcaaactgaatggtattcgtttcacctgttgtaaaagtgccaaagacaggacatcgatgtcagtgacacttgaacaatgctcaatcttgagagatgagcaccagttacacaaggacttctttatccgagcgctggattgcatgagaagagaaggatgccgcatagagaatgtactgaagaatatcaaatgcagaaagtatgctttcaacatgctacagctgatggctttccccaagtactacagacctccagaggggacttatggaaaagctgacacctaagtttaccaacatgttaataaacaggaacacaaatacatttcagttggataatcttc

SEQ ID NO: 1908 - protein, 924 aa, Homosapiens; identical to SEQ ID NO: 1886

SEQ ID NO: 1909 - DNA, 1424 bp, Homosapiens
agaatacaaagaaatggtgttacctggcaagaggtcttctgtcttttatgaaaaattagacaaagagccttgaaaccagcgaaacaataatcaaagagcagttctgtcaaagaaaacaacataaatcaggtacagaatttcagagtgggatatcagatctttagtgtgaagatacatctacattaaaccaggaatcactagaactgacatttggacaagaaaatttggaaaattttaaaactgtgaaggttgatcatggaaattaaagaggaaggggcatcagaagaagggcagcactttcttcctacagcccaggccaatgatcccggggactgtcagttcacaagtatccagaagactccaaatgaaccgcagttggaattcatccttgcatgcaaggatctcgtggctcctgtccgtgatcgtaaactgaatacactggtgcagatctccgtaatccaccccgtggagcagagtctgacaagatactccagcaccgaaattgtggagggaacaagggacccactgtttttgactggtgtcacattcccatctgagtatcccatctatgaggagaccaaaataaaactaacagtctatgatgtcaaggataagtctcatgacaccgttcgaaccagtgtcctaccagaacataaggatcccccgccagaagttgggcgaagtttcttgggctatgccagttttaaagtgggagagctgctgaagtcaaaggagcaattgctggtcctgagcctgagaacttcagatggtggcaaagtggttggcaccatagaagtcagtgtcgtgaagatgggggagattgaggatggggaagccgaccacatcaccacagatgtacagggacaaaagtgtgccctggtatgtgaatgtacagccccggaaagtgtgagcggaaaagataacttaccttttttgaattcagtgttaaagaacccagtatgtaaattatatagatttcccacatctgacaataagtggatgcgaattcgagagcagatgtcagagagcattctttcctttcatattcctaaggaattgatttcccttcacattaaagaagatttgtgcagaaaccaggagataaaagaacttggtgagctttctccacattgggacaatctgcgaaaaaatgtccttactcactgtgatcaaatggtgaatatgtaccaagacattctgacagaacttagcaaggaaacagggtcctctttcaaatcaagcagcagcaaaggagagaaaacattagaatttgttccaataaatctacatctgcaaagaatgcaggtacacagccctcacttgaaagatgctctctacgatgtcatcactgtgggagccccagctgcccattttcagggatttaagaatggtggtcttcggaagctactccatagatttgaaac

SEQ ID NO: 1910 - protein, 388 aa, Homosapiens
MEIKEEGASEEGQHFLPTAQANDPGDCQFTSIQKTPNEPQLEFILACKDLVAPVRDRKLNTLVQISVIHPVEQSLTRYSSTEIVEGTRDPLFLTGVTFPSEYPIYEETKIKLTVYDVKDKSHDTVRTSVLPEHKDPPPEVGRSFLGYASFKVGELLKSKEQLLVLSLRTSDGGKVVGTIEVSVVKMGEIEDGEADHITTDVQGQKCALVCECTAPESVSGKDNLPFLNSVLKNPVCKLYRFPTSDNKWMRIREQMSESILSFHIPKELISLHIKEDLCRNQEIKELGELSPHWDNLRKNVLTHCDQMVNMYQDILTELSKETGSSFKSSSSKGEKTLEFVPINLHLQRMQVHSPHLKDALYDVITVGAPAAHFQGFKNGGLRKLLHRF

SEQ ID NO: 1911 - DNA, 626 bp, Homosapiens
aaaaccagcctgagccccaggagatttccttcagtgctgtagctaagttcactttcagcccggcgcagaagttttccctgagatatggtgttagtttcttttctttctgtctcctctgccgttgccagcatgcaaggatctcgtggctcctgtccgtgatcgtaaactgaatacactggtgcagatctccgtaatccaccccgtggagcagagtctgacaagatactccagcaccgaaattgtggagggaacaagggacccactgtttttgactggtgtcacattcccatctgagtatcccatctatgaggagaccaaaataaaactaacagtctatgatgtcaaggataagtctcatgacacctagagacgggggtttcaccgtgttggccaggatggtctcatctcctgacctcgtgatccgtccgcttcggcctcccaaagtgctgggattacaggcacgagtcatcacacccggccgcatgtttcttttgaagcttacaagttgatcaattactaaaacaaggtcagtattcaaccagaggagaaaaacctatatccaaaatttttaggcacttaagcatatataactaattgaaactgtccaaataaattttataatgaag

SEQ ID NO: 1912 - protein, 57 aa, Homosapiens
MMSRISLMTPRDGGFTVLARMVSSPDLVIRPLRPPKVLGLQARVITPGRMFLLKLTS

SEQ ID NO: 1913 - DNA, 1356 bp, Homosapiens
agtttatttgaatgtagttgcagtctctacttacctttactttttagctttatactgaactccaatatgactgaaattttaacttttgatgtttcctaggtacagaatttcagagtgggatatcagatctttagtgtgaagatacatctacattaaaccaggaatcactagaactgacatttggacaagaaaatttggaaaattttaaaactgtgaaggttgatcatggaaattaaagaggaaggggcatcagaagaagggcagcactttcttcctacagcccaggccaatgatcccggggactgtcagttcacaagtatccagaagactccaaatgaaccgcagttggaattcatccttgatttgaatcaagaattaagagattagcagctgcaagaatttattcataataatgttctaccagtataaaaaacttcaatttctttttttatatatatttttaaaatatactaagaaacaacaacagataattttatcttgtcaaatggcaagaaatgcttgatgagcgaacacaagtttactaaaaaaatattatttcaagtcatcatggaactgtattgttgatcctagaagacacagtccccaaactgttaggttccttagcactttaagatcttcaactacaccatttcttgaagaattttttaaaaactactctttcaagggtattacagataaacccgtggatgttttactgtccatttttgtcatttttttctttgagattttttaattccacaaatcctccgacgtcacctattattgtatgagtaacttctattcatttcccaatgaaagaataatagcttcttaaatatttttatcatgtttaagggtgtgcatatttatttaatcagaagtaaaacaagaacaaattctaggaaaaagaaattcagtaaggaagagggctttttcgtctaattttaactaaatctttgatatttgattctctactcttaaccaaagtattcaaattatttaggaatttcaatgaccttgctttctaaattaggaaaacagccacaccaatcaatttgctaggtgccatattgctttgtataagttattttccatcaaggatttgtgtctgctttgtgtgctgctatataataattatgtcttgctgaagttcttctgcttattgaattcctctactgaagttccttacttattcaaataagtaaggtaggaggtacttagtcaattgagcagctaattggctaaaagtgtcttgagcacaagataagcatgtactgaaaaactgagtatctcttgtccattgttaactgtatttctaatggttgattgcatttaaattaaataattcacccctac

SEQ ID NO: 1914 - protein, 53 aa, Homosapiens
MEIKEEGASEEGQHFLPTAQANDPGDCQFTSIQKTPNEPQLEFILDLNQELRD

SEQ ID NO: 1915 - DNA, 1504 bp, Homosapiens
agacagcagaaggatcactgggctggaagctctaacaggcattgccagcctagctacctgcagtttgaggcaagggcagggtcacttaccctgctgtctgaatgtctcctgggacaacaggaggctgcactcactggctgagttcagacagaagagggatcatcggactggaagctctggcagagccttgaaaccagcgaaacaataatcaaagagcagttctgtcaaagaaaacaacataaatcaggtacagaatttcagagtgggatatcagatctttagtgtgaagatacatctacattaaaccaggaatcactagaactgacatttggacaagaaaatttggaaaattttaaaactgtgaaggttgatcatggaaattaaagaggaaggggcatcagaagaagggcagcactttcttcctacagcccaggccaatgatcccggggactgtcagttcacaagtatccagaagactccaaatgaaccgcagttggaattcatccttgatttgaatcaagaattaagagattagcagctgcaagaatttattcataataatgttctaccagtataaaaaacttcaatttctttttttatatatatttttaaaatatactaagaaacaacaacagataattttatcttgtcaaatggcaagaaatgcttgatgagcgaacacaagtttactaaaaaaatattatttcaagtcatcatggaactgtattgttgatcctagaagacacagtccccaaactgttaggttccttagcactttaagatcttcaactacaccatttcttgaagaattttttaaaaactactctttcaagggtattacagataaacccgtggatgttttactgtccatttttgtcatttttttctttgagattttttaattccacaaatcctccgacgtcacctattattgtatgagtaacttctattcatttcccaatgaaagaataatagcttcttaaatatttttatcatgtttaagggtgtgcatatttatttaatcagaagtaaaacaagaacaaattctaggaaaaagaaattcagtaaggaagagggctttttcgtctaattttaactaaatctttgatatttgattctctactcttaaccaaagtattcaaattatttaggaatttcaatgaccttgctttctaaattaggaaaacagccacaccaatcaatttgctaggtgccatattgctttgtataagttattttccatcaaggatttgtgtctgctttgtgtgctgctatataataattatgtcttgctgaagttcttctgcttattgaattcctctactgaagttccttacttattcaaataagtaaggtaggaggtacttagtcaattgagcagctaattggctaaaagtgtcttgagcacaagataagcatgtactgaaaaactgagtatctcttgtccattgttaactgtatttctaatggttgattgcatttaaattaaataattcacccctac

SEQ ID NO: 1916 - protein, 53 aa, Homosapiens; identical to SEQ ID NO: 1914

SEQ ID NO: 1917 - DNA, 444 bp, Homosapiens
ccataaatgtttaccataaatttactatgatccttgacatttcaaatttatattgctgttattattttttgtgataatttgtagagctgaagtttgtcaagtttgtataatgcatttagcgctgtagttaagagcatgggctatgaatggatgctaatggagagcctgttgcaatgtaaaaaagacactcaagtagctcagtggaatggcccacatgatgagaaactgagagccagcgtcaactgcccatcacataattaagcaagcttggtagcagaccttcttgctccggtcaagccttcagatgactggaaccccagctgacaactccactgtaaccctatgagagctgccaagctagaatcactcagccaagccactcctgaattctggatccccagagtctgtgtgagataataaatgttcattgttataagccacaaa

SEQ ID NO: 1918 - protein, 41 aa, Homosapiens
MGYEWMLMESLLQCKKDTQVAQWNGPHDEKLRASVNCPSHN

SEQ ID NO: 1919 - DNA, 514 bp, Homosapiens
agttcacaaagagatccatttaaagactttacaacgtacgtacactcatatgtgttagaggcactttcagtttggccttcattcagttcacaaagagatccatttaaagactttacagaagaaaaatgacaggatgaaaactgtgcctcgaggagattaaactggaagcagaaggtatcaacccaggccatggagctgaatggagaagaaatgccttccatcccttccaaccatttggcttctccagtccctcacctcaagcaaacctcatcaaggttttccgatttccagacccaggtcctgagcaactatgtaaatgcaaacaaacactggtgatgactgtaaggccatcaaactccaaacagtcatgcaaccagagcctctgaagatggccccttctgccgggaacccttagatcagcctctgagggagttctgccatttccccaaaacagcgccccctgtcagcaggaagcggttaagatcagtcttcatccttatccttaatctaacca

SEQ ID NO: 1920 - protein, 32 aa, Homosapiens
MQTNTGDDCKAIKLQTVMQPEPLKMAPSAGNP

SEQ ID NO: 1921 - DNA, 434 bp, Homosapiens
tcatctctggatcctctggggttaaaaatccatggacacaatctctaaatcctattccagttccagcctcctatggtcttagaatacaaagaaatggtgttacctggcaagaggtcttctgtcttttatgaaaaattagacaaagggggcgctgttttggggaaatggcagaactccctcagaggctgatctaagggttcccggcagaaggggccatcttcagaggctctggttgcatgactgtttggagtttgatggcctgaagatggaagaagctattcagggaaggagtgacttccagctttgaaacaagaactttagaaacttcagaagcatacggaaaaggaaacaagaaaaatgtaatcaagcaagcctcttgaaatgatacaataatataatagcagaattagatccacagaatttatacaattaaa

SEQ ID NO: 1922 - protein, 38 aa, Homosapiens
MVLEYKEMVLPGKRSSVFYEKLDKGGAVLGKWQNSLRG

SEQ ID NO: 1923 - DNA, 5606 bp, Homosapiens
agagggagcccgctcaggcctcagccagcacagagaggggctcccacggtgcagctgcgggctgaagggctcctgaagcgcggccagagtgggctgaggccgaggaggcgccgagagccagcgaggggatgccagcaagctgtcacctctcagaaatacaggaagaacatcaataatgttcgaagttataaattgcggaggccagaagtcagaaaacaaggtgtctgcaggaccaacctctcctctggatgctctagtgcgttttatcacaagaacatgacctttaagcacaagaacaccttgtattccaccactaaaaacagaaatgacatctaccttcactgcttccctatttctctccatctttactgacttggtgttttgttgttgctgtcacttctggttgttggtcaattttcatttctattcttattttgctgataattcttataaatcagtgctgaattttgtcaaattatttttctgcatctctacagatgatcattttatgtttttgtccctgtgataatttggtgaatgtcattgatcagtttttaaataatgaatatctttgcatttaagataatattttttcactattaatgttatctctgaaatgaaagctaaacctagtcaatagatattagaggtgcatgatttttaaagttgtataaaattagataaaaaatacaaagaaatagatataattttaaaactatgtaaaaatgtaaatgccaaatgatagagcactaaatgaagcttgtaatattcaatacaatctttagaaactcttttgcagtgcagcaaaaaaatagaactgaaaacaaagcagaagaaatcacagatataaaattaaagaggatagaattaagcacctgagttcccatatctaaagtgaaaatctaagaatttaaatatcattcaaatacagactaaaatacaatataaaataaaatttcctgaactaatttttaaaatactgtttaatttgtagataaaaatgcagactaattttctgactatattactacaaaaatcttctacaaatattttttaactaaaattataagaaaaacatccgtcataaacacgtaagattaatattttcgtttctgaagtataaaatgtctggatagacttgagcttgttgctttagttttatatgtgaagactggaaaaattctgttttgttttgaaaaatattttgagctaaaaatgttgtattccacatttgttaggaatggaagtctttaaaatatgaaatatttccaattgaagaaaaatagtgaacatgaactttatctgaataagattaatgaaaattatatgttgaaaaagtaaaatagttatgtgtactaacagtgactactaacccaacaatataaaattaagtaaaaatattattaccatgttaaatacaaattaaaattaattataaaaaagttaagatctatgattaaagtattaaaataaaatgagactgtattcacaaatttaaaagcaaattggtgaatgacatattttttgaaataataaattctttggcatattttatattttttattataaatgaaaattatttatttgaaatatttaaaggaacaaaatatttgcagctctattttattgagaaagtaattacaaaacaaaaacaaggagtttttgtaattacaaaagaatatattaatattatttagaagcacaaaaccagaaaagctttatattatttctaacaataagtgtaaaccatctaattttctgaaaagggggggaaataaatatttaacaaagaagatgttattcttaaattgtaatacgtacgttgcctaaaaataaaaaggtagttgaagatacattgtgaacaacaaaaaatgaagagctgataatattaatgtgcgaaggaaactcataacatattgtactaattataaatcagtgtattgacaaaacctgagtcctcaattattattgactgttattgacatattaatgatagaatattaaatatagaatataataaagcaatttagaataaaaaagagaaagcgatagacatgaatagaaacaaaatgcaactgttctatattaaaagcctttctaaattgcctgcgtttttctagtgacctgtgtcgctatgcagtgtaggctcaggtgtctagattttagttgcagataaacacaggtagtattttccagatctcagaatgaccagttacataaaaataggccataaaccatatatttcattcttacggttgacaaacctctaattcacctgaaaatattaaaaagaaagaagacagacgtgacagtggttggaagttgaggataagaagaagttggcagaaataagctttcttcttttggacagcaatgcatgataaaaaaaattaaactaaattcagttcatttccactaactgggacttatttagaaactttaagaaagtctttgaagaatttcaattgagtagtaaataagggccaatttatttcatagtgtggactctcaagacaatatacagcagtgcttctcaaagttaaacagtatatgagtgacctggaaatgaagatgcagatttaatagggctggagagaagtctgagattctcaatttctaatgaattaaattacaaagaggagaaaataaggttattgcttactttatatacattcacaaacacaggctaatcaaataattgtttaaagtattgctctgagaagaattaaattacatatttcataggaaacattttctttacattcggattttatctattattagaataataatagaatcttgactttatgtaactctatattccaaacaactagaaacttttcgatagcaattgttcaccatttaataacatttttccaagatatctaatgcactcaaggacaaaatagctgccttccagtgatttccaatttattcaattttcaggcaatttgtctgcccacacaatgacagattacagttacattcttgccacgctccgaacagctaagccaattgttttcaatcttttttcttcagcaactccatctcttaaagtacttcagagtagttcctgaaaggattcctctttagttaaatggctatacagctctcccatcatccaaaataatcagtggagagatagcaatatttttcattacattaggccaagttgcattgcttccttcatcttgtaatctgatcagaaacaccactatagatccaataattgagtttagagtttcagagaatttggggtcacagaacacctatgtctattttgtaaagattattgcatattactgaaatagctagtcaaacactgcagtctgcttaaagtatcaaaatagaaatgttgaatgctgtgtctgcacagagttcatttaagcaaagaatctactaggctcttaagtctgttaatgcaaattcctgaatacagttgaccctccatacccccattgtgggtggatttaactaaccatgaatcaaacatatttgttaaaagaaataccaaaaataatttttaaaaagaaatacaacaataaatgcaaataaaaaacaatccttgtaacaattatgtgcatagcatttatattgtattcagtattattaatgtaagtaatctggaaatgatataaagtatacaagagggtgtgtgtaagttatatgcaaatactagcccattttatataagaaacttgagcatctctggcttttgctatgaagggatgatggtggtaggattggtagtggtcctggaacaaatccccagcaggtaccaagggggactgtagaccccaaagctgtttaggaatgagtcacagcagcaggattgaggtaggaatgctccccacagaaaacatcaaccacctgttgatttttgaatctgctcctctcaggcatgccttcaaatgctataacctggagattcaactcattttcatgctgtaggtaggaataggtgattcaattccccaagaaagtgacagagatccctgaaatatagatttaaagttacatagtgtcaaatgctagtcattttctttttgctcgatggtatcctctcagaaaaaccttttataatatttctaattcatttaccagatttatagaatcatcaaattatctatctatctatctgtttatctatagataaacacatctatcaatgtgtttttcaaatattttgtgaagtggctagggtaacaacctatggttcgaacgtattttgtgaagtggctagggtaacaacataatgttcgaacgtatgttcgtatttaaatacaaatgtattttggttgagtgattactcaaggtcactgaggaatccacaaggttaacctcctgactctagaaccattgttatatagagatatataaatagctggtttaatattataggcttagcaaaatatttaataaataaggtcttagtaaaacaacacacatgtatttatccacttatttaattttgtttttccatttcttctgaacataagttcctgaggacacgggccttttttcacagttcatttttggattccaacatctagccagtactttgcaaagagcactgaatttgaaataaatttctcagttaatgatttgaatcatataaaatatttagtaaatttgaaaactagtaaccgtgtcaagtgattaaaacaaacatactagagggtaagaatcccctgccccttgccttcttcctttacatccacttcattcttattcttgtctacttcccctgccccacccagggaacgtggttagcccatcaactgcaaagattgttctcatataatattgttctgatggataatgagactctgaaagtggaacataaacagataaaacaaaaacaaacagaaaagaacccaaaaacctaaactcaacttcagttaaagcagaaaatatctgtccagcctaaaccaggcatactcaacttcctcttcttctgttagaagcctgagcctacttcagtctggaaccacctagtcttcaggtttgcctggtgctcaccagctgaagaaatcctttaacgacctttattcagtcaagtaaattgttttcttttggcaacttgcatgttattttttaggttttcatttatttatttttttatatttaaagtcatattttcttccttttattcactttgctggtctttctcactttgatttttttttgccttgttttgcatttgtttactttaacattttttgtaacttatctcttttattttggaaattattcacattatcagttttcttttgctaggcaattttgatattctaataaacattattaacataaaatataaagtttactaacaccaagcccaaacaatacaaagtcttagggctctttaattgcaattatttaaaaatatttgctacaaattgttcattattttatatttacgttgtttttcttattcccacaaatcacatattgttggtgtgtttgttaaataaaaatctttaattgcaattgtttaaaaatatttgctacaaattgtttgttattttatatttacgttgtttttcttattcccacaaatcacatattgttggtgtgcttgttaaataaaattgtgattgctt

SEQ ID NO: 1924 - protein, 34 aa, Homosapiens
MFEVINCGGQKSENKVSAGPTSPLDALVRFITRT

SEQ ID NO: 1925 - DNA, 1001 bp, Homosapiens
actcgcagactgcgggccttcctccgacgctgggagaaggaccctgggagaggcaagggaagggctccggaaccagcgcagcagcgggacgctagcccgcccacacggcggccacttgaaggtcctccagggaacacctgaggcagtgggagcgtctgccctttcctaagtctccttggaaagaagtattcgctttcgtttccgcaaacaaagcatgctccgcgctttcaggaccggtggctcccgtggagaccgcagcggaacccagtccgccttcgcacgcgtccgggggagaagcggccccaggactaagggcgcgcgcccgaggaaccggtgctgtgacgaccagagcaaacacgccggatgttcctgtgtaggctgtgtaaggagtgaccggaagtagaaactgggtgctccagtggcgcaatcggttagcgcgcggtacttatatggcagtatgtgtgcgagtgatgccgaggttgtgagttcgagcctcacctggagcattgttttccaacccaaaatagcattacttgaagtgcctttccccctgtaatccgactccatcgtctttaacgtgtttggaattgtgtacacagtttattgttattggtttccttagcctttttagaaccaagcaacgccaattaccaacaaaatccgttgcgccgcagtgagttagctaccttctatctccactttgttctgcacgtcgatctcagctttgcttgaggcaaatgcaacaatatttcagagtgaggattcagccaaacatctctaagaagaaaacctctggacacagcaggacacagaaatactgaaatctccagcctagggcaccatccctcaagttaaaggagaagccagctcccatgttaagaagttcaaatacctagagactgcgatggtttgcagaggctcaagctaaccacatggaaagacatggagagatattccttgccaaccctcaactactccaactattctaagacatcaaacct

SEQ ID NO: 1926 - protein, 62 aa, Homosapiens
MLRAFRTGGSRGDRSGTQSAFARVRGRSGPRTKGARPRNRCCDDQSKHAGCSCVGCVRSDRK

SEQ ID NO: 1927 - DNA, 678 bp, Homosapiens
gagcaaacacgccggatgttcctgtgtaggctgtgtaaggagtgaccggaagtagaaactgggtgctccagtggcgcaatcggttagcgcgcggtacttatatggcagtatgtgtgcgagtgatgccgaggttgtgagttcgagcctcacctggagcattgttttccaacccaaaatagcattacttgaagtgcctttccccctgtaatccgactccatcgtctttaacgtgtttggaattgtgtacacagtttattgttattggtttccttagcctttttagaaccaagcaacgccaattaccaacaaaatccgttgcgccgcagtgagttagctaccttctatctccactttgttctgcacgtcgatctcaggagaagccagctcccatgttaagaagttcaaatacctagagactgcgatggtttgcagaggctcaagctaaccacatggaaagacatggagagatattccttgccaaccctcaactactccaactattctaagacatcaaacctgtcacccaccggtctgaagaggaggatgagagacaaagaaaaaagttgtctggctgcctctgctgtctacagattgaagaagatccatccagctgagcccagcctagaccagctgacttctccaataagcctgtatgaaataaatgcttattgttatgtg

SEQ ID NO: 1928 - protein, 72 aa, Homosapiens
MERYSLPTLNYSNYSKTSNLSPTGLKRRMRDKEKSCLAASAVYRLKKIHPAEPSLDQLTSPISLYEINAYCY

SEQ ID NO: 1929 - DNA, 1069 bp, Homosapiens
ctgaaacttctcagcaggcgcatctacactagtgacctgaggagagaaaccctaaccccacaatggctgcatcttctctgaagacgagactgatgctcatctttgaaatgaagggcagtgtgtgcatttctccatgaagctttcagcactgaagggtgacatgtcatactcattggctatgcatccgttgaagaaataaaggaatgaactctgaccggggaaagcaggagaggcaggagtgtgacaccctaacagtcgactgcagtgggagcagtggcaccagcagcacttggggagacttttactttccagtgtggcgggagtagtaaacactaggagtcagagagtaatcaccgaagctggagttaaaagtgtaaattaaaatcctccttcctataagaggaagataaccggttgactgcaactcacgtttcccctccagcactcggttaaacacgcacacgcacgcgcgcacgagctgcccacggtcttcctttcggggtttgagaagagacagacagaggtgggagagcgcagctgcagccgcatcaacattccggtgtctgcccttagaagaagtccggattcagtactcgcctgcttagacaattctactgttgatgtggtgaaagtacatatttttgggtatgactatttggggaaatactttaaatatccttaaaccttattgggcgaaaatgaagtgggctcgtccgggatttgaacccgggacctctcacacccgaagcgagaatcatacccctagaccaacgagccacttagaaatggcttttgcttatatttactgtaggatttattcccaaattatttatttttattcctcaaagaatttgttaccaaataatatttatcactccatcaatcatttacataaatgaaagggttggaaaggctatttctgtggatggtctgctggtagcttaaattaccatactatggtaaaacttgtcacctgtagaaacatttctcctttattctactttgctatactactctaagtaatttaactcattttttccatttttagctttcaattaaaatattttag

SEQ ID NO: 1930 - protein, 83 aa, Homosapiens
MTIWGNTLNILKPYWAKMKWARPGFEPGTSHTRSENHTPRPTSHLEMAFAYIYCRIYSQIIYFYSSKNLLPNNIYHSINHLHK

SEQ ID NO: 1931 - DNA, 2035 bp, Homosapiens
gctgtttttccttttcgttggcgctttatagctacacagtgctatgccagagccagcgaagtctgctcccgccccgaaaaagggctccaagaaggcggtgactaaggcgcagaagaaagacggcaagaagcgcaagcgcagccgcaaggagagctattccatctatgtgtacaaggttctgaagcaggtccaccctgacaccggcatttcgtccaaggccatgggcatcatgaattcgtttgtgaacgacattttcgagcgcatcgcagggctaccctgagaggaatctacatgcagagaagttcaggagactgaactaacggaacgtcaggaagcgctgcgggctggagagctgctgttggaacagggaggagttctccgggccgcaccctgcctccgtcccgcaggcgatggctgaaacttctcagcaggcgcatctacactagtgacctgaggagagaaaccctaaccccacaatggctgcatcttctctgaagacgagactgatgctcatctttgaaatgaagggcagtgtgtgcatttctccatgaaggtatccagaaacagccatgccagagctgctgtggggtggctgaactgctattccttttctagggtgggatccccactctttgtaaggaaggatattggggtcctgacactgggaactcatcttgtcagtgaggccttctttaactgctgtcttgtaattgagccaccccatctgtgtttcctgttccaatttaggacttttttttttttatcataatataaagatctgaaatgctatgttttccttattcattggcttattatctttactatcccatcctccacactaaaagttttttcgagctggatttgggagttgtggggtaggttatattttgatcacttgtatttcccagcttctagaacagtgcccagcaaagtacttctctgaataaatgaataaagtaatattcctctgctctgctgttgccaactggaatatcctgagggaaatttctttactttcctcaggggatgatccagaagatgaaaaacaaattgtcattccatatagtcctcttctgagtgtttttcagttttgttaaaactcagattttttctttttacctgaatgtttttttgttaatgattattagcatatacagtattttcttttatgtaccaaaaaaaggcaattgatacagtgcatgacttgaaaatatacctgccttctctgaggctcaaattcaggactgtattatttggaaagccttgttgggttgtggctcccaagaaatcatacctaatttcccttctttgagagcactgatttctgagtttccatttctcctagaagagaaacattggcttgtaagaatttatgtatcatcaatgcttccttttccatcctgcacttagaaggacccaagacttgagggctgcgctgtcaacactattccttgctcaccctctcttttgttctaattatttatgtcttcccgccttcagaaatatcagttgctctttcaccagccattgtttcctctctggccctagtgcagagtaggtgacgtagtacagctgaaaggatgaatgctggcaaacttgtttctagcctagatttctccttattttaaatctgcacttgcaaccacatggcctgagacactcctcttgaaaatatcaccaaaaggaccttattataaaaagtcaccgccatctattcagggctatgtattaggggacaataaagtgtaagtcatggccaggcacggtggctaatgcctctaatcccagcactttgggaggccgaggtgggtggatcacgaggtcaggagattgaggccatcctggctaacacggtgaaaccccatctctactaaaaatacaaaaaattagccgggcgtggtggcgggagcctgtagtcccagctacttgggaggctgaggcaggagaatcgcttgaacctgggaggcggaggttgcagtgaaccaagattgtgccattgcactccagcctgggtgacagagctagatgtcatctc

SEQ ID NO: 1932 - protein, 78 aa, Homosapiens
MPEPAKSAPAPKKGSKKAVTKAQKKDGKKRKRSRKESYSIYVYKVLKQVHPDTGISSKAMGIMNSFVNDIFERIAGLP

SEQ ID NO: 1933 - DNA, 996 bp, Homosapiens
tacacagtgctatgccagagccagcgaagtctgctcccgccccgaaaaagggctccaagaaggcggtgactaaggcgcagaagaaagacggcaagaagcgcaagcgcagccgcaaggagagctattccatctatgtgtacaaggttctgaagcaggtccaccctgacaccggcatttcgtccaaggccatgggcatcatgaattcgtttgtgaacgacattttcgagcgcatcgcaggtgaggcttcccgcctggcgcattacaacaagcgctcgaccatcacctccagggagatccagacggccgtgcgcctgctgctgcctggggagttggccaagcacgccgtgtccgagggtactaaggccgtcaccaagtacaccagcgctaagtaaacagatatagaaatcagaataaaaagcagggtttgtaagaaaaggaggattgcgactgactcatgggtatattgtccagccacagggctaccctgagaggaatctacatgcagagaagttcaggagactgaactaacggaacgtcaggaagcgctgcgggctggagagctgctgttggaacagggaggagttctccgggccgcaccctgcctccgtcccgcaggcgatggctgaaacttctcagcaggcgcatctacactagtgacctgaggagagaaaccctaaccccacaatggctgcatcttctctgaagacgagactgatgctcatctttgaaatgaagggcagtgtgtgcatttctccatgaaggtatccagaaacagccatgccagagctgctgtggggtggctgaactgctattccttttctagggtgggatccccactctttgtaaggaaggatattggggtcctgacactgggaactcatcttgtcagtgaggccttctttaactgctgtcttgtaattgagccaccccatctgtgtttcctgttccaatttaggacttttttttttttatcataatataaagatctgaaatgct

SEQ ID NO: 1934 - protein, 126 aa, Homosapiens [sequence omitted]

SEQ ID NO: 1935 - DNA, 778 bp, Homosapiens
tacacagtgctatgccagagccagcgaagtctgctcccgccccgaaaaagggctccaagaaggcggtgactaaggcgcagaagaaagacggcaagaagcgcaagcgcagccgcaaggagagctattccatctatgtgtacaaggttctgaagcaggtccaccctgacaccggcatttcgtccaaggccatgggcatcatgaattcgtttgtgaacgacattttcgagcgcatcgcaggtgaggcttcccgcctggcgcattacaacaagcgctcgaccatcacctccagggagatccagacggccgtgcgcctgctgctgcctggggagttggccaagcacgccgtgtccgagggtactaaggccgtcaccaagtacaccagcgctaagtaaacagtggagtggctgaaacttctcagcaggcgcatctacactagtgacctgaggagagaaaccctaaccccacaatggctgcatcttctctgaagacgagactgatgctcatctttgaaatgaagggcagtgtgtgcatttctccatgaaggtatccagaaacagccatgccagagctgctgtggggtggctgaactgctattccttttctagggtgggatccccactctttgtaaggaaggatattggggtcctgacactgggaactcatcttgtcagtgaggccttctttaactgctgtcttgtaattgagccaccccatctgtgtttcctgttccaatttaggacttttttttttttatcataatataaagatctgaaatgct

SEQ ID NO: 1936 - protein, 126 aa, Homosapiens [sequence omitted]

SEQ ID NO: 1937 - DNA, 915 bp, Homosapiens
ctacacagtgctatgccagagccagcgaagtctgctcccgccccgaaaaagggctccaagaaggcggtgactaaggcgcagaagaaagacggcaagaagcgcaagcgcagccgcaaggagagctattccatctatgtgtacaaggttctgaagcaggtccaccctgacaccggcatttcgtccaaggccatgggcatcatgaattcgtttgtgaacgacattttcgagcgcatcgcaggtgaggcttcccgcctggcgcattacaacaagcgctcgaccatcacctccagggagatccagacggccgtgcgcctgctgctgcctggggagttggccaagcacgccgtgtccgagggtactaaggccgtcaccaagtacaccagcgctaagtaaacaggctaccctgagaggaatctacatgcagagaagttcaggagactgaactaacggaacgtcaggaagcgctgcgggctggagagctgctgttggaacagggaggagttctccgggccgcaccctgcctccgtcccgcaggcgatggctgaaacttctcagcaggcgcatctacactagtgacctgaggagagaaaccctaaccccacaatggctgcatcttctctgaagacgagactgatgctcatctttgaaatgaagggcagtgtgtgcatttctccatgaaggtatccagaaacagccatgccagagctgctgtggggtggctgaactgctattccttttctagggtgggatccccactctttgtaaggaaggatattggggtcctgacactgggaactcatcttgtcagtgaggccttctttaactgctgtcttgtaattgagccaccccatctgtgtttcctgttccaatttaggacttttttttttttatcataatataaagatctgaaatgct

SEQ ID NO: 1938 - protein, 126 aa, Homosapiens [sequence omitted]

SEQ ID NO: 1939 - DNA, 635 bp, Homosapiens
ttggcgctttatagctacacagtgctatgccagagccagcgaagtctgctcccgccccgaaaaagggctccaagaaggcggtgactaaggcgcagaagaaagacggcaagaagcgcaagcgcagccgcaaggagagctattccatctatgtgtacaaggttctgaagcaggtccaccctgacaccggcatttcgtccaaggccatgggcatcatgaattcgtttgtgaacgacattttcgagcgcatcgcaggtggagtggctgaaacttctcagcaggcgcatctacactagtgacctgaggagagaaaccctaaccccacaatggctgcatcttctctgaagacgagactgatgctcatctttgaaatgaagggcagtgtgtgcatttctccatgaaggtatccagaaacagccatgccagagctgctgtggggtggctgaactgctattccttttctagggtgggatccccactctttgtaaggaaggatattggggtcctgacactgggaactcatcttgtcagtgaggccttctttaactgctgtcttgtaattgagccaccccatctgtgtttcctgttccaatttaggacttttttttttttatcataatataaagatctgaaatgct

SEQ ID NO: 1940 - protein, 88 aa, Homosapiens
MPEPAKSAPAPKKGSKKAVTKAQKKDGKKRKRSRKESYSIYVYKVLKQVHPDTGISSKAMGIMNSFVNDIFERIAGGVAETSQQAHLH

SEQ ID NO: 1941 - DNA, 564 bp, Homosapiens
ctacacagtgctatgccagagccagcgaagtctgctcccgccccgaaaaagggctccaagaaggcggtgactaaggcgcagaagaaagacggcaagaagcgcaagcgcagccgcaaggagagctattccatctatgtgtacaaggttctgaagcaggtccaccctgacaccggcatttcgtccaaggccatgggcatcatgaattcgtttgtgaacgacattttcgagcgcatcgcaggtgaggcttcccgcctggcgcattacaacaagcgctcgaccatcacctccagggagatccagacggccgtgcgcctgctgctgcctggggagttggccaagcacgccgtgtccgagggtactaaggccgtcaccaagtacaccagcgctaagtaaacaatattttttagactccctcatctgtcagtgtgggtgcggataatgaaacaaaatgggcaagatgttggtaattgttgaagcctgtgcgacgagacttgggaagtgcaggattctctatatttttgtgtctgcttcaggatgtccatgaccactccctttcccctccaa

SEQ ID NO: 1942 - protein, 126 aa, Homosapiens [sequence omitted]

SEQ ID NO: 1943 - DNA, 808 bp, Homosapiens
cacgctgtttttccttttcgttggcgctttatagctacacagtgctatgccagagccagcgaagtctgctcccgccccgaaaaagggctccaagaaggcggtgactaaggcgcagaagaaagacggcaagaagcgcaagcgcagccgcaaggagagctattccatctatgtgtacaaggttctgaagcaggtccaccctgacaccggcatttcgtccaaggccatgggcatcatgaattcgtttgtgaacgacattttcgagcgcatcgcaggtgaggcttcccgcctggcgcattacaacaagcgctcgaccatcacctccagggagatccagacggccgtgcgcctgctgctgcctggggagttggccaagcacgccgtgtccgagggtactaaggccgtcaccaagtacaccagcgctaagtaaacagtgagttggttgcaaactctcaaccctaacggctcttttaagagccacccatgttctcaaagaaagagctggtgcttgtattcctcctctgctggccactgacaaacccttgtaacttgctactgtgttttttggtctgaagtagagcagttatttaactaatccttagtgactttttttttttagatctgccattctaatcttagagttaagtaaggagatgggaaattttctattataagttcgaaaccaattaaaatacgttagaaaccaattaaaatactcgtcggtcccccgtcggttagtgatttggaacagtgccaagttgcagcggttgtcagtttgaatttgcccgggcaacgcccgcccttcctctgc

SEQ ID NO: 1944 - protein, 126 aa, Homosapiens [sequence omitted]

SEQ ID NO: 1945 - DNA, 2250 bp, Homosapiens
tgtggttgctcgtagtgagttgcgctcgctatgtctggacgtggcaagcagggaggcaaagcccgcgctaaggccaagactcgctcttctagggccggtctccagttccccgtgggccgagtgcaccgcctgctccgcaaaggcaactatgccgagcgggtcggggccggcgcgccggtgtatctggcagcggtgctggagtacctgaccgccgagatcctggaactggcgggcaacgcggcccgcgacaacaagaagacccgcatcatcccgcgtcatctccaactggccatccgcaacgacgaggagctcaacaagctgctgggcaaagtcaccatcgcacagggcggtgtcctgcccaacattcaggccgtgctactgcccaaaaagactgagagccaccacaaggcgaagggcaagtaactatctgtactagtttgtggcagctcaagtaaaatcgagtccaaaccaacggctcttttcagggccacccacgtcttctctaaaagaacttaacatttattccatgtgaaagaaagtgagacatggacaagactctagtcataaattacccatctttttgaaaacagtgtagcgaacaccgcagatttaaaagaaaaactagagggaaggtggtccagattttaccacgcttaaaagttaagatgtgaacaaatctcttaggccattacttaattttaaacttaatcagtgtgtgtccacagagcaccagtggcttcgtgagttcttgaagcactttggcccaaaagagttatcgcccgggctagaatttagcagacagctgttccacgcgggccagggcggcatgaagaagtcccgccgctacgtgcccggcacagtggccctgcgcgacgttcggcgctaccagaactccgagctgctgatcagcaagctgccgctcctgcgagagctcggcggtgacgccgctgcacgagagcgaggctgaagaactttgtgacacaatagtccacctccctgcaaaggctctgtcagagactcacatctttcctgatggatagctgtgaagcattctcttacccaccctactgcatgttgcaaagtattcctttaaaatgaagtgagtaaaatactgggatgacgttatctggagcccaagaaagatggctcatttggaaaggcctaatatcccaagttgcttacctagaagaacttgacaggatagttaataataaaccttaaaacccatgaagaaatctgaggtaaagtgttagcacacagactgttaaaatgtctgcctcacagataggagggaaaatatatagaggattataatatggttcaacaaatgttgatgagtattagaaatgtacattagaaatattagaaatgtttatgactattagaaaagtacagggtattgggcgttcctgacacaaactgaggcctcctagcaagactggcagttttctgtaaaggagggttatttactacggtagtgcaaataacttttggtgttgtagctaaataaggaatactcatgccaagattgcacaattgtgcctcctccctctgttcactgaactctgatgtaattttttttttttttttgagacggagtctcgctctgtcgcccaggctggagtgcagtggcgctatctcggctcactgcaagctccgcctcccgggttcacgccattctcctgcctcagcctcctgagtagctggggctacaggcgtctgccaccatgcccagctacttttttgtatttttagtagatacggggtttcaccgtgttagccaggatggtcttgatgtcctgacctcgtgatccaccggcctcggcctcccaaagtgctgggattaccggcgtaagccaccacgcccggcccactctgaagtaatcttaagaagacgttaactcatttttcttgtgtattgtagacacttttggctgtctggtaacatggaaaatctcagaatgatgttttaagtatataaaatgccaaacaaagttaaattacagttatcaaagtatttttaaaacttcatagtgataaatgagactatatagttatattgttaatatagttaacacattacatgatttggtgagcctaattgctgttactaattagaggagtaaaaatgtttcacgataactcagcaattgtaatgagaaatgaaacatctaatgtcttttgggttacaaagtaacaggtactgagatttgtggcctaaattcataataaagtgaaatgttcaagttc

SEQ ID NO: 1946 - protein, 130 aa, Homosapiens; identical to SEQ ID NO: 189

SEQ ID NO: 1947 - DNA, 1542 bp, Homosapiens
tacttcccgttttctcgatctgctgctcgtctcaggctcgtagttcgccttcaacatgccggaaccagcgaagtccgctcccgcgcccaagaagggctcgaagaaagccgtgactaaggcgcagaagaaggacggcaagaagcgcaagcgcagccgcaaggagagctactccgtatacgtgtacaaggtgctgaagcaggtccaccccgacaccggcatctcctctaaggccatgggaatcatgaactccttcgtcaacgacatcttcgaacgcatcgcgggtgaggcttcccgcctggcgcattacaacaagcgctcgaccatcacctccagggagatccagacggccgtgcgcctgctgctgcccggggagttggccaagcacgccgtgtccgagggcaccaaggccgtcaccaagtacaccagcgctaagtaaacttgccaaggagggactttctctggaatttcctgatatgaccaagaaagcttcttatcaaaagaagcacaattgccttcggttacctcattatctactgcagaaaagaagacgagaatgcaaccatacctagatggacttttccacaagctaaagctggcctcttgatctcattcagattccaaagagaatcatttacaagttaatttctgtctccttggtccattccttctctctaataatcatttactgttcctcaaagaattgtctacattacccatctcctcttttgcctctgagaaagagtatataagcttctgtaccccactggggggttggggtaatattctgtggtcctcagccctgtaccttaataaatttgtatgccttttctcttattaatcttgtcagttgattttcagtgaactttcagaggccaaaagggaggttttctcttggcccctgcaccagtagcagttcctgatatgcctacaaccttaactaatgctgggtagaaccatttaaagtaatctaactttactaataaggacttgatttcttgtatatagaaataacttttcaaaaagttaatcagttggttagtcagcacaatacattaactatttcccccactgatttgaggaacttattatcatatactgaatatatgagccaccgcacccggcccatttggtgattttcttgctactctttattttaatgagtaccttacagcagtgcttgaagtattttcaaagtattccacttaaatgtcataaagtaaatgaagataaacttttcattaaaatactttagaaatttttgcatttatgttgcaataaaagaaaacttgccatacacctttggaaaacaaaaaaaaattgatatgactggctgtaacttgctgtagctgaattcagtatatgttgtaaagagggtaaggtagcataggttaattgaatacgttaatctaagggtaaatacaaattaaaaatgagaggcttaattatctgttgaaaacaaaagacttccctttcctttcccatcactttcaaaatgtctttctctgtccttttaaaatgtatgtaaatccttttaatggctaa

SEQ ID NO: 1948 - protein, 126 aa, Homosapiens; identical to SEQ ID NO: 191

SEQ ID NO: 1949 - DNA, 833 bp, Homosapiens
tacttcccgttttctcgatctgctgctcgtctcaggctcgtagttcgccttcaacatgccggaaccagcgaagtccgctcccgcgcccaagaagggctcgaagaaagccgtgactaaggcgcagaagaaggacggcaagaagcgcaagcgcagccgcaaggagagctactccgtatacgtgtacaaggtgctgaagcaggtccaccccgacaccggcatctcctctaaggccatgggaatcatgaactccttcgtcaacgacatcttcgaacgcatcgcgggtgaggcttcccgcctggcgcattacaacaagcgctcgaccatcacctccagggagatccagacggccgtgcgcctgctgctgcccggggagttggccaagcacgccgtgtccgagggcaccaaggccgtcaccaagtacaccagcgctaagtaaacttgccaaggagggactttctctggaatttcctgatatgaccaagaaagcttcttatcaaaagaagcacaattgccttcggttacctcattatctactgcagaaaagaagacgagaatgcaaccatacctagatggacttttccacaagctaaagctggcctcttgatctcattcagattccaaagagaatcatttacaagttaatttctgtctccttggtccattccttctctctaataatcatttactgttcctcaaagaattgtctacattacccatctcctcttttgcctctgagaaagagtatataagcttctgtaccccactggggggttggggtaatattctgtggtcctcagccctgtaccttaataaatttgtatgccttttctctt

SEQ ID NO: 1950 - protein, 126 aa, Homosapiens; identical to SEQ ID NO: 191

SEQ ID NO: 1951 - DNA, 1225 bp, Homosapiens
agacctttgttctctgaccacttgataatgtcaggacgcggcaaaggaggtaagggcctggggaaagggggtgccaagcgccaccgcaaggtgctgcgcgacaacatccagggtatcaccaagccagccattcggcgccttgctcgccgcggcggcgtgaagcgcatttctggcctcatctatgaggagacccgcggagtgttgaaggtgttcctggagaacgtgatccgggacgccgtgacctacacggagcacgccaagcgcaagacggtcaccgccatggacgtggtctacgcgctcaagcgccagggccgcaccctctatggcttcggcggctaaatggcattttgaagcccagtcattctctaaaaaggccctttttagggcccctaagctttcaacaaaagagttgaaatgactgcaaactgagtctcttaatagggccattgtcagtgagttctgtcatcctattttacaagattaactcgacgccgaaaatgggctgatgactacaggtgaccttgggccgagatttttccaaggccagaagagcctctgctggccagtaacttctggcggctgcctggaaattgcctgcagccggtttaccgctcggattagtttagaaagccaaggggtctgcggtccaaataggggcgggctagataattaacttccctctggaccttcaaatacgtctcaggagataatgagtttgatgggctccactaaatgctagaacctccaggaaaacttcgtggtggctggtttaagaggacttggcgggcacagagctctgcatgggggggagggggacagaccatgcttttactactgtagaacagtagggcagtcttaagagtcttagtaataatattcctttatatgtttgccttttaaatactggaatatatcaagtatacaaaatgcgctggtgaccacaccacttattcaagtgcatctaaaatccttatgtccctttctcagtagcacagccctccctttttcctatctagaattaactaatattctaggataaactgatattctaaatttgtttactgttcccacgcgttttaactttagatgcacatacccctaatctattttaatcgtcatgaatttttacatttgctcttgaaatatatccgtgttgaaatgtgcagttctaggttatttttaccattaatctagttttctaatgtgtcagtaaatactttattca

SEQ ID NO: 1952 - protein, 103 aa, Homosapiens [sequence omitted]

SEQ ID NO: 1953 - DNA, 3196 bp, Homosapiens
aatttggttcccgatggcgttccagtacgtatggctttcgctcgagcagttaccttatttaacctcttctaggctgtacccagctctgccttgctttgcttccccctcaccccctgattccatctctgcagcccacgggacatcgggaagatgccagaccaccaggcaggatagtctgcaagggtaaggggaggagcacagcttttctcaggagtgaagaaacggaacatgaaatcatcacggagatttttggaatagtttactagtttttaaggcatgttcagcgtcaattggtccaatcagtaatttttccttttgacaagaaagcttatagaaaaggaaaatgaaaagcaagtagattcagaggggagacaacagacagactagagacagtccgccccgaagcaagaagttggagtagaggagaagggaacttccccagcagcacagggtttgagctaagtgttaggtggtgggttagaattaggtggtgggttttattgtgtgattagaggctagaatgactatgccggtgatgagcagtgtgaaacttttttggaagaaccaagtgaaagaaagagtccacgaattttaagctaggttgttacctggctaaatttgtgatttagaaatgtaggccagtttcacaggggaattttgtgtgtgtgtgtgtgtgtgtgtgtgtgtgtgtgtgtgtgtgtatttaacatatttggccacgcattgttctagtctttggggatattgcccgcccttaggcatttggagattagcagggtcatattgaaaaacttcatacatgcaaagcatatgttcactgttgatccaagtcttatttatcctaccagtaattttggggttacattaatattctaagaaatgtatcaacaaataattatatttattgtttacctatataggaggcactgatctatatctatacctatataggagggcagatcacttgaagtcaggaattcaaaaccagcatggctaacatagtgtgaaaccccgtctctactaacagtacaaaaattagggggggcgtggtagcatgtgcccgtagtcccagctactcgggaggctgaggcagaattgctggaagccaggaggcaaaggttgcagtgagcctagatcacctcactgcactccagcctgggcaacagagcaaaactccgtcgcaaataaaattaaaaaataaactaaaatacactatgccaatgaattctaccttcaggtatacctgactactttttatagactaaaatttttactctggagctatctgctgttattacctttagacttacaaactatttttgcaaatggacatatcatcttgattttatacaatttactttcagtcctttttgctctttttacaaaattctggaagtgcatttgtgttttaatagaaatactgggtggaagtggccataactttctcctgctttcaccctcaccccttttctcccttcaaaatgatctcattttatttctcttgatagcacagattccgcccccccccccccccccagacagagtctcactctgttgcccaggctggagtgcaacggcgagatcttggctcactgcaacctccgcctcccaggttcaagcgattatcttgcctcagtttcccgaatgactggtattacaagtgcctgccaccatgcccagctaatttttgtatttttagtagagatggggtttcaacatgttggccaggctggtctggaactcccgaccttgggcgatccacctgcctcggcctcctaaagtgctaggattacaggtgtgagccaccacgcccggctgatagcacagaatttaacagcttgaaggaatcaaaaagttcagatcactgttattttacaaatagctaaatggatgcaaagcttactttgctcaaatcattagactcagaacaagattccattatgctcttgtttgtttccattataccatatatctctttgtcatctattttctcattagccacgtgtattaatttgacttaatttggagcaaaaatagggctcttttaacttatttatttgtatatttcataatctcttttaaattgttaaaaagttgaatgtgctaaattgtctcctgtctcataaatttttttttttttttttttttttaaagagtagttcagtgctttgcaataattgctgtgtgattctggaccacagcaattcaatctagcaattgttacagcctgctgaagaacgcttgcacagaataattgcctgcttcagattctcccatcctttgggaaactgagagtagctctgggattgaaaagtggaggtttatttaactgtggttagggacttggcaatcatatgtttggtctctgctgttatctagtatctttaagtctagaagttggaagtaaagaggtcagtggacctaagaaaatggcatggctttctaccctagatgagctggaaaaacttagtaattcttcaagtgcttaatacaaaggagcaaatctcacaactcaatgcctatgaattgtaatatatcatgtcactactttcttgatattacctgaggtataagtacagttgggagaagaccttatctctatcttcaggaatataagtgaaggaaaggaaatttttttcttttttttgagacagtcttactctgtcgccaaggctggagtgcagtggcactgtgtcagctcactgcaacctctgtctcctttgttcaagcaattatcctgcctcagcctcctgagtagctgggattacaggtgcccaccaccatgcctggctagtttttatatttttagtagagcctggccaacatgtctctacttaaaatacaaaaaaattagcctggcgtggtagtacgcacctgtaatcccagctacttgggaggcggaggcaggagaattgcttgaacccgggaggcggaggttgcagtgagccgagatcacaccattgtactccagcctgggggacgaaagcgagagttcgtctccaaaaaaaaagttaaaaaagttaattttaatagtgtatcctatttgacagaatatatcaaaaatatagtttcagcatatagtcaatacagaatgtattaaatatcttgtattcttttttcatttcaaatcttcaaaatctggtgtgtattttacacttttatggtatatcaaaataaattttcgtggggaattctt

SEQ ID NO: 1954 - protein, 57 aa, Homosapiens
MAFQYVWLSLEQLPYLTSSRLYPALPCFASPSPPDSISAAHGTSGRCQTTRQDSLQG

SEQ ID NO: 1955 - DNA, 462 bp, Homosapiens
actttcagtaagttgtgaccagtatgtctggacgtggcaagcaaggcggtaaagctcgcgccaaggccaagacccgctcttctcgggctgggcttcagttccccgtgggccgagtgcaccgcctgctccgcaagggtaattatgccgagcgggttggagccggcgcgccagtgtacctggctgcggtgctggagtacctgaccgctgagatcctggagctggctggcaatgcggcccgcgacaacaagaagacccgtatcatcccgcgtcacctccaactggccatccgcaacgacgaggagctcaacaagctgctgggcaaagtcaccatcgcgcagggtggtgtcttgcccaatatccaggccgtgctgctgcctaagaagactgagagccaccataaggccaaataaggagcgaggttgtgaaaactggaaaacaaaggctcttttcagagccattcta

SEQ ID NO: 1956 - protein, 128 aa, Homosapiens; identical to SEQ ID NO: 195

SEQ ID NO: 1957 - DNA, 1966 bp, Homosapiens
aaaggtcctcctgggggagaacagagtcccgaacaccatggccgtctggcttgcccagtggctgggccctctgctcttggtttccctctggggactcttggctccagcctcccttcttaggcgcctgggtgagcacattcagcagtttcaggagagctctgcccagggcctgggcctgagcctggggccaggtgctgcagccctcccaaaagtggggtggctggagcaactgctggaccccttcaacgtgtccgacagacgatccttcctacagattgtcttgcacagcctgggccagaagtgtttaagcttttcccgagcagagacagtggcacagctgaggagcacagaacctcaactgtctggtgtgggtgaccggcagtggttgtatcagacatgtaccgagttcggcttctatgtcacctgtgagaatcccagatgtcctttctcccagctcccagcactgccctcccagctagacctatgtgagcaggtgtttgggctctcagccttgtcagtagcccaggctgtggctcagacgaactcctactacggtggccagacccctggggctaacaaagtgctgtttgttaatggggacacagacccctggcatgtgctaagtgtaacacaggctttaggatcctcagaatcaactcttcttatccgcactggctcccactgcttggacatggcacctgagaggccctcagactcccccagcctccgcctagggcgccagaacatcttccagcagctacagacctggctcaagctggcaaaggagagccagattaagggtgaagtctgaatctcataccctttccactccctgcatggtcacctcagtcctggacatacttgttcactgaacaaaagaaagcagcttgttttgaaagaagaaactcccaggaattggaattcagcacctgttccgcacgtaattggcatgtgtctgcaaacatccttattcccaacttaaagtgctttattgcagagagttatggaaatataagtggatgattattctcattgtaaatattggtattttgaatgttaaatgtcaaacaaatgtgacttatgctggtgccctcgccctgctgatcagattctggttcaaattctgccactccagctcctgggttaggggctttgctgtaagtttctttttctggactttagatcctgaacctgtccttgcttctcagtttctctcactgtacccctttccctcagtctcttcctctctctttcccctgtcactatttgtctttctaatctccttctgtttctctgaatatcttcatttctatctctgtgtttctgtctatttctctgtttatctttctgtccttcaatctgtgtttttgtttctggctctccgtcagtgtctttttctctcctctctctcttgctctgccatggctatttccactgctctatttctgactctcatttttggtctctgtgtgtctcctagtcactttctttctcactctgtctctgtctctatttctgtctctcctctgctgtgtcctcaatctctctgtctccctgaggctctatttctgtctctcctctgctgtgtcctcaatctctctgtctccctgaggctctatttctgtctctgatgctcttcttctgtgtctctatttctcttcctgtcacttaatcttttccttctctatctctcttatttagtcttccttccacacccttcactcaccatcttttcccacaatcaaatatcactccctggtacttccagcttccaactctagggattcatgattctggtggagattccttcttccagggcctgggaggatagggctaatcccaagggtgcctgcttaggctatgttagctgtgacaggaacctgccatagatttgcactgttctttcctaaagatcaattattttcagcaataaatacttctcagctttttgtatgtctttgtatgc

SEQ ID NO: 1958 - protein, 257 aa, Homosapiens
MAVWLAQWLGPLLLVSLWGLLAPASLLRRLGEHIQQFQESSAQGLGLSLGPGAAALPKVGWLEQLLDPFNVSDRRSFLQIVLHSLGQKCLSFSRAETVAQLRSTEPQLSGVGDRQWLYQTCTEFGFYVTCENPRCPFSQLPALPSQLDLCEQVFGLSALSVAQAVAQTNSYYGGQTPGANKVLFVNGDTDPWHVLSVTQALGSSESTLLIRTGSHCLDMAPERPSDSPSLRLGRQNIFQQLQTWLKLAKESQIKGEV

SEQ ID NO: 1959 - DNA, 2115 bp, Homosapiens
aaaggtcctcctgggggagaacagagtcccgaacaccatggccgtctggcttgcccagtggctgggccctctgctcttggtttccctctggggactcttggctccagcctcccttcttaggcgcctgggtgagcacattcagcagtttcaggagagctctgcccagggcctgggcctgagcctggggccaggtgctgcagccctcccaaaagtggggtggctggagcaactgctggaccccttcaacgtgtccgacagacgatccttcctacagattgtcttgcacagcctgggccagaagtgtttaagcttttcccgagcagagacagtggcacagctgaggagcacagaacctcaactgtctggtgtgggtgaccggcagtggttgtatcagacatgtaccgagttcggcttctatgtcacctgtgagaatcccagatgtcctttctcccagctcccagcactgccctcccagctagacctatgtgagcaggtgtttgggctctcagccttgtcagtagcccaggctgtggctcagacgaactcctactacggtggccagacccctggggctaacaaagtgctgtttgttaatggggacacagacccctggcatgtgctaagtgtaacacaggctttaggatcctcagaatcaactcttcttatccgcactggctcccactgcttggacatggcacctgagaggccctcagactcccccagcctccgcctagggcgccagaacatcttccagcagctacagacctggctcaagctggcaaaggagagccagattaagggtgaagtctgaatctcataccctttccactccctgcatggtcacctcagtcctggacatacttgttcactgaacaaaagaaagcagcttgttttgaaagaagaaactcccaggaattggaattcagcacctgttccgcacgtaattggcatgtgtctgcaaacatccttattcccaacttaaagtgctttattgcagagagttatggaaatataagtggatgattattctcattgtaaatattggtattttgaatgttaaatgtcaaacaaatgtgacttatgctggtgccctcgccctgctgatcagattctggttcaaattctgccactccagctcctgggttaggggctttgctgtaagtttctttttctggactttagatcctgaacctgtccttgcttctcagtttctctcactgtacccctttccctcagtctcttcctctctctttcccctgtcactatttgtctttctaatctccttctgtttctctgaatatcttcatttctatctctgtgtttctgtctatttctctgtttatctttctgtccttcaatctgtgtttttgtttctggctctccgtcagtgtctttttctctcctctctctcttgctctgccatggctatttccactgctctatttctgactctcatttttggtctctgtgtgtctcctagtcactttctttctcactctgtctctgtctctatttctgtctctcctctgctgtgtcctcaatctctctgtctccctgaggctctatttctgtctctcctctgctgtgtcctcaatctctctgtctccctgaggctctatttctgtctctgatgctcttcttctgtgtctctatttctcttcctgtcacttaatcttttccttctctatctctcttatttagtcttccttccacacccttcactcaccatcttttcccacaatcaaatatcactccctggtacttccagcttccaactctagggattcatgattctggtggagattccttcttccagggcctgggaggatagggctaatcccaagggtgcctgcttaggctatgttagctgtgacaggaacctgccatagatttgcactgttctttcctaaagatcaattattttcagcaataaatacttctcagctttttgtatgtctttgtatgcacagagatggtagttttagagttttatccagtttcatatttccttgtgggtaagaggcaacctcctcatgctgtcataccaaagtcaatctccactacactttagttctgcctgttcttgatctttatataaatggaaacttgcagtat

SEQ ID NO: 1960 - protein, 257 aa, Homosapiens; identical to SEQ ID NO: 1958

SEQ ID NO: 1961 - DNA, 2709 bp, Homosapiens
ccgaacaccatggccgtctggcttgcccagtggctgggccctctgctcttggtttccctctggggactcttggctccagcctcccttcttaggcgcctgggtgagcacattcagcagtttcaggagagctctgcccagggcctgggcctgagcctggggccaggtgctgcagccctcccaaaagtggggtggctggagcaactgctggaccccttcaacgtgtccgacagacgatccttcctacagcgttactgggtgaatgaccaacattgggttggccaggatggacccatattcctgcatctagggggtgagggcagccttgggcctggctcagtgatgagaggccatcccgcagccttggccccagcctggggcgccctggtgataagcctggaacacagattttatggcctgagtatacctgctggaggcctggaaatggcccagctccgcttcttgtccagccgccttgcgctggctgatgtggtctctgcccgcctggcactttcccgcctctttaacatctcctcctccagcccctggatctgcttcggaggctcctatgccggctccttggccgcctgggcccggctgaagttcccccatctcattttcgcgtcggtcgcctcctccgccccggtgcgggccgtgctggatttctccgagtataatgacgtggtatcccgaagcctaatgagcaccgcgatcggcgggtccctggagtgccgggcggcggtgtccgtcgccttcgctgaagtggagcggcggctgcgctcgggtggggcggctcaagcagcattgcggacggagctgagcgcttgcgggcccctgggccgcgctgaaaaccaggcggagctgttgggggcgctgcaggcactggtgggaggtgtagtgcagtatgatgggcagacgggagcgccgctaagcgtgcgacagctctgcggacttctcctcgggggcgggggcaaccgcagccactccacgccctactgcgggcttcgtcgggcggtgcagattgtcttgcacagcctgggccagaagtgtttaagcttttcccgagcagagacagtggcacagctgaggagcacagaacctcaactgtctggtgtgggtgaccggcagtggttgtatcagacatgtaccgagttcggcttctatgtcacctgtgagaatcccagatgtcctttctcccagctcccagcactgccctcccagctagacctatgtgagcaggtgtttgggctctcagccttgtcagtagcccaggctgtggctcagacgaactcctactacggtggccagacccctggggctaacaaagtgctgtttgttaatggggacacagacccctggcatgtgctaagtgtaacacaggctttaggatcctcagaatcaactcttcttatccgcactggctcccactgcttggacatggcacctgagaggccctcagactcccccagcctccgcctagggcgccagaacatcttccagcagctacagacctggctcaagctggcaaaggagagccagattaagggtgaagtctgaatctcataccctttccactccctgcatggtcacctcagtcctggacatacttgttcactgaacaaaagaaagcagcttgttttgaaagaagaaactcccaggaattggaattcagcacctgttccgcacgtaattggcatgtgtctgcaaacatccttattcccaacttaaagtgctttattgcagagagttatggaaatataagtggatgattattctcattgtaaatattggtattttgaatgttaaatgtcaaacaaatgtgacttatgctggtgccctcgccctgctgatcagattctggttcaaattctgccactccagctcctgggttaggggctttgctgtaagtttctttttctggactttagatcctgaacctgtccttgcttctcagtttctctcactgtacccctttccctcagtctcttcctctctctttcccctgtcactatttgtctttctaatctccttctgtttctctgaatatcttcatttctatctctgtgtttctgtctatttctctgtttatctttctgtccttcaatctgtgtttttgtttctggctctccgtcagtgtctttttctctcctctctctcttgctctgccatggctatttccactgctctatttctgactctcatttttggtctctgtgtgtctcctagtcactttctttctcactctgtctctgtctctatttctgtctctcctctgctgtgtcctcaatctctctgtctccctgaggctctatttctgtctctcctctgctgtgtcctcaatctctctgtctccctgaggctctatttctgtctctgatgctcttcttctgtgtctctatttctcttcctgtcacttaatcttttccttctctatctctcttatttagtcttccttccacacccttcactcaccatcttttcccacaatcaaatatcactccctggtacttccagcttccaactctagggattcatgattctggtggagattccttcttccagggcctgggaggatagggctaatcccaagggtgcctgcttaggctatgttagctgtgacaggaacctgccatagatttgcactgttctttcctaaagatcaattattttcagcaataaatacttctcagctttttgtatgtctttgtatgc

SEQ ID NO: 1962 - protein, 514 aa, Homosapiens; identical to SEQ ID NO: 197

SEQ ID NO: 1963 - DNA, 2858 bp, Homosapiens
ccgaacaccatggccgtctggcttgcccagtggctgggccctctgctcttggtttccctctggggactcttggctccagcctcccttcttaggcgcctgggtgagcacattcagcagtttcaggagagctctgcccagggcctgggcctgagcctggggccaggtgctgcagccctcccaaaagtggggtggctggagcaactgctggaccccttcaacgtgtccgacagacgatccttcctacagcgttactgggtgaatgaccaacattgggttggccaggatggacccatattcctgcatctagggggtgagggcagccttgggcctggctcagtgatgagaggccatcccgcagccttggccccagcctggggcgccctggtgataagcctggaacacagattttatggcctgagtatacctgctggaggcctggaaatggcccagctccgcttcttgtccagccgccttgcgctggctgatgtggtctctgcccgcctggcactttcccgcctctttaacatctcctcctccagcccctggatctgcttcggaggctcctatgccggctccttggccgcctgggcccggctgaagttcccccatctcattttcgcgtcggtcgcctcctccgccccggtgcgggccgtgctggatttctccgagtataatgacgtggtatcccgaagcctaatgagcaccgcgatcggcgggtccctggagtgccgggcggcggtgtccgtcgccttcgctgaagtggagcggcggctgcgctcgggtggggcggctcaagcagcattgcggacggagctgagcgcttgcgggcccctgggccgcgctgaaaaccaggcggagctgttgggggcgctgcaggcactggtgggaggtgtagtgcagtatgatgggcagacgggagcgccgctaagcgtgcgacagctctgcggacttctcctcgggggcgggggcaaccgcagccactccacgccctactgcgggcttcgtcgggcggtgcagattgtcttgcacagcctgggccagaagtgtttaagcttttcccgagcagagacagtggcacagctgaggagcacagaacctcaactgtctggtgtgggtgaccggcagtggttgtatcagacatgtaccgagttcggcttctatgtcacctgtgagaatcccagatgtcctttctcccagctcccagcactgccctcccagctagacctatgtgagcaggtgtttgggctctcagccttgtcagtagcccaggctgtggctcagacgaactcctactacggtggccagacccctggggctaacaaagtgctgtttgttaatggggacacagacccctggcatgtgctaagtgtaacacaggctttaggatcctcagaatcaactcttcttatccgcactggctcccactgcttggacatggcacctgagaggccctcagactcccccagcctccgcctagggcgccagaacatcttccagcagctacagacctggctcaagctggcaaaggagagccagattaagggtgaagtctgaatctcataccctttccactccctgcatggtcacctcagtcctggacatacttgttcactgaacaaaagaaagcagcttgttttgaaagaagaaactcccaggaattggaattcagcacctgttccgcacgtaattggcatgtgtctgcaaacatccttattcccaacttaaagtgctttattgcagagagttatggaaatataagtggatgattattctcattgtaaatattggtattttgaatgttaaatgtcaaacaaatgtgacttatgctggtgccctcgccctgctgatcagattctggttcaaattctgccactccagctcctgggttaggggctttgctgtaagtttctttttctggactttagatcctgaacctgtccttgcttctcagtttctctcactgtacccctttccctcagtctcttcctctctctttcccctgtcactatttgtctttctaatctccttctgtttctctgaatatcttcatttctatctctgtgtttctgtctatttctctgtttatctttctgtccttcaatctgtgtttttgtttctggctctccgtcagtgtctttttctctcctctctctcttgctctgccatggctatttccactgctctatttctgactctcatttttggtctctgtgtgtctcctagtcactttctttctcactctgtctctgtctctatttctgtctctcctctgctgtgtcctcaatctctctgtctccctgaggctctatttctgtctctcctctgctgtgtcctcaatctctctgtctccctgaggctctatttctgtctctgatgctcttcttctgtgtctctatttctcttcctgtcacttaatcttttccttctctatctctcttatttagtcttccttccacacccttcactcaccatcttttcccacaatcaaatatcactccctggtacttccagcttccaactctagggattcatgattctggtggagattccttcttccagggcctgggaggatagggctaatcccaagggtgcctgcttaggctatgttagctgtgacaggaacctgccatagatttgcactgttctttcctaaagatcaattattttcagcaataaatacttctcagctttttgtatgtctttgtatgcacagagatggtagttttagagttttatccagtttcatatttccttgtgggtaagaggcaacctcctcatgctgtcataccaaagtcaatctccactacactttagttctgcctgttcttgatctttatataaatggaaacttgcagtat

SEQ ID NO: 1964 - protein, 514 aa, Homosapiens; identical to SEQ ID NO: 197

SEQ ID NO: 1965 - DNA, 1564 bp, Homosapiens
ctcctccgccccggtgcgggccgtgctggatttctccgagtataatgacgtaaggatggcgggcagcaggtgcgggacggggaggggtcccagcgggcggagtcccttgacacttccggataccttcctctgcggtccgcccacaggtggtatcccgaagcctaatgagcaccgcgatcggcgggtccctggaggggacacagacccctggcatgtgctaagtgtaacacaggctttaggatcctcagaatcaactcttcttatccgcactggctcccactgcttggacatggcacctgagaggccctcagactcccccagcctccgcctagggcgccagaacatcttccagcagctacagacctggctcaagctggcaaaggagagccagattaagggtgaagtctgaatctcataccctttccactccctgcatggtcacctcagtcctggacatacttgttcactgaacaaaagaaagcagcttgttttgaaagaagaaactcccaggaattggaattcagcacctgttccgcacgtaattggcatgtgtctgcaaacatccttattcccaacttaaagtgctttattgcagagagttatggaaatataagtggatgattattctcattgtaaatattggtattttgaatgttaaatgtcaaacaaatgtgacttatgctggtgccctcgccctgctgatcagattctggttcaaattctgccactccagctcctgggttaggggctttgctgtaagtttctttttctggactttagatcctgaacctgtccttgcttctcagtttctctcactgtacccctttccctcagtctcttcctctctctttcccctgtcactatttgtctttctaatctccttctgtttctctgaatatcttcatttctatctctgtgtttctgtctatttctctgtttatctttctgtccttcaatctgtgtttttgtttctggctctccgtcagtgtctttttctctcctctctctcttgctctgccatggctatttccactgctctatttctgactctcatttttggtctctgtgtgtctcctagtcactttctttctcactctgtctctgtctctatttctgtctctcctctgctgtgtcctcaatctctctgtctccctgaggctctatttctgtctctcctctgctgtgtcctcaatctctctgtctccctgaggctctatttctgtctctgatgctcttcttctgtgtctctatttctcttcctgtcacttaatcttttccttctctatctctcttatttagtcttccttccacacccttcactcaccatcttttcccacaatcaaatatcactccctggtacttccagcttccaactctagggattcatgattctggtggagattccttcttccagggcctgggaggatagggctaatcccaagggtgcctgcttaggctatgttagctgtgacaggaacctgccatagatttgcactgttctttcctaaagatcaattattttcagcaataaatacttctcagctttttgtatgtctttgtatgc

SEQ ID NO: 1966 - protein, 117 aa, Homosapiens
MAGSRCGTGRGPSGRSPLTLPDTFLCGPPTGGIPKPNEHRDRRVPGGDTDPWHVLSVTQALGSSESTLLIRTGSHCLDMAPERPSDSPSLRLGRQNIFQQLQTWLKLAKESQIKGEV

SEQ ID NO: 1967 - DNA, 1713 bp, Homosapiens
ctcctccgccccggtgcgggccgtgctggatttctccgagtataatgacgtaaggatggcgggcagcaggtgcgggacggggaggggtcccagcgggcggagtcccttgacacttccggataccttcctctgcggtccgcccacaggtggtatcccgaagcctaatgagcaccgcgatcggcgggtccctggaggggacacagacccctggcatgtgctaagtgtaacacaggctttaggatcctcagaatcaactcttcttatccgcactggctcccactgcttggacatggcacctgagaggccctcagactcccccagcctccgcctagggcgccagaacatcttccagcagctacagacctggctcaagctggcaaaggagagccagattaagggtgaagtctgaatctcataccctttccactccctgcatggtcacctcagtcctggacatacttgttcactgaacaaaagaaagcagcttgttttgaaagaagaaactcccaggaattggaattcagcacctgttccgcacgtaattggcatgtgtctgcaaacatccttattcccaacttaaagtgctttattgcagagagttatggaaatataagtggatgattattctcattgtaaatattggtattttgaatgttaaatgtcaaacaaatgtgacttatgctggtgccctcgccctgctgatcagattctggttcaaattctgccactccagctcctgggttaggggctttgctgtaagtttctttttctggactttagatcctgaacctgtccttgcttctcagtttctctcactgtacccctttccctcagtctcttcctctctctttcccctgtcactatttgtctttctaatctccttctgtttctctgaatatcttcatttctatctctgtgtttctgtctatttctctgtttatctttctgtccttcaatctgtgtttttgtttctggctctccgtcagtgtctttttctctcctctctctcttgctctgccatggctatttccactgctctatttctgactctcatttttggtctctgtgtgtctcctagtcactttctttctcactctgtctctgtctctatttctgtctctcctctgctgtgtcctcaatctctctgtctccctgaggctctatttctgtctctcctctgctgtgtcctcaatctctctgtctccctgaggctctatttctgtctctgatgctcttcttctgtgtctctatttctcttcctgtcacttaatcttttccttctctatctctcttatttagtcttccttccacacccttcactcaccatcttttcccacaatcaaatatcactccctggtacttccagcttccaactctagggattcatgattctggtggagattccttcttccagggcctgggaggatagggctaatcccaagggtgcctgcttaggctatgttagctgtgacaggaacctgccatagatttgcactgttctttcctaaagatcaattattttcagcaataaatacttctcagctttttgtatgtctttgtatgcacagagatggtagttttagagttttatccagtttcatatttccttgtgggtaagaggcaacctcctcatgctgtcataccaaagtcaatctccactacactttagttctgcctgttcttgatctttatataaatggaaacttgcagtat

SEQ ID NO: 1968 - protein, 117 aa, Homosapiens; identical to SEQ ID NO: 1966

SEQ ID NO: 1969 - DNA, 1550 bp, Homosapiens
agggaagaggaggccagagaagggcgaaacctgcaacgtggcggggtctaaggaaggtcggagctcgggggaatacgcaggttttggaagaaggcgggagctgacgaagaggaggggcaccaggaaaagaggcgctccccagagagggcggggtttgggcagggacaatcctatccggaggggacacagacccctggcatgtgctaagtgtaacacaggctttaggatcctcagaatcaactcttcttatccgcactggctcccactgcttggacatggcacctgagaggccctcagactcccccagcctccgcctagggcgccagaacatcttccagcagctacagacctggctcaagctggcaaaggagagccagattaagggtgaagtctgaatctcataccctttccactccctgcatggtcacctcagtcctggacatacttgttcactgaacaaaagaaagcagcttgttttgaaagaagaaactcccaggaattggaattcagcacctgttccgcacgtaattggcatgtgtctgcaaacatccttattcccaacttaaagtgctttattgcagagagttatggaaatataagtggatgattattctcattgtaaatattggtattttgaatgttaaatgtcaaacaaatgtgacttatgctggtgccctcgccctgctgatcagattctggttcaaattctgccactccagctcctgggttaggggctttgctgtaagtttctttttctggactttagatcctgaacctgtccttgcttctcagtttctctcactgtacccctttccctcagtctcttcctctctctttcccctgtcactatttgtctttctaatctccttctgtttctctgaatatcttcatttctatctctgtgtttctgtctatttctctgtttatctttctgtccttcaatctgtgtttttgtttctggctctccgtcagtgtctttttctctcctctctctcttgctctgccatggctatttccactgctctatttctgactctcatttttggtctctgtgtgtctcctagtcactttctttctcactctgtctctgtctctatttctgtctctcctctgctgtgtcctcaatctctctgtctccctgaggctctatttctgtctctcctctgctgtgtcctcaatctctctgtctccctgaggctctatttctgtctctgatgctcttcttctgtgtctctatttctcttcctgtcacttaatcttttccttctctatctctcttatttagtcttccttccacacccttcactcaccatcttttcccacaatcaaatatcactccctggtacttccagcttccaactctagggattcatgattctggtggagattccttcttccagggcctgggaggatagggctaatcccaagggtgcctgcttaggctatgttagctgtgacaggaacctgccatagatttgcactgttctttcctaaagatcaattattttcagcaataaatacttctcagctttttgtatgtctttgtatgc

SEQ ID NO: 1970 - protein, 39 aa, Homosapiens
MAPERPSDSPSLRLGRQNIFQQLQTWLKLAKESQIKGEV

SEQ ID NO: 1971 - DNA, 1699 bp, Homosapiens
agggaagaggaggccagagaagggcgaaacctgcaacgtggcggggtctaaggaaggtcggagctcgggggaatacgcaggttttggaagaaggcgggagctgacgaagaggaggggcaccaggaaaagaggcgctccccagagagggcggggtttgggcagggacaatcctatccggaggggacacagacccctggcatgtgctaagtgtaacacaggctttaggatcctcagaatcaactcttcttatccgcactggctcccactgcttggacatggcacctgagaggccctcagactcccccagcctccgcctagggcgccagaacatcttccagcagctacagacctggctcaagctggcaaaggagagccagattaagggtgaagtctgaatctcataccctttccactccctgcatggtcacctcagtcctggacatacttgttcactgaacaaaagaaagcagcttgttttgaaagaagaaactcccaggaattggaattcagcacctgttccgcacgtaattggcatgtgtctgcaaacatccttattcccaacttaaagtgctttattgcagagagttatggaaatataagtggatgattattctcattgtaaatattggtattttgaatgttaaatgtcaaacaaatgtgacttatgctggtgccctcgccctgctgatcagattctggttcaaattctgccactccagctcctgggttaggggctttgctgtaagtttctttttctggactttagatcctgaacctgtccttgcttctcagtttctctcactgtacccctttccctcagtctcttcctctctctttcccctgtcactatttgtctttctaatctccttctgtttctctgaatatcttcatttctatctctgtgtttctgtctatttctctgtttatctttctgtccttcaatctgtgtttttgtttctggctctccgtcagtgtctttttctctcctctctctcttgctctgccatggctatttccactgctctatttctgactctcatttttggtctctgtgtgtctcctagtcactttctttctcactctgtctctgtctctatttctgtctctcctctgctgtgtcctcaatctctctgtctccctgaggctctatttctgtctctcctctgctgtgtcctcaatctctctgtctccctgaggctctatttctgtctctgatgctcttcttctgtgtctctatttctcttcctgtcacttaatcttttccttctctatctctcttatttagtcttccttccacacccttcactcaccatcttttcccacaatcaaatatcactccctggtacttccagcttccaactctagggattcatgattctggtggagattccttcttccagggcctgggaggatagggctaatcccaagggtgcctgcttaggctatgttagctgtgacaggaacctgccatagatttgcactgttctttcctaaagatcaattattttcagcaataaatacttctcagctttttgtatgtctttgtatgcacagagatggtagttttagagttttatccagtttcatatttccttgtgggtaagaggcaacctcctcatgctgtcataccaaagtcaatctccactacactttagttctgcctgttcttgatctttatataaatggaaacttgcagtat

SEQ ID NO: 1972 - protein, 39 aa, Homosapiens; identical to SEQ ID NO: 1970

SEQ ID NO: 1973 - DNA, 1029 bp, Homosapiens
tgcaccctctgagtcccgctaggggaaagtggggaacccaaggaggacgcaggtcctgggtagggaaagccgaggcccagcctaagtcttggcggacatcgcctcttgcttcccacagtgccgggcggcggtgtccgtcgccttcgctgaagtggagcggcggctgcgctcgggtggggcggctcaagcagcattgcggacggagctgagcgcttgcgggcccctgggccgcgctgaaaaccaggcggagctgttgggggcgctgcaggcactggtgggaggtgtagtgcagtatgatgggcagacgggagcgccgctaagcgtgcgacagctctgcggacttctcctcgggggcgggggcaaccgcagccactccacgccctactgcgggcttcgtcgggcggtgcagatgtcacctgtgagaatcccagatgtcctttctcccagctcccagcactgccctcccagctagacctatgtgagcaggtgtttgggctctcagccttgtcagtagcccaggctgtggctcagacgaactcctactacggtggccagacccctggggctaacaaagtgctgtttgttaatggggacacagacccctggcatgtgctaagtgtaacacaggctttaggatcctcagaatcaactcttcttatccgcactggctcccactgcttggacatggcacctgagaggccctcagactcccccagcctccgcctagggcgccagaacatcttccagcagctacagacctggctcaagctggcaaaggagagccagattaagggtgaagtctgaatctcataccctttccactccctgcatggtcacctcagtcctggacatacttgttcactgaacaaaagaaagcagcttgttttgaaagaagaaactcccaggaattggaattcagcacctgttccgcacgtaattggcatgtgtctgcaaacatccttattcccaacttaaagtgctttattgcagagagttatggaaatataagtggatgattattctcattgt

SEQ ID NO: 1974 - protein, 39 aa, Homosapiens; identical to SEQ ID NO: 1970

SEQ ID NO: 1975 - DNA, 1959 bp, Homosapiens
tgcaccctctgagtcccgctaggggaaagtggggaacccaaggaggacgcaggtcctgggtagggaaagccgaggcccagcctaagtcttggcggacatcgcctcttgcttcccacagtgccgggcggcggtgtccgtcgccttcgctgaagtggagcggcggctgcgctcgggtggggcggctcaagcagcattgcggacggagctgagcgcttgcgggcccctgggccgcgctgaaaaccaggcggagctgttgggggcgctgcaggcactggtgggaggtgtagtgcagtatgatgggcagacgggagcgccgctaagcgtgcgacagctctgcggacttctcctcgggggcgggggcaaccgcagccactccacgccctactgcgggcttcgtcgggcggtgcagatgtcacctgtgagaatcccagatgtcctttctcccagctcccagcactgccctcccagctagacctatgtgagcaggtgtttgggctctcagccttgtcagtagcccaggctgtggctcagacgaactcctactacggtggccagacccctggggctaacaaagtgctgtttgttaatggggacacagacccctggcatgtgctaagtgtaacacaggctttaggatcctcagaatcaactcttcttatccgcactggctcccactgcttggacatggcacctgagaggccctcagactcccccagcctccgcctagggcgccagaacatcttccagcagctacagacctggctcaagctggcaaaggagagccagattaagggtgaagtctgaatctcataccctttccactccctgcatggtcacctcagtcctggacatacttgttcactgaacaaaagaaagcagcttgttttgaaagaagaaactcccaggaattggaattcagcacctgttccgcacgtaattggcatgtgtctgcaaacatccttattcccaacttaaagtgctttattgcagagagttatggaaatataagtggatgattattctcattgtaaatattggtattttgaatgttaaatgtcaaacaaatgtgacttatgctggtgccctcgccctgctgatcagattctggttcaaattctgccactccagctcctgggttaggggctttgctgtaagtttctttttctggactttagatcctgaacctgtccttgcttctcagtttctctcactgtacccctttccctcagtctcttcctctctctttcccctgtcactatttgtctttctaatctccttctgtttctctgaatatcttcatttctatctctgtgtttctgtctatttctctgtttatctttctgtccttcaatctgtgtttttgtttctggctctccgtcagtgtctttttctctcctctctctcttgctctgccatggctatttccactgctctatttctgactctcatttttggtctctgtgtgtctcctagtcactttctttctcactctgtctctgtctctatttctgtctctcctctgctgtgtcctcaatctctctgtctccctgaggctctatttctgtctctcctctgctgtgtcctcaatctctctgtctccctgaggctctatttctgtctctgatgctcttcttctgtgtctctatttctcttcctgtcacttaatcttttccttctctatctctcttatttagtcttccttccacacccttcactcaccatcttttcccacaatcaaatatcactccctggtacttccagcttccaactctagggattcatgattctggtggagattccttcttccagggcctgggaggatagggctaatcccaagggtgcctgcttaggctatgttagctgtgacaggaacctgccatagatttgcactgttctttcctaaagatcaattattttcagcaataaatacttctcagctttttgtatgtctttgtatgc

SEQ ID NO: 1976 - protein, 39 aa, Homosapiens; identical to SEQ ID NO: 1970

SEQ ID NO: 1977 - DNA, 2108 bp, Homosapiens
tgcaccctctgagtcccgctaggggaaagtggggaacccaaggaggacgcaggtcctgggtagggaaagccgaggcccagcctaagtcttggcggacatcgcctcttgcttcccacagtgccgggcggcggtgtccgtcgccttcgctgaagtggagcggcggctgcgctcgggtggggcggctcaagcagcattgcggacggagctgagcgcttgcgggcccctgggccgcgctgaaaaccaggcggagctgttgggggcgctgcaggcactggtgggaggtgtagtgcagtatgatgggcagacgggagcgccgctaagcgtgcgacagctctgcggacttctcctcgggggcgggggcaaccgcagccactccacgccctactgcgggcttcgtcgggcggtgcagatgtcacctgtgagaatcccagatgtcctttctcccagctcccagcactgccctcccagctagacctatgtgagcaggtgtttgggctctcagccttgtcagtagcccaggctgtggctcagacgaactcctactacggtggccagacccctggggctaacaaagtgctgtttgttaatggggacacagacccctggcatgtgctaagtgtaacacaggctttaggatcctcagaatcaactcttcttatccgcactggctcccactgcttggacatggcacctgagaggccctcagactcccccagcctccgcctagggcgccagaacatcttccagcagctacagacctggctcaagctggcaaaggagagccagattaagggtgaagtctgaatctcataccctttccactccctgcatggtcacctcagtcctggacatacttgttcactgaacaaaagaaagcagcttgttttgaaagaagaaactcccaggaattggaattcagcacctgttccgcacgtaattggcatgtgtctgcaaacatccttattcccaacttaaagtgctttattgcagagagttatggaaatataagtggatgattattctcattgtaaatattggtattttgaatgttaaatgtcaaacaaatgtgacttatgctggtgccctcgccctgctgatcagattctggttcaaattctgccactccagctcctgggttaggggctttgctgtaagtttctttttctggactttagatcctgaacctgtccttgcttctcagtttctctcactgtacccctttccctcagtctcttcctctctctttcccctgtcactatttgtctttctaatctccttctgtttctctgaatatcttcatttctatctctgtgtttctgtctatttctctgtttatctttctgtccttcaatctgtgtttttgtttctggctctccgtcagtgtctttttctctcctctctctcttgctctgccatggctatttccactgctctatttctgactctcatttttggtctctgtgtgtctcctagtcactttctttctcactctgtctctgtctctatttctgtctctcctctgctgtgtcctcaatctctctgtctccctgaggctctatttctgtctctcctctgctgtgtcctcaatctctctgtctccctgaggctctatttctgtctctgatgctcttcttctgtgtctctatttctcttcctgtcacttaatcttttccttctctatctctcttatttagtcttccttccacacccttcactcaccatcttttcccacaatcaaatatcactccctggtacttccagcttccaactctagggattcatgattctggtggagattccttcttccagggcctgggaggatagggctaatcccaagggtgcctgcttaggctatgttagctgtgacaggaacctgccatagatttgcactgttctttcctaaagatcaattattttcagcaataaatacttctcagctttttgtatgtctttgtatgcacagagatggtagttttagagttttatccagtttcatatttccttgtgggtaagaggcaacctcctcatgctgtcataccaaagtcaatctccactacactttagttctgcctgttcttgatctttatataaatggaaacttgcagtat

SEQ ID NO: 1978 - protein, 39 aa, Homosapiens; identical to SEQ ID NO: 1970

SEQ ID NO: 1979 - DNA, 3360 bp, Homosapiens
gaacctcaactgtctggtgtgggtgaccggcagtggttgtatcagacatgtaccgagttcggcttctgtaagtgactggcctaaccctaactttgtcccctcaaacaacctttttactatgcccagagaagtcatcttacaggtggtctggactcatttcgacccagctctcaggcactgtgtaacctgcagatgttgggctggagaaggtggaagccatactagtgtatgcatgtgcttggccctcacatgcctcctcacgcacacactgaggtctccacttgagtgatcttcccttcagcctattctttctctgtgtccccattccagggatggccccctttccccatccaccagactagaaacttgagccttgttttagttgcttccttcccattttctagctagcctgtcaattactgagtcctcctcactctgcatggacaactctgtagtccatcccttgtgctttctatgcctacctctgctgtcctgctgggaacctccattctttcttgccgggatcccttcccagccgcttctctggtctcatggttttcacttcctctgtacaatccaactttttcatagcatccacagagatccttgtaaatataaccttgtccctcctgtactcaaaaccacagctcctcaaagaccccagggtagtgttgccagatacaatacaggatgcccagttaaatttgaatttcagatatacaacagatttttttttagtataagcatgtcccaaatactacatatggtaaattaaatgttcaaattccagctccattttctactcgtaatcttgggcaaacttgggcaagtgacttacttctctatgcctgtttccacatctataaaatgggaatacaagcaatatttctctcatagggttgtttcaaggactaaaggaggtaatatttgtagcattctaagaataatgcaggtctacagtaagtattccataaacctcttgctattgttattattataaggctttacatattttaaccctcttaatacattagtcttcctaacatcttaggaactttgtacatgctgttcactttgcttggattattcatcttcaagtctcaatagggtggcctccctcaggaagccatgatccctcaagataagtcagccttgccacctccgacttcgatagctctgtgttctccttagcattttacacagcctgtcataatacattttttattgcctgtcttcccctctggactgagtcctgtgacagcagagcctggagctgtcttggttgccaccatgtgcccaacattgtacaacatttatctgagcacctggtaggtggtcaacaaatagggagggaagggatgaattaatctgatgttacagaagttatctttaccctgaaagcacagtgagctatgggttttaagcagggcagacataatacaatttgagctccgagcattccagacctttgcacgtgctatttcttctatttactatgccttccttctctatctttgtttggctcagttctactaatttctcaaggtcttatcctttgcaggatgctttccctgagcccatcatgtttcctctgggatccctgccttgtggcctttttccatcacagccctgatcactgtgggctatcactgtcaggggactgtgtgagtctgtctgccaggactgtaaactcctcgaagggagtattagaaatgttctggtcatcactgaggaaagctttgaaaatgattattgaaggagagtggtgggctgcctgtatacccacacttacaggtatctccctacacagatgtcacctgtgagaatcccagatgtcctttctcccagctcccagcactgccctcccagctagacctatgtgagcaggtgtttgggctctcagccttgtcagtagcccaggctgtggctcagacgaactcctactacggtggccagacccctggggctaacaaagtgctgtttgttaatggggacacagacccctggcatgtgctaagtgtaacacaggctttaggatcctcagaatcaactcttcttatccgcactggctcccactgcttggacatggcacctgagaggccctcagactcccccagcctccgcctagggcgccagaacatcttccagcagctacagacctggctcaagctggcaaaggagagccagattaagggtgaagtctgaatctcataccctttccactccctgcatggtcacctcagtcctggacatacttgttcactgaacaaaagaaagcagcttgttttgaaagaagaaactcccaggaattggaattcagcacctgttccgcacgtaattggcatgtgtctgcaaacatccttattcccaacttaaagtgctttattgcagagagttatggaaatataagtggatgattattctcattgtaaatattggtattttgaatgttaaatgtcaaacaaatgtgacttatgctggtgccctcgccctgctgatcagattctggttcaaattctgccactccagctcctgggttaggggctttgctgtaagtttctttttctggactttagatcctgaacctgtccttgcttctcagtttctctcactgtacccctttccctcagtctcttcctctctctttcccctgtcactatttgtctttctaatctccttctgtttctctgaatatcttcatttctatctctgtgtttctgtctatttctctgtttatctttctgtccttcaatctgtgtttttgtttctggctctccgtcagtgtctttttctctcctctctctcttgctctgccatggctatttccactgctctatttctgactctcatttttggtctctgtgtgtctcctagtcactttctttctcactctgtctctgtctctatttctgtctctcctctgctgtgtcctcaatctctctgtctccctgaggctctatttctgtctctcctctgctgtgtcctcaatctctctgtctccctgaggctctatttctgtctctgatgctcttcttctgtgtctctatttctcttcctgtcacttaatcttttccttctctatctctcttatttagtcttccttccacacccttcactcaccatcttttcccacaatcaaatatcactccctggtacttccagcttccaactctagggattcatgattctggtggagattccttcttccagggcctgggaggatagggctaatcccaagggtgcctgcttaggctatgttagctgtgacaggaacctgccatagatttgcactgttctttcctaaagatcaattattttcagcaataaatacttctcagctttttgtatgtctttgtatgc

SEQ ID NO: 1980 - protein, 39 aa, Homosapiens; identical to SEQ ID NO: 1970

SEQ ID NO: 1981 - DNA, 3514 bp, Homosapiens
gaacctcaactgtctggtgtgggtgaccggcagtggttgtatcagacatgtaccgagttcggcttctgtaagtgactggcctaaccctaactttgtcccctcaaacaacctttttactatgcccagagaagtcatcttacaggtggtctggactcatttcgacccagctctcaggcactgtgtaacctgcagatgttgggctggagaaggtggaagccatactagtgtatgcatgtgcttggccctcacatgcctcctcacgcacacactgaggtctccacttgagtgatcttcccttcagcctattctttctctgtgtccccattccagggatggccccctttccccatccaccagactagaaacttgagccttgttttagttgcttccttcccattttctagctagcctgtcaattactgagtcctcctcactctgcatggacaactctgtagtccatcccttgtgctttctatgcctacctctgctgtcctgctgggaacctccattctttcttgccgggatcccttcccagccgcttctctggtctcatggttttcacttcctctgtacaatccaactttttcatagcatccacagagatccttgtaaatataaccttgtccctcctgtactcaaaaccacagctcctcaaagaccccagggtagtgttgccagatacaatacaggatgcccagttaaatttgaatttcagatatacaacagatttttttttagtataagcatgtcccaaatactacatatggtaaattaaatgttcaaattccagctccattttctactcgtaatcttgggcaaacttgggcaagtgacttacttctctatgcctgtttccacatctataaaatgggaatacaagcaatatttctctcatagggttgtttcaaggactaaaggaggtaatatttgtagcattctaagaataatgcaggtctacagtaagtattccataaacctcttgctattgttattattataaggctttacatattttaaccctcttaatacattagtcttcctaacatcttaggaactttgtacatgctgttcactttgcttggattattcatcttcaagtctcaatagggtggcctccctcaggaagccatgatccctcaagataagtcagccttgccacctccgacttcgatagctctgtgttctccttagcattttacacagcctgtcataatacattttttattgcctgtcttcccctctggactgagtcctgtgacagcagagcctggagctgtcttggttgccaccatgtgcccaacattgtacaacatttatctgagcacctggtaggtggtcaacaaatagggagggaagggatgaattaatctgatgttacagaagttatctttaccctgaaagcacagtgagctatgggttttaagcagggcagacataatacaatttgagctccgagcattccagacctttgcacgtgctatttcttctatttactatgccttccttctctatctttgtttggctcagttctactaatttctcaaggtcttatcctttgcaggatgctttccctgagcccatcatgtttcctctgggatccctgccttgtggcctttttccatcacagccctgatcactgtgggctatcactgtcaggggactgtgtgagtctgtctgccaggactgtaaactcctcgaagggagtattagaaatgttctggtcatcactgaggaaagctttgaaaatgattattgaaggagagtggtgggctgcctgtatacccacacttacaggtatctccctacacagatgtcacctgtgagaatcccagatgtcctttctcccagctcccagcactgccctcccagctagacctatgtgagcaggtgtttgggctctcagccttgtcagtagcccaggctgtggctcagacgaactcctactacggtggccagacccctggggctaacaaagtgctgtttgttaatggggacacagacccctggcatgtgctaagtgtaacacaggctttaggatcctcagaatcaactcttcttatccgcactggctcccactgcttggacatggcacctgagaggccctcagactcccccagcctccgcctagggcgccagaacatcttccagcagctacagacctggctcaagctggcaaaggagagccagattaagggtgaagtctgaatctcataccctttccactccctgcatggtcacctcagtcctggacatacttgttcactgaacaaaagaaagcagcttgttttgaaagaagaaactcccaggaattggaattcagcacctgttccgcacgtaattggcatgtgtctgcaaacatccttattcccaacttaaagtgctttattgcagagagttatggaaatataagtggatgattattctcattgtaaatattggtattttgaatgttaaatgtcaaacaaatgtgacttatgctggtgccctcgccctgctgatcagattctggttcaaattctgccactccagctcctgggttaggggctttgctgtaagtttctttttctggactttagatcctgaacctgtccttgcttctcagtttctctcactgtacccctttccctcagtctcttcctctctctttcccctgtcactatttgtctttctaatctccttctgtttctctgaatatcttcatttctatctctgtgtttctgtctatttctctgtttatctttctgtccttcaatctgtgtttttgtttctggctctccgtcagtgtctttttctctcctctctctcttgctctgccatggctatttccactgctctatttctgactctcatttttggtctctgtgtgtctcctagtcactttctttctcactctgtctctgtctctatttctgtctctcctctgctgtgtcctcaatctctctgtctccctgaggctctatttctgtctctcctctgctgtgtcctcaatctctctgtctccctgaggctctatttctgtctctgatgctcttcttctgtgtctctatttctcttcctgtcacttaatcttttccttctctatctctcttatttagtcttccttccacacccttcactcaccatcttttcccacaatcaaatatcactccctggtacttccagcttccaactctagggattcatgattctggtggagattccttcttccagggcctgggaggatagggctaatcccaagggtgcctgcttaggctatgttagctgtgacaggaacctgccatagatttgcactgttctttcctaaagatcaattattttcagcaataaatacttctcagctttttgtatgtctttgtatgcacagagatggtagttttagagttttatccagtttcatatttccttgtgggtaagaggcaacctcctcatgctgtcataccaaagtcaatctccactacactttagttctgcctgttcttgatctttatataaatggaaacttgcagtatatatt

SEQ ID NO: 1982 - protein, 39 aa, Homosapiens; identical to SEQ ID NO: 1970

SEQ ID NO: 1983 - DNA, 462 bp, Homosapiens
aaaaaggaaaaaagttgtcatcggccttcctctccagtcccactggtatcagattttgagtccctaggaggatctgaaagttctgggcagcaaaaccagaagattccacagctgccgtctagccctgagaacctggtgtcagagatcccacctccccagcttggttatgcagtctctgatgagaacttgactttggggaagaaagctgagctacagcatttcccgggtatctggaaggtgctcaacagtgagatggtgctcttcctccaaatctgttgacatgacaggacagtgccgcttatgaatctctgacaaatagcaaagtggaaaattcctgctcttggcagctaaaacttggattgatcacaatatttcaggaaacagagaagaaagacagtatttcccagttagcaagatcttgagtcttatgatttttttctgacattaaatctgcagcataaa

SEQ ID NO: 1984 - protein, 45 aa, Homosapiens
QDSAAYESLTNSKVENSCSWQLKLGLITIFQETEKKDSISQLARS

SEQ ID NO: 1985 - DNA, 1203 bp, Homosapiens
cagtgattgctaaactttcatatgtggaatatatttatgctgctgtttaggctgtgctggcttcaatcaaaagatccaagaaaaccatgaatattttgtattcaagtgacacaacactgggaatcttacctgtctttcaaagtggcattgggctcatggggaacttattgctattcattacatatatgtacatcttcttattttggccccatcagaagaaccccttagatgtgattctcatgcacctaactttggctaatgttataacagttatcatcaggggtgttccatatataatgtcatccttcagacttagaagtacttttgttgatactggttgtaaaacagggctatacatttataaaatgacatggggcatttgtgtatgtacttcttctctcctgagtacatttcaggctgttatcatctgtccttgtcattccaagtgggcatggctcaaacctcaaatctccccataaattttcccttattgatttattcctaaacaacaggctaatcaatatgtgggtcattataagcaccgtagccaccagcaaatccactaatgttggacttgtatattctctgatatactgtaaaacaagactgtttatatactaccatgcaatgatatttcaaagtgccatgtttactcaaggtttcctcttcttgttcctcatgatttggactagtttctacatggtgactattttcttaaggcatcaaaagacggtctttcatattcacagtatcagtctgtctccacaatcttttcctgaaacagaagccagtcatgttttcttcttgctggtgagccgctttgttttcttttatgggactaacgtgtgtctttccacttatattagctccatgtatgagaacagcctaatcctggagaacattactagttttgtttcatcttcctacccaattatctgtactttgatattgattaattatgataataaagtttccagattaacctgtgccattttaaatatgattatttccccctgcttaccacacagctttctattgcatcaaagaaatcctgataaaaattattttaaccacaagagaatgtgtttttaaactttcctgagtttagaaatttagtcctttggcctgggaggtccaggctgcaatgagccaagatcacgccactgaactccagcctgggagacagcaagaccctgtctgaaa

SEQ ID NO: 1986 - protein, 189 aa, Homosapiens
MWVIISTVATSKSTNVGLVYSLIYCKTRLFIYYHAMIFQSAMFTQGFLFLFLMIWTSFYMVTIFLRHQKTVFHIHSISLSPQSFPETEASHVFFLLVSRFVFFYGTNVCLSTYISSMYENSLILENITSFVSSSYPIICTLILINYDNKVSRLTCAILNMIISPCLPHSFLLHQRNPDKNYFNHKRMCF

SEQ ID NO: 1987 - DNA, 2864 bp, Homosapiens
cagggtttcaccaccttgcccaggctggactcaagtgatctgcccacctcggcctcccaaagtactgggattacaggtgtgagccaccatgcctggcatacaaatcttttttgcccaaaattttaagataaaaagcaaggataatgtctcaaatttattttatagtgccaagaaaattagattataatgtgtaacacacagtgagtgctcaacaaatatgtgatgtaacttgatactctttctttcatttcccccaatttggttaccttcatctattactttggatgcaaatcagtataattgcttctggtgttaatgcaaatatatttggtttttagttaccaaagacgttggaagaggtggctatggacatcacctgggagaagtggaagcaaatggacactgttcagaagtccatatacagaaacatgttggaaaaatatagaaacctggttttgctagatgggaagcttgaacgtggggccaagacatcaagagtagagcagcaggacatttcaaaagaagattaatctcaaagattagagatggaagaacttgcaaagagaaagtctgtaccggaagaaatctggaaatctagaggccagtttaagaatcagcagctaaacaaggagaataatctagggcaagagatagctacctgcacaaaaattcctaccagaaaaagagacatagaatctaatgaatttgtgaaaaattttactgtaagatcaatacttgttgcagaacagatagatcctatggaagagaattgtcataaatatggtacatgttgaaagatgctcaaacaaaactcagatttaattatacaaagaaagtatgatggaaaaaaaaaaaccttgtaaatatagtgaatgtgggagaaccttcagaggccacatcactcttgttcagcatcaaataactcattgtggagagagaccctgtaaatgtactgagtgtagaaagggatttaatcagagttcccacttaagaaataatcagaaaactctttcaggagaaaagccctacaaatgcagtgagtgtgggaaggccttcagttattgcttagttcttaatcaacaccagagaattcacagtggagagaaaccttatgagggtactgaatgtggcaagacattcagtcgtagtacataccttactcagcatcaaagaattcacactggtgagaagccctatacatgtcttgaatgtggaaaggcttttagtcagaacacacatcttactctacatcagagaatccatactggagagaaaccttatgaatgcaatgaatgtggtaggtcctttagtcagagtgcacatcttactcaacatcaaagaatgtatacaggagaaaaactctatgaatgtaatgaatgtgagaaagccttccatgatcactcagctcttattcaacatcatattgtccatactgcagagaaaccctatgaatatcatgactgggaaaactttcagttactgttcagacctcattcaacatcagagaatgcacactggagagaaaccatacaaatgcaatgaatgtgggaatgcctttagtgattgttcatcccttattcagcatcaaagaactcacaccggagaagagccttatgaatgtaagcaatgtggaaaagcctttagcagaagcacataccttactcaacatcagagaagtcacgcaggagagaaacagtataaatgcaatgaatgtgagaaaactttcagcctgagttcattccttacacagcatatgagggttcagactggagaaaaaccctacaaatataatgaatatggaaaagcttttagtgactgctcaggacattttcagagaactcacactggagagaagccctgtgaatgtaatgactgtgggaaacctttcagtttctgttcagccctaattcaacataagagaattcataccagaaagaagccctgactgtaccttcataccagtaaatgcactgactgtggaaaagccttcagtgattggttagcacttgttcaacatcagataactcaacactggagaaaaaccgtataaatgtactgaatgtggaaaagccttcagttggagtacagacctcaaaaatcaccagaaaactcatactagtgaaaaatcctataaatgtaatgaatgtagaaaggcctttagttactgctctggtcttattcaatgtcaggtcattcatactatagaaaaaccttatgaatacggtaaatgtggcaaagcctttaggcagaggacagaccttaaaaaacatcagaaaatgcataccgaagagaaaccctatgaatgtaatgaatgtgggaaagcctttagccagagcacatatcttacaaaacaccaaaaaattcatagtgaagagaaatcaaatatacatactgagtgtggggaaaccattagacaaaactcttcttttttacaacaataaaaacctcacactggagagattctctgaatgccttaagaatttggttaatatggagacccttcccagggaaacagaaggaggatcgtgaaaactgttgactacttagaatgatcacatggtttagtggagagagcatgattctgggttttaaaagtcatggatctcaatctcagctcctattactaactagatcttttactttggggtaagtcacttcatatctttaggccttaatttcctcatctgaaaaactggaaggcctgacttgttgagctttaagatcctcaattattatatttactaggaattcaagtttctatagatgtggttcagaattgtgacttatttattgtacatcaggtgtgattcacaagtgagcttgtagtagttattaaggagtcaataaagatatgatatagagca

SEQ ID NO: 1988 - protein, 54 aa, Homosapiens [sequence omitted]

SEQ ID NO: 1989 - DNA, 4012 bp, Homosapiens
agacttacatatatatgccaggcacagttttgttgttaggaatataaagatgggaaaatcttgattcgtgtgtaggggtggggatggcaaaagatactccaaaagataatttcaaaacaggtagtaaatgctatgatagagtctaggtaactgctcttgttatctggaacctacttaaaccatggatggtgtcttagactgcttctattgctgtaaaggaatacctaagctggttaatttaaaaagaaaagaggcttatttggctcatagttctgtagattatataaaaagaatggctccagcatctacttctggtgacggcttcaagttgcttccattcatggtggaaggtgaaagagagctggcacgtgcagagattacatggcaagagaagaagaaagcgagaatggagagggggaccaggctctttttaacaaccggctttagcctggagcggtagctcacacctgtaatcccagcactttgggaggccgaggcggatggatcacgaggtcaagagattgagaccatcctggccaacatggtggaacccatctctactaaaaatacaaaaattagccgagagtggtggcgggtgcctgtagtcccagctactcaggaggctgaggcaggagaatcgctttatcccgggaggcggagggtgcagtgagccaagattgtgctaatgcactccaacctggcgacagagtgagactccacctcaaccaaagtaaataaataaatgaataaatcagctcttgcaggaactaatagagtgagaaccttactatgggggacaataccaagccattcatgagggattcaccgccgtgatccaaagcttcccattaggcccacctccaacattgggaattgaatttcaacaagaggtttgggaaggcaaacattcaaactattgagaatgcaatgcctgtggcgtttctgtggtcatgaggtggcaaggaatgtttggttgcctttacttcctggagctgaagattcagttggtatgacttcaaaaacataccacatatgtggatttctagaccagtgctatgcaatataacttttgtggatatttttgatgtatacattgctcggtacagtagccactaaccacattagctattgagcactgaaatgtgactattgcaattgaagaattaagtcttttatttaattttaatttaaatagctacatgtggggaatggctaccatattggagagtgtagttctagaatatcaagtggttgctatagacacaagctgacttcttcgtagctcctctctcttccctcagagccactgtctcaagactctgcccttcttcaagagaagagcccagaagaagagagaatgactgctaggccctttatggctggattcaggccatgtaaggcatgcctgcttccccttcaccttccaccatgattgtaagtttcctgaggcctccccaggtgtgcttcctgtacagcctgtggaatgttaccaaagacgttggaagaggtggctatggacatcacctgggagaagtggaagcaaatggacactgttcagaagtccatatacagaaacatgttggaaaaatatagaaacctggttttgctagatgggaagcttgaacgtggggccaagacatcaagagtagagcagcaggacatttcaaaagaagattaatctcaaagattagagatggaagaacttgcaaagagaaagtctgtaccggaagaaatctggaaatctagaggccagtttaagaatcagcagctaaacaaggagaataatctagggcaagagatagctacctgcacaaaaattcctaccagaaaaagagacatagaatctaatgaatttgtgaaaaattttactgtaagatcaatacttgttgcagaacagatagatcctatggaagagaattgtcataaatatggtacatgttgaaagatgctcaaacaaaactcagatttaattatacaaagaaagtatgatggaaaaaaaaaaaccttgtaaatatagtgaatgtgggagaaccttcagaggccacatcactcttgttcagcatcaaataactcattgtggagagagaccctgtaaatgtactgagtgtagaaagggatttaatcagagttcccacttaagaaataatcagaaaactctttcaggagaaaagccctacaaatgcagtgagtgtgggaaggccttcagttattgcttagttcttaatcaacaccagagaattcacagtggagagaaaccttatgagggtactgaatgtggcaagacattcagtcgtagtacataccttactcagcatcaaagaattcacactggtgagaagccctatacatgtcttgaatgtggaaaggcttttagtcagaacacacatcttactctacatcagagaatccatactggagagaaaccttatgaatgcaatgaatgtggtaggtcctttagtcagagtgcacatcttactcaacatcaaagaatgtatacaggagaaaaactctatgaatgtaatgaatgtgagaaagccttccatgatcactcagctcttattcaacatcatattgtccatactgcagagaaaccctatgaatatcatgactgggaaaactttcagttactgttcagacctcattcaacatcagagaatgcacactggagagaaaccatacaaatgcaatgaatgtgggaatgcctttagtgattgttcatcccttattcagcatcaaagaactcacaccggagaagagccttatgaatgtaagcaatgtggaaaagcctttagcagaagcacataccttactcaacatcagagaagtcacgcaggagagaaacagtataaatgcaatgaatgtgagaaaactttcagcctgagttcattccttacacagcatatgagggttcagactggagaaaaaccctacaaatataatgaatatggaaaagcttttagtgactgctcaggacattttcagagaactcacactggagagaagccctgtgaatgtaatgactgtgggaaacctttcagtttctgttcagccctaattcaacataagagaattcataccagaaagaagccctgactgtaccttcataccagtaaatgcactgactgtggaaaagccttcagtgattggttagcacttgttcaacatcagataactcaacactggagaaaaaccgtataaatgtactgaatgtggaaaagccttcagttggagtacagacctcaaaaatcaccagaaaactcatactagtgaaaaatcctataaatgtaatgaatgtagaaaggcctttagttactgctctggtcttattcaatgtcaggtcattcatactatagaaaaaccttatgaatacggtaaatgtggcaaagcctttaggcagaggacagaccttaaaaaacatcagaaaatgcataccgaagagaaaccctatgaatgtaatgaatgtgggaaagcctttagccagagcacatatcttacaaaacaccaaaaaattcatagtgaagagaaatcaaatatacatactgagtgtggggaaaccattagacaaaactcttcttttttacaacaataaaaacctcacactggagagattctctgaatgccttaagaatttggttaatatggagacccttcccagggaaacagaaggaggatcgtgaaaactgttgactacttagaatgatcacatggtttagtggagagagcatgattctgggttttaaaagtcatggatctcaatctcagctcctattactaactagatcttttactttggggtaagtcacttcatatctttaggccttaatttcctcatctgaaaaactggaaggcctgacttgttgagctttaagatcctcaattattatatttactaggaattcaagtttctatagatgtggttcagaattgtgacttatttattgtacatcaggtgtgattcacaagtgagcttgtagtagttattaaggagtcaataaagatatgatatagagca

SEQ ID NO: 1990 - protein, 64 aa, Homosapiens
MLPKTLEEVAMDITWEKWKQMDTVQKSIYRNMLEKYRNLVLLDGKLERGAKTSRVEQQDISKED

SEQ ID NO: 1991 - DNA, 720 bp, Homosapiens
tagatgggaagcttgaacgtggggccaagacatcaagagtagagcagcaggacatttcaaaagaagattaatctcaaagattagagatggaagaacttgcaaagagaaagtctgtaccggaagaaatctggaaatctagaggccagtttaagaatcagcagctaaacaaggagaataatctagggcaagagatagctacctgcacaaaaattcctaccagaaaaagagacatagaatctaatgaatttgtgaaaaattttactgtaagatcaatacttgttgcagaacagatagatcctatggaagagaattgtcataaatatggtacatgttgaaagatgctcaaacaaaactcagatttaattatacaaagaaagtatgatggaaaaaaaaaaaccttgtaaatatagtgaatgtgggagaaccttcagaggccacatcactcttgttcagcatcaaataactcattctcagctcctattactaactagatcttttactttggggtaagtcacttcatatctttaggccttaatttcctcatctgaaaaactggaaggcctgacttgttgagctttaagatcctcaattattatatttactaggaattcaagtttctatagatgtggttcagaattgtgacttatttattgtacatcaggtgtgattcacaagtgagcttgtagtagttattaaggagtcaataaagatatgatatag

SEQ ID NO: 1992 - protein, 43 aa, Homosapiens
MMEKKKPCKYSECGRTFRGHITLVQHQITHSQLLLLTRSFTLG

SEQ ID NO: 1993 - DNA, 1317 bp, Homosapiens
tgagccaagattgtgctaatgcactccaacctggcgacagagtgagactccacctcaaccaaagtaaataaataaatgaataaatcagctcttgcaggaactaatagagtgagaaccttactatgggggacaataccaagccattcatgagggattcaccgccgtgatccaaagcttcccattaggcccacctccaacattgggaattgaatttcaacaagaggtttgggaaggcaaacattcaaactattgagaatgcaatgcctgtggcgtttctgtggtcatgaggtggcaaggaatgtttggttgcctttacttcctggagctgaagattcagttggtatgacttcaaaaacataccacatatgtggatttctagaccagtgctatgcaatataacttttgtggatatttttgatgtatacattgctcggtacagtagccactaaccacattagctattgagcactgaaatgtgactattgcaattgaagaattaagtcttttatttaattttaatttaaatagctacatgtggggaatggctaccatattggagagtgtagttctagaatatcaagtggttgctatagacacaagctgacttcttcgtagctcctctctcttccctcagagccactgtctcaagactctgcccttcttcaagagaagagcccagaagaagagagaatgactgctaggccctttatggctggattcaggccatgtaaggcatgcctgcttccccttcaccttccaccatgattgtaagtttcctgaggcctccccaggtgtgcttcctgtacagcctgtggaatgttaccaaagacgttggaagaggtggctatggacatcacctgggagaagtggaagcaaatggacactgttcagaagtccatatacagaaacatgttggaaaaatatagaaacctggttttgctaggtaaaggttaaaggttactttctttctgcatgttagaatattttcatgcagtgttttgtcatctttagttgttaatagtcatggcaagcgtaatgtggtggctcagaatgtgggttttggagaggagacctgagtccaagtcctggctttgctacgttaaaaacccttagggttttaaaaaccttttgaggccattcgccatataaatagggctaaaaataaaatattgtaaaatcctaaaaaaaaaactgtttcttcaggatttcttgtaagagacagaataaaataagtggttggcataaaagccctgatatagtataaggacttggtaaatgttagcgttgctgcttttcctgttattattgccactattg

SEQ ID NO: 1994 - protein, 63 aa, Homosapiens
MPASPSPSTMIVSFLRPPQVCFLYSLWNVTKDVGRGGYGHHLGEVEANGHCSEVHIQKHVGKI

SEQ ID NO: 1995 - DNA, 1967 bp, Homosapiens
aggagagtccctggtcccagccagcgggagcggcttctccagtttgtggctctcggagagttcgcctcgtccctccctctcagataaccacctatttctgacctctggaggccgggctgagcccggaattttatgaccagcgcccgctggccgtcgtcaccctctaatttctcgcaaaactcccggggacccttcttaatgtcagtagccacagtcgccgccgctcctgcgcctagaagccttccacgaccctcaaccccacagagccccgagcaggctcgggttcccgcaggatacactgcccgcccagtggcctggagggcgcgtcccgggctcccctacgccttttggaatcagcgacagacgcaggtataaaagagagcctccactcccacctctccagggctccccacccgctccttctggccgctttctcctgaaagagcaaggcacccctagaagcttcaggctcctccacaggcgagtgcctacccacctatcaggttcataggtggaagaaattcatctccagatgagactttggacttggacttgggacttttgagttaatgccagaatgatgaaccccagcatgttaattgaacttgatcacccagttgaaggaagaataatagtagatgttggatcttcaggaagctgaagagggcagtgcccagaaatacctgtcttgatagggggatttgagctgaaccaaagcatcaacaccaatcagactgtttccgaagaactagagttttctgggtcagcaatggaaagcctcagagggaatactgctcagggtcctacaaatgaagaagactataaaaacgaaggccaattatcaaggcaaacaaaatgtcctgcacagaagaaatcctcttttgagaacacagtggtcagaaaagtgtcagtgacactcaaagaaattttcacaggggaggaaggccctgaatccagtgaatttagtctaagcccaaaccttgacgcacaacagaaaattccaaagggacatggatccccaatatctaggaaaaactccaaagataattcagacttaattaaacaccaaagacttttctcacaaagaaaaccttgtaaatgcaatgaatgtgaaaaagcctttagttaccaatcagaccttcttgtacacagtagaattcatggtggagaaaagccttttgaatgcaacaaatgtgggaaatctttcagccgaagtacacaccttattgaacatcaaagaactcacactggagagaaaccttatgaatgcaatgaatgtggaaaagcttttagccggagcacacatcttagtctacatcagagaatccatactggagaaaaaccatatgaatgtagtgaatgtggaaaagcctttagccgaagcactaaccttagtcagcatcagcgaactcatactcaagaaaggccttacaaatgtaatgaatgtgggaaagccttcggtgaccgttcaaccataattcagcatcaacgaatacacactggagagaatccctatgaatgcagtaaatgtggaaaagctttcagttggatctcatcgcttactgaacatcagagaacacacactggggagaacccctatgagtgcagtgaatgtgggaaagtgttcagtcgaagctcgtctcttacagaacatcagagaatccacagtggagaaaagcctcacgagtgtagagtgtgtggaaagggcttcagtcgaagctcatcccttattattcatcagagaactcataccggggagaagccgtacaaatgtaatgactgtggaaaagccttctgtcagagttcaactctgatcagacatcagcaccttcatactaaagagtaatatctgagcttttattaatgttagcataagaacacatatacctaacctcccaccactgaaatatatatatttcaagtatatatatacttgttctaattttcttttattagatacctatacc

SEQ ID NO: 1996 - protein, 358 aa, Homosapiens
MESLRGNTAQGPTNEEDYKNEGQLSRQTKCPAQKKSSFENTVVRKVSVTLKEIFTGEEGPESSEFSLSPNLDAQQKIPKGHGSPISRKNSKDNSDLIKHQRLFSQRKPCKCNECEKAFSYQSDLLVHSRIHGGEKPFECNKCGKSFSRSTHLIEHQRTHTGEKPYECNECGKAFSRSTHLSLHQRIHTGEKPYECSECGKAFSRSTNLSQHQRTHTQERPYKCNECGKAFGDRSTIIQHQRIHTGENPYECSKCGKAFSWISSLTEHQRTHTGENPYECSECGKVFSRSSSLTEHQRIHSGEKPHECRVCGKGFSRSSSLIIHQRTHTGEKPYKCNDCGKAFCQSSTLIRHQHLHTKE

SEQ ID NO: 1997 - DNA, 7038 bp, Homosapiens
gagttgtgcctggagtgatgtttaagccaatgtcagggcaaggcaacagtccctggccgtcctccagcacctttgtaatgcatatgagctcgggagaccagtacttaaagttggaggcccgggagcccaggagctggcggagggcgttcgtcctgggactgcacttgctcccgtcgggtcgcccggcttcaccggacccgcaggctcccggggcagggccggggccagagctcgcgtgtcggcgggacatgcgctgcgtcgcctctaacctcgggctgtgctctttttccaggtggcccgccggtttctgagccttctgccctgcggggacacggtctgcaccctgcccgcggccacggaccatgaccatgaccctccacaccaaagcatctgggatggccctactgcatcagatccaagggaacgagctggagcccctgaaccgtccgcagctcaagatccccctggagcggcccctgggcgaggtgtacctggacagcagcaagcccgccgtgtacaactaccccgagggcgccgcctacgagttcaacgccgcggccgccgccaacgcgcaggtctacggtcagaccggcctcccctacggccccgggtctgaggctgcggcgttcggctccaacggcctggggggtttccccccactcaacagcgtgtctccgagcccgctgatgctactgcacccgccgccgcagctgtcgcctttcctgcagccccacggccagcaggtgccctactacctggagaacgagcccagcggctacacggtgcgcgaggccggcccgccggcattctacaggccaaattcagataatcgacgccagggtggcagagaaagattggccagtaccaatgacaagggaagtatggctatggaatctgccaaggagactcgctactgtgcagtgtgcaatgactatgcttcaggctaccattatggagtctggtcctgtgagggctgcaaggccttcttcaagagaagtattcaaggacataacgactatatgtgtccagccaccaaccagtgcaccattgataaaaacaggaggaagagctgccaggcctgccggctccgtaaatgctacgaagtgggaatgatgaaaggtgggatacgaaaagaccgaagaggagggagaatgttgaaacacaagcgccagagagatgatggggagggcaggggtgaagtggggtctgctggagacatgagagctgccaacctttggccaagcccgctcatgatcaaacgctctaagaagaacagcctggccttgtccctgacggccgaccagatggtcagtgccttgttggatgctgagcccccgatactctattccgagtatgatcctaccagacccttcagtgaagcttcgatgatgggcttactgaccaacctggcagacagggagctggttcacatgatcaactgggcgaagagggtgccaggctttgtggatttgaccctccatgatcaggtccaccttctagaatgtgcctggctagagatcctgatgattggtctcgtctggcgctccatggagcacccagggaagctactgtttgctcctaacttgctcttggacaggaaccagggaaaatgtgtagagggcatggtggagatcttcgacatgctgctggctacatcatctcggttccgcatgatgaatctgcagggagaggagtttgtgtgcctcaaatctattattttgcttaattctggagtgtacacatttctgtccagcaccctgaagtctctggaagagaaggaccatatccaccgagtcctggacaagatcacagacactttgatccacctgatggccaaggcaggcctgaccctgcagcagcagcaccagcggctggcccagctcctcctcatcctctcccacatcaggcacatgagtaacaaaggcatggagcatctgtacagcatgaagtgcaagaacgtggtgcccctctatgacctgctgctggagatgctggacgcccaccgcctacatgcgcccactagccgtggaggggcatccgtggaggagacggaccaaagccacttggccactgcgggctctacttcatcgcattccttgcaaaagtattacatcacgggggaggcagagggtttccctgccacggtctgagagctccctggctcccacacggttcagataatccctgctgcattttaccctcatcatgcaccactttagccaaattctgtctcctgcatacactccggcatgcatccaacaccaatggctttctagatgagtggccattcatttgcttgctcagttcttagtggcacatcttctgtcttctgttgggaacagccaaagggattccaaggctaaatctttgtaacagctctctttcccccttgctatgttactaagcgtgaggattcccgtagctcttcacagctgaactcagtctatgggttggggctcagataactctgtgcatttaagctacttgtagagacccaggcctggagagtagacattttgcctctgataagcactttttaaatggctctaagaataagccacagcaaagaatttaaagtggctcctttaattggtgacttggagaaagctaggtcaagggtttattatagcaccctcttgtattcctatggcaatgcatccttttatgaaagtggtacaccttaaagcttttatatgactgtagcagagtatctggtgattgtcaattcattccccctataggaatacaaggggcacacagggaaggcagatcccctagttggcaagactattttaacttgatacactgcagattcagatgtgctgaaagctctgcctctggctttccggtcatgggttccagttaattcatgcctcccatggacctatggagagcagcaagttgatcttagttaagtctccctatatgagggataagttcctgatttttgtttttatttttgtgttacaaaagaaagccctccctccctgaacttgcagtaaggtcagcttcaggacctgttccagtgggcactgtacttggatcttcccggcgtgtgtgtgccttacacaggggtgaactgttcactgtggtgatgcatgatgagggtaaatggtagttgaaaggagcaggggccctggtgttgcatttagccctggggcatggagctgaacagtacttgtgcaggattgttgtggctactagagaacaagagggaaagtagggcagaaactggatacagttctgaggcacagccagacttgctcagggtggccctgccacaggctgcagctacctaggaacattccttgcagaccccgcattgccctttgggggtgccctgggatccctggggtagtccagctcttcttcatttcccagcgtggccctggttggaagaagcagctgtcacagctgctgtagacagctgtgttcctacaattggcccagcaccctggggcacgggagaagggtggggaccgttgctgtcactactcaggctgactggggcctggtcagattacgtatgcccttggtggtttagagataatccaaaatcagggtttggtttggggaagaaaatcctcccccttcctcccccgccccgttccctaccgcctccactcctgccagctcatttccttcaatttcctttgacctataggctaaaaaagaaaggctcattccagccacagggcagccttccctgggcctttgcttctctagcacaattatgggttacttcctttttcttaacaaaaaagaatgtttgatttcctctgggtgaccttattgtctgtaattgaaaccctattgagaggtgatgtctgtgttagccaatgacccaggtgagctgctcgggcttctcttggtatgtcttgtttggaaaagtggatttcattcatttctgattgtccagttaagtgatcaccaaaggactgagaatctgggagggcaaaaaaaaaaaaaaagtttttatgtgcacttaaatttggggacaattttatgtatctgtgttaaggatatgtttaagaacataattcttttgttgctgtttgtttaagaagcaccttagtttgtttaagaagcaccttatatagtataatatatatttttttgaaattacattgcttgtttatcagacaattgaatgtagtaattctgttctggatttaatttgactgggttaacatgcaaaaaccaaggaaaaatatttagtttttttttttttttttgtatacttttcaagctaccttgtcatgtatacagtcatttatgcctaaagcctggtgattattcatttaaatgaagatcacatttcatatcaacttttgtatccacagtagacaaaatagcactaatccagatgcctattgttggatactgaatgacagacaatcttatgtagcaaagattatgcctgaaaaggaaaattattcagggcagctaattttgcttttaccaaaatatcagtagtaatatttttggacagtagctaatgggtcagtgggttctttttaatgtttatacttagattttcttttaaaaaaattaaaataaaacaaaaaaaaatttctaggactagacgatgtaataccagctaaagccaaacaattatacagtggaaggttttacattattcatccaatgtgtttctattcatgttaagatactactacatttgaagtgggcagagaacatcagatgattgaaatgttcgcccaggggtctccagcaactttggaaatctctttgtatttttacttgaagtgccactaatggacagcagatattttctggctgatgttggtattgggtgtaggaacatgatttaaaaaaaaactcttgcctctgctttcccccactctgaggcaagttaaaatgtaaaagatgtgatttatctggggggctcaggtatggtggggaagtggattcaggaatctggggaatggcaaatatattaagaagagtattgaaagtatttggaggaaaatggttaattctgggtgtgcaccagggttcagtagagtccacttctgccctggagaccacaaatcaactagctccatttacagccatttctaaaatggcagcttcagttctagagaagaaagaacaacatcagcagtaaagtccatggaatagctagtggtctgtgtttcttttcgccattgcctagcttgccgtaatgattctataatgccatcatgcagcaattatgagaggctaggtcatccaaagagaagaccctatcaatgtaggttgcaaaatctaacccctaaggaagtgcagtctttgatttgatttccctagtaaccttgcagatatgtttaaccaagccatagcccatgccttttgagggctgaacaaataagggacttactgataatttacttttgatcacattaaggtgttctcaccttgaaatcttatacactgaaatggccattgatttaggccactggcttagagtactccttcccctgcatgacactgattacaaatactttcctattcatactttccaattatgagatggactgtgggtactgggagtgatcactaacaccatagtaatgtctaatattcacaggcagatctgcttggggaagctagttatgtgaaaggcaaatagagtcatacagtagctcaaaaggcaaccataattctctttggtgcaggtcttgggagcgtgatctagattacactgcaccattcccaagttaatcccctgaaaacttactctcaactggagcaaatgaactttggtcccaaatatccatcttttcagtagcgttaattatgctctgtttccaactgcatttcctttccaattgaattaaagtgtggcctcgtttttagtcatttaaaattgttttctaagtaattgctgcctctattatggcacttcaattttgcactgtcttttgagattcaagaaaaatttctattcttttttttgcatccaattgtgcctgaacttttaaaatatgtaaatgctgccatgttccaaacccatcgtcagtgtgtgtgtttagagctgtgcaccctagaaacaacatattgtcccatgagcaggtgcctgagacacagacccctttgcattcacagagaggtcattggttatagagacttgaattaataagtgacattatgccagtttctgttctctcacaggtgataaacaatgctttttgtgcactacatactcttcagtgtagagctcttgttttatgggaaaaggctcaaatgccaaattgtgtttgatggattaatatgcccttttgccgatgcatactattactgatgtgactcggttttgtcgcagctttgctttgtttaatgaaacacacttgtaaacctcttttgcactttgaaaaagaatccagcgggatgctcgagcacctgtaaacaattttctcaacctatttgatgttcaaataaagaattaaactaaagacaacgagtttgttttttgtaagctccacttcttgctagcagttcaccactgatcctctaaaatcaaagtggttaaacgatctgtcacacacagtgagtctgaatgctaaagcctctcctcacctcactccctctgcccaacacccccaggtgtatcaggaagtgtgtggacactgtggtcaggcagaactggcctcaattcttggcttcaccacttacaaattttatgatcattggcagttgatttttcagagtttcggcttccttatcaacaatatgatgataagtaataacacctaattcacacgatggtggtgaggactaactgaggtgctcattaaacatagttgctgttttttaatgcctggcccaaatccttccctgtgagggagaagaaggatgcttgagagtggttatttatgaatgaatgagtgaatggaagaatgagtgatctgaaatgatataattagcttaaaaacctctccctcattctgaaggtaaagcaggaacaattggtccacccccaccccaggtttccatttcaggactcccttccctttttggagctacctgcgtgct

SEQ ID NO: 1998 - protein, 595 aa, Homosapiens [sequence omitted]

SEQ ID NO: 1999 - DNA, 1567 bp, Homosapiens
aggagctggcggagggcgttcgtcctgggactgcacttgctcccgtcgggtcgcccggcttcaccggacccgcaggctcccggggcagggccggggccagagctcgcgtgtcggcgggacatgcgctgcgtcgcctctaacctcgggctgtgctctttttccaggtggcccgccggtttctgagccttctgccctgcggggacacggtctgcaccctgcccgcggccacggaccatgaccatgaccctccacaccaaagcatctgggatggccctactgcatcagatccaagggaacgagctggagcccctgaaccgtccgcagctcaagatccccctggagcggcccctgggcgaggtgtacctggacagcagcaagcccgccgtgtacaactaccccgagggcgccgcctacgagttcaacgccgcggccgccgccaacgcgcaggtctacggtcagaccggcctcccctacggccccgggtctgaggctgcggcgttcggctccaacggcctggggggtttccccccactcaacagcgtgtctccgagcccgctgatgctactgcacccgccgccgcagctgtcgcctttcctgcagccccacggccagcaggtgccctactacctggagaacgagcccagcggctacacggtgcgcgaggccggcccgccggcattctacaggaaccagggaaaatgtgtagagggcatggtggagatcttcgacatgctgctggctacatcatctcggttccgcatgatgaatctgcagggagaggagtttgtgtgcctcaaatctattattttgcttaattctggagtgtacacatttctgtccagcaccctgaagtctctggaagagaaggaccatatccaccgagtcctggacaagatcacagacactttgatccacctgatggccaaggcaggcctgaccctgcagcagcagcaccagcggctggcccagctcctcctcatcctctcccacatcaggcacatgagtaacaaaggcatggagcatctgtacagcatgaagtgcaagaacgtggtgcccctctatgacctgctgctggagatgctggacgcccaccgcctacatgcgcccactagccgtggaggggcatccgtggaggagacggaccaaagccacttggccactgcgggctctacttcatcgcattccttgcaaaagtattacatcacgggggaggcagagggtttccctgccacggtctgagagctccctggctcccacacggttcagataatccctgctgcattttaccctcatcatgcaccactttagccaaattctgtctcctgcatacactccggcatgcatccaacaccaatggctttctagatgagtggccattcatttgcttgctcagttcttagtggcacatcttctgtcttctgttgggaacagccaaagggattccaaggctaaatctttgtaacagctctctttcccccttgctatgttactaagcgtgaggattcccgtagctcttcacagctgaactcagtctatgggttggggctcagataactctgtgcattta

SEQ ID NO: 2000 - protein, 334 aa, Homosapiens
MTMTLHTKASGMALLHQIQGNELEPLNRPQLKIPLERPLGEVYLDSSKPAVYNYPEGAAYEFNAAAAANAQVYGQTGLPYGPGSEAAAFGSNGLGGFPPLNSVSPSPLMLLHPPPQLSPFLQPHGQQVPYYLENEPSGYTVREAGPPAFYRNQGKCVEGMVEIFDMLLATSSRFRMMNLQGEEFVCLKSIILLNSGVYTFLSSTLKSLEEKDHIHRVLDKITDTLIHLMAKAGLTLQQQHQRLAQLLLILSHIRHMSNKGMEHLYSMKCKNVVPLYDLLLEMLDAHRLHAPTSRGGASVEETDQSHLATAGSTSSHSLQKYYITGEAEGFPATV

SEQ ID NO: 2001 - DNA, 1684 bp, Homosapiens
aggagctggcggagggcgttcgtcctgggactgcacttgctcccgtcgggtcgcccggcttcaccggacccgcaggctcccggggcagggccggggccagagctcgcgtgtcggcgggacatgcgctgcgtcgcctctaacctcgggctgtgctctttttccaggtggcccgccggtttctgagccttctgccctgcggggacacggtctgcaccctgcccgcggccacggaccatgaccatgaccctccacaccaaagcatctgggatggccctactgcatcagatccaagggaacgagctggagcccctgaaccgtccgcagctcaagatccccctggagcggcccctgggcgaggtgtacctggacagcagcaagcccgccgtgtacaactaccccgagggcgccgcctacgagttcaacgccgcggccgccgccaacgcgcaggtctacggtcagaccggcctcccctacggccccgggtctgaggctgcggcgttcggctccaacggcctggggggtttccccccactcaacagcgtgtctccgagcccgctgatgctactgcacccgccgccgcagctgtcgcctttcctgcagccccacggccagcaggtgccctactacctggagaacgagcccagcggctacacggtgcgcgaggccggcccgccggcattctacaggacataacgactatatgtgtccagccaccaaccagtgcaccattgataaaaacaggaggaagagctgccaggcctgccggctccgtaaatgctacgaagtgggaatgatgaaaggtggaaccagggaaaatgtgtagagggcatggtggagatcttcgacatgctgctggctacatcatctcggttccgcatgatgaatctgcagggagaggagtttgtgtgcctcaaatctattattttgcttaattctggagtgtacacatttctgtccagcaccctgaagtctctggaagagaaggaccatatccaccgagtcctggacaagatcacagacactttgatccacctgatggccaaggcaggcctgaccctgcagcagcagcaccagcggctggcccagctcctcctcatcctctcccacatcaggcacatgagtaacaaaggcatggagcatctgtacagcatgaagtgcaagaacgtggtgcccctctatgacctgctgctggagatgctggacgcccaccgcctacatgcgcccactagccgtggaggggcatccgtggaggagacggaccaaagccacttggccactgcgggctctacttcatcgcattccttgcaaaagtattacatcacgggggaggcagagggtttccctgccacggtctgagagctccctggctcccacacggttcagataatccctgctgcattttaccctcatcatgcaccactttagccaaattctgtctcctgcatacactccggcatgcatccaacaccaatggctttctagatgagtggccattcatttgcttgctcagttcttagtggcacatcttctgtcttctgttgggaacagccaaagggattccaaggctaaatctttgtaacagctctctttcccccttgctatgttactaagcgtgaggattcccgtagctcttcacagctgaactcagtctatgggttggggctcagataactctgtgcattta

SEQ ID NO: 2002 - protein, 193 aa, Homosapiens
MLRSGNDERWNQGKCVEGMVEIFDMLLATSSRFRMMNLQGEEFVCLKSIILLNSGVYTFLSSTLKSLEEKDHIHRVLDKITDTLIHLMAKAGLTLQQQHQRLAQLLLILSHIRHMSNKGMEHLYSMKCKNVVPLYDLLLEMLDAHRLHAPTSRGGASVEETDQSHLATAGSTSSHSLQKYYITGEAEGFPATV

SEQ ID NO: 2003 - DNA, 1343 bp, Homosapiens
aggagctggcggagggcgttcgtcctgggactgcacttgctcccgtcgggtcgcccggcttcaccggacccgcaggctcccggggcagggccggggccagagctcgcgtgtcggcgggacatgcgctgcgtcgcctctaacctcgggctgtgctctttttccaggtggcccgccggtttctgagccttctgccctgcggggacacggtctgcaccctgcccgcggccacggaccatgaccatgaccctccacaccaaagcatctgggatggccctactgcatcagatccaagggaacgagctggagcccctgaaccgtcccaggctttgtggatttgaccctccatgatcaggtccaccttctagaatgtgcctggctagagatcctgatgattggtctcgtctggcgctccatggagcacccagggaagctactgtttgctcctaacttgctcttggacaggaaccagggaaaatgtgtagagggcatggtggagatcttcgacatgctgctggctacatcatctcggttccgcatgatgaatctgcagggagaggagtttgtgtgcctcaaatctattattttgcttaattctggagtgtacacatttctgtccagcaccctgaagtctctggaagagaaggaccatatccaccgagtcctggacaagatcacagacactttgatccacctgatggccaaggcaggcctgaccctgcagcagcagcaccagcggctggcccagctcctcctcatcctctcccacatcaggcacatgagtaacaaaggcatggagcatctgtacagcatgaagtgcaagaacgtggtgcccctctatgacctgctgctggagatgctggacgcccaccgcctacatgcgcccactagccgtggaggggcatccgtggaggagacggaccaaagccacttggccactgcgggctctacttcatcgcattccttgcaaaagtattacatcacgggggaggcagagggtttccctgccacggtctgagagctccctggctcccacacggttcagataatccctgctgcattttaccctcatcatgcaccactttagccaaattctgtctcctgcatacactccggcatgcatccaacaccaatggctttctagatgagtggccattcatttgcttgctcagttcttagtggcacatcttctgtcttctgttgggaacagccaaagggattccaaggctaaatctttgtaacagctctctttcccccttgctatgttactaagcgtgaggattcccgtagctcttcacagctgaactcagtctatgggttggggctcagataactctgtgcattta

SEQ ID NO: 2004 - protein, 208 aa, Homosapiens
MIGLVWRSMEHPGKLLFAPNLLLDRNQGKCVEGMVEIFDMLLATSSRFRMMNLQGEEFVCLKSIILLNSGVYTFLSSTLKSLEEKDHIHRVLDKITDTLIHLMAKAGLTLQQQHQRLAQLLLILSHIRHMSNKGMEHLYSMKCKNVVPLYDLLLEMLDAHRLHAPTSRGGASVEETDQSHLATAGSTSSHSLQKYYITGEAEGFPATV

SEQ ID NO: 2005 - DNA, 5418 bp, Homosapiens
gcttaaaaataatctcctgccagcccagtgacaagcctgtcccacccggggagaatgccccggagtggcgtgcgggtcagccagggtctgcgcctcgcagccactgtggaaggagcgcggccggtccaggacacaggagaccactttgtgacttcaatggcgaaggccaaattcagataatcgacgccagggtggcagagaaagattggccagtaccaatgacaagggaagtatggctatggaatctgccaaggagactcgctactgtgcagtgtgcaatgactatgcttcaggctaccattatggagtctggtcctgtgagggctgcaaggccttcttcaagagaagtattcaaggacataacgactatatgtgtccagccaccaaccagtgcaccattgataaaaacaggaggaagagctgccaggcctgccggctccgtaaatgctacgaagtgggaatgatgaaaggtgggatacgaaaagaccgaagaggagggagaatgttgaaacacaagcgccagagagatgatggggagggcaggggtgaagtggggtctgctggagacatgagagctgccaacctttggccaagcccgctcatgatcaaacgctctaagaagaacagcctggccttgtccctgacggccgaccagatggtcagtgccttgttggatgctgagcccccgatactctattccgagtatgatcctaccagacccttcagtgaagcttcgatgatgggcttactgaccaacctggcagacagggagctggttcacatgatcaactgggcgaagagggtgccaggctttgtggatttgaccctccatgatcaggtccaccttctagaatgtgcctggctagagatcctgatgattggtctcgtctggcgctccatggagcacccagggaagctactgtttgctcctaacttgctcttggacaggaaccagggaaaatgtgtagagggcatggtggagatcttcgacatgctgctggctacatcatctcggttccgcatgatgaatctgcagggagaggagtttgtgtgcctcaaatctattattttgcttaattctggtatctcacatgtagaagcaaagaagagaatcctgaacttgcatcctaaaatatttggaaacaagtggtttcctcgtgtctaaagcctctggtcataaggcctcacagtatcctgcagatcatcaaatccgtgtgtggacgtggggacattttgttttgaggcagttacatgaccatgggcaagtaaattagtctctctggccttcagttttctcatttgcaatgattcaatggtttgccttaaagtgtcttaagaaggataggatagctacccacaaactttggatcaaattttcttcaaaacatccttcccctgactttaaaatatgccctggcaaccaacactcaacacctgtagctagatgagttataacagagtgactgaagagagctcccacaattcctagttattaaatacctgactaattttcattaggagacatttaagaactttagtgatgggaagatttacatatataattgatagtacaatctgacagagctgaatagctcctgtttgtcaactgttaaattctttgtgcaattaggtcaaagatcaagatcaaaacaagggctgcccattgacctgttcactcctgagaaaaatggcaaaccattgaatcataaatcatgacagccaaaataattttaggatattaatgcacccctcatctttgcaaatgagaaaactgaaggccagagagactaatttacttgcccatttttgataaaaatgtcaccatttacagaatgtggactcctatgttggagtctgttgaaggacatggcacatttaacagcatcagagcattttttattaaaatttaatttgtgcatgacttctaatgctgaagaacgccaagctaggaagaagtcatgggctgagatggggacagagagaacacacaatattcagtgactgtccgtgcagctggctgcccttgaaaatatccgaactatccactgggaaaatgcctgtccccttggggtaattaccagagtttcaacatgcccaaagctgcctcatcttcagggggaacttgttctagcgattttagtatcaagaagctaatggtcccagggaaagggttatttttaatatttagctactgtgctaaaaatcacctaagtttctagagtcttgggaaatttcataagggaaagaacaaaggcaacttgttgactacccactggtcattctcctctggtcttattacatacatggatgccagtttagattgtgtttatataggaaaaattaaatgtgtgagcctccttaaggaacatcatcaatacagatatatcagatagttctgtccagcaaaaaacgtgcttatttgctacaagtaaatttttatttatttttctcacttccctcactccttcaaatttccaggtaaatagctgcccaggagttgcttcatctctgtcccaaaatacctagacaattgcgggataaggagaatggcagggagggagtagtggctaaaatcacacccttcaaaagaaagtgtgtaggacacacaattgtgagaagtctgaatgccatgcacatagggtatgactcactttgaaaattgtttataatcaaggaaatgaaaatgagttaatttcgtgcatgcatcatttaaagccaaatgagaagaaacttctaatttattttgttacttttcggctaacactggcagtatgtaacagatttattttgcagaaacatctagattgtccgtgatcttgatcctgcccttatgtgtcttgtctttgaaacccagtgtttcctggatatatggttcaggagacaagtttccagaatcaagttaggacccaggtcttctttttttccaaaccaaacattcttgctaatcctaaactacctgaggcagcctgtggtggcctcagctctaaaaccattgtttaaaggcttctacccatcaatggcccttcagcagagtggtacggttaacggggtagggtctggagtcaggggagacctgggttcaaatcctacatctttacacctctaatccccagtgtccttgtctataaattgggaatatagccatgtcatgggattcttgtgagggttaaatgaggtaaaacacatacaatgcttagcatgtatacaattaagcactaaataattgaaacacattaagtactaaatgaatgtcagcagcttatcactattatctgtataatgataccaagggtgtgccgactcatacccttaggggttggctggattcggccttttctctcgggaaaacatacctgatttattaatagtgctttcaagcatgtgataaatttctcaaactgcctgtcttgttccctagaaacaccaggaaggcctacctcaaatagcaacagagaaacctatcggagccttaccctacagctttccttggggcacgggtgagcaatctgccttagaggggagaggctctgtgctgaggctctttgaatgctttgaataaatagatccccagataatgaaaagacttcaaaacaaattctacaagaaactgagtagtgtttatagtgaggccctagtgtacatgcaaaaaacccccactgcccttgcttaaatgtatctgattaacttgaatacatttttaaatgagggcttttttccctctttcagtgtttcggccagtcatttgccacttctcattccatcttagttctctgtaaagaaggtgccagagacctaaggtgcccaaggcaattttgcattttacaattctaagctttagaatgaagtcatcaatttgctacatccggactacagtgcaattattcctttgccttgctggaaattggagtgaaatctttctagctgtcaatttcaactcagttgcagtagtgttttgaagaattaatggcgataaggttagaaaattttaagtcaaacgtagggaaaaagtaccagctagaccatcataagcatttgctttgaaagcatgcttctaaagtgtgtttaacctcaaataacagtcacaaatatggttattatgaatgtatgcacagatttttatgtttctaattttaagaagttctagggagctccctgtaacgatttagggaatctctagattctgatatactgcaagtcttttaatggtaggaatcacattgaattaattttgtaggcccagggcctaaatttagtaggtgttcagtacctattggcatcaattcatatgtaggtttaaaatactgtatgaagatacagaatcaccaccatcaaatcaaattgaaatatgtaacaggctagtataatattaacatctgactttaaacaacaacaaagaaaccaaatgagtaactcctcccttcaaactaatagtcagtttcttccaactcagtctctttctcctctcaggaagaatgcgtatctaaaaatttcccattgcagactgctggaaacaacattctaaactatttatgcttctgcaataacctttccaatttgctggaccagtgcaagattaaacacgagatatctcaagtctcaatgtaaaggaacaccacgacagcctggactgtgggtgaagttcattcttccccagcagactctgcctttcattctcggggttgggtgtgccccaaacagaggtaccgacggtaacgaagcccaagaatgttcaaccacaacctgtctgtgaaggtgttggatgacgtttgccattcaggtgaagattatttatgttccagtcccacctgagtagcaaagtgaacactgtgctgaatgctcagaaagatgttaatgaaccgtgctggacagagcagagctgaaaggcgccttgcgagtgtcgtagtgagaatgtggctgtcccagctgcaaagccctgttaggaggcatgaggaagcacttgctgccctaagaaacgatgccttcgacattttcaaaagatctatgtggctgtctgaaacaatgcggagagcagatagacgcaatatttgggaaccaaagagtgactgctgttggcgttgcatcataacataagcgctttcccccttctcgtcactatcatttgtatcaaccaaagaactgatctctggtatcctcgaaggaatgctgtggggatattcttcatctctgttcatggtacatcagcaatttgtggggaaaagatggactatataacacaatgatctgcctaaaagaaactgtctctacttatagggggctgagcaaaccttagagcatctgcggatgctcgtcattatcttcaaaagtccccaagagtttttctccatactttattattgctattttgtttaggctagaaaaaaaaaaactcataaaattgtcttcaaaccaaaccaaagg

SEQ ID NO: 2006 - protein, 310 aa, Homosapiens
MAMESAKETRYCAVCNDYASGYHYGVWSCEGCKAFFKRSIQGHNDYMCPATNQCTIDKNRRKSCQACRLRKCYEVGMMKGGIRKDRRGGRMLKHKRQRDDGEGRGEVGSAGDMRAANLWPSPLMIKRSKKNSLALSLTADQMVSALLDAEPPILYSEYDPTRPFSEASMMGLLTNLADRELVHMINWAKRVPGFVDLTLHDQVHLLECAWLEILMIGLVWRSMEHPGKLLFAPNLLLDRNQGKCVEGMVEIFDMLLATSSRFRMMNLQGEEFVCLKSIILLNSGISHVEAKKRILNLHPKIFGNKWFPRV

SEQ ID NO: 2007 - DNA, 818 bp, Homosapiens
aggatttgtcttcctggtcttctgctgatgaactggacacctcagggtctgtgagtcccacatcaggaaggagcaccccaaacagacaaagtgctggtagcataaggaggatcgggtcataagcaatcccaaactaccaacaagaggaccttgatcttggcgaaagccctcggtgtggcagctttagccctcctccagatcacatgtgtgcaaattatggcttcagaggtggaagataaacagtgacgggggaacaaacagacaacaagaaggtttggaagaaatctggtttgagactctgaaccttagcactaaggagattgagtaaggacctccaaagttccccggactcatgaattctgggcccttggcccattctgtgcacagccaaggacttcagtagaccatctgggcagctttcccatggtgctgctccaaccatcagataaatgaccctcccaagcaccatgtcagtgtcgtacaatctaccaaccaaccagtgctgaagagattttagaaccttgtaacatacaatttttaagagcttatatggcagcttcctttttaccttgttttcctttggggcatgatgttttaacctttgctttagaagcacaagctgtaaatctaaaaggcacttttttttagaggtataaagaaaaactagatgtaataaataagatcatggaaggctttatgtgaaaaaagttgaatgttatagtaaaaaaaaaaagatatttatgtatgtacagtttgctaaagccaagttttgtttgtattgatttctttgcatttattatagatattataaaatagtt

SEQ ID NO: 2008 - protein, 32 aa, Homosapiens [sequence omitted]

SEQ ID NO: 2009 - DNA, 7783 bp, Homosapiens
gggacacagtgagaaaccactgtatgaagtgtttggggctcagatggcagtgtggtggcaggacacacaagcaggggcgacaaagccggagtcctgggagagacttcgggaaagaaaccatggagcagagtccagagggtgaatcgcagttggtcaggtgggctcggaagtgcttagaggaagaaaggaggggaagcctccctgctttgtgattggcctggtgcttttgatcattggcagtttgtctggaatgacaggcatggaatggacaaagtggagaagagcctggctgtgaagcagcctgttcaccatggaaaagagctgtggctcctatcctgaaggtcgtggagccacagcaggatctgcggagggaggtgctgggatcctccctcctcagggatgtgcagattttcatattgtatctttctggataccacagggagaagggcatattcagcggagagagtccaaatgaaaccttttacaacctcagacagaagtagggtggtggcctgaactaggggaagcagaattgggaatggggagaatgggaatgatgtgagaaatcacacagagaagactcctccagaactctcagtccattgaactgggatggaggcgattttctgggctgggcatcttggtgaaagatgcaggtggtcctaggccctgaggaccacaagagggaaggagcactgtgggtgcaggtgggcaagggaggtggggctgtgagagcagggaggggatgagtttgcttgtgtgcatcctgatcttgagatacctgcagaatatccaaatgcaaaagtccagtcgtagatgcacggtgtgaagtgcagaagccagaaatgcagattgggtaggtattcacatgtaaatggcaatggtcctggagtgaacggaggagctcccacaggaagagtgtgtgaaggaaaacaagaaggaccaccacccaagccacacatgcagtgaagggatggacagagaaacagaaactctgtaaggaaggtgaataaaaatagaataaagagttggaggctgatttgtggcacttggaaatgtatctcatacattctgtcaaaggacatctggggaatttctgtttggttctggtggttcacatcagattcccaagggatgacactgttctaaaaagaaaatgatttctctcatttctattttgtctttacagtaaggcctattagtcaggcatatggcatctgaagcagagctgtccaaaaccagccactggccagttgggactgttgagctctgagatgggactgtgcaaattgagatgggttgtgcgtggaaaacatgcttacatgaatttcaaagacttagtacaagaaagaaaataaaatattaataattatattgattacatgttataatccctgtctaatgtagtgttaaaattaattttataagtttctttttacatttctaatgtggctatgaaacctttaagattacatatatagttcacatagaaatatatgggacagcgctgctctggagtctgggctgaaatctcagttctgccatgtactttctgtttaaacttagataaggaacctaattcctctgtgcctcagttttctcatctataaaatgggaataacattcccaggtaccctatagggtttctatgtgataaatttgtgctcagaccagagcctggctcataaaaacactctcagtcactgtgagttcttttttttttttttttttttttttttgagacgaagtctagttctgttgcccaggctggagtgcagtggcacaatctcggctcactgcaacctccacctcccgggttcaagcgatcctcctgcctcagactcccatgtagctgggattacaggtacctgtcaccacacctggctaatttttgtatttttagtagagatggggttccaccatgtcggccaggctggtctcgaattcctgacctcaggtgatccacccgccttggcctcccaaagtgctgggattacaggcgtgagccaccatgccccacccactgtgaattcttatgattcatttcaggaaagctttggtgagcctgcacgctcctctgtgcgctcaggagctatgtgtctagaataactgacttcctttttttcccctaggaaagttattttcctgcacaagggattcagggtttccagaacttagctgtcaacttagactgtgctttttttgcagatgtaatgatccccgaaagccctgaggcctatgtaaaactcacagaaaatgcaatcaaaaatacctccggtaggcacaacaagccggagccagcctccctccctcccctgtatagcaatcctcctctcttagcacatctgctgtctctctcccagctttgtggctctagcatgttaaggcacagccttcctctcttactgctgtactagaaaaaacagctggttaaatccacaccaagaataagatttcactaattgagcgaaataaagtaacttctcaacttgttaaatggtgattggtctcattaggtatagacctctcatgtccattaactgcagaaaatatgagaaggaaaacccagtcatcagcctctgcgccctagtgttctacgtggtgtggtaatttcagcttcactgcatgcagacctacctgtggctggagactcagggtgcaggctctggtcccaagtccgccagcctgcatgagtgacctttggcccatccaccactttatcctcctcatctcaagaatcccgtatgagacaaggggtgagatcagatttcagctctaaaaaatatatgtaattttaatttaagaggtcgtaaaagataatttgaaatgaaaaatgtatttcacggtatgctgagccatagataagaacagaactattcctgaaacaagaagaattaaagaaagaaaaatggaactagttttgcttagtgttgtgttagacaaactgtagtgcaggagttcaggatcagtgatgtgggatgtcggcggggaatagagtttgaacgcagtgatatgatattgaatcacggagttactagtttacgcttcagtttttgaagaaaatcaaaaggacagaaagcaaagtaacattactgagagggtgattcccagggagggacctctcctaggtgtatctagaaggccttttttagaaacaaataaaaacatttaataaagcttactaatatttgttctgctttcaccccatgctagcttcactgatgatcaaatgttcctgtgtagttcgaagactttgacacacacacacacacacacacacactctcagtaattttacaaagaaatgttacaactttgagaggagaatgagccagaattctaggctatgagtaagaacctgcctagatggaaatgttaaaatcttagctttctcctggttttgtttcagatcttagataaaaagcaagtcgttgctagtttgatatctctgtatatatctattctgaggcactcttttcttgattaatgaatttatgccttcagtaaatgatgcagcaacctgagccttccgtgacactatcttcccctgaggtgcatgaagaaaaatcagagggaggatcttcccctgctcactaagcgatagcagaaagaacatgagaaaaagaacagctttctccttactgagatgcagtagacaccattgcagatttttagaaaggccttccacactgacaacattcagatgatcaggggttcagctggaagagggtcaggtgcacgaagctgttcaaaacggactggagagccgttttgcgacgtccgatctgctagggctctcagtcaagcaccttcattggtttggccattttaatgtctaacccaccggcacgatggtactaaatttgctttgtaattacccacacctgccatttctatgctgctgtaactgaaatcatttctgaaacttctccttgaatatcaagctttaaataagtcaaatagtttgtccagtaaagattcttatggttgccaccgcaggggaccacagtgccctagagtcacagatccgacaactgggcaaagccctggatgatagccgttttcagatacagcaaaccgaaaatatcattcgcagcaaaactcccacggggccggagctagacaccagctacaaaggctacatgaaactgctgggcgaatgcagtagcagtatagactccgtgaagagactggagcacaaactgaaggaggaagaggagagccttcctggctttgttaacctgcatagtaccgaaacccaaacggctggtgtgattgaccgatgggagcttctccaggcccaggcattgagcaaggagttgaggatgaagcagaacctccagaagtggcagcagtttaactcagacttgaacagcatctgggcctggctgggggacacggaggaggagttggaacagctccagcgtctggaactcagcactgacatccagaccatcgagctccagatcaaaaagctcaaggagctccagaaagctgtggaccaccgcaaagccatcatcctctccatcaatctctgcagccctgagttcacccaggctgacagcaaggagagccgggacctgcaggatcgcttgtcgcagatgaatgggcgctgggaccgagtgtgctctctgctggaggagtggcggggcctgctgcaggatgccctgatgcagtgccagggtttccatgaaatgagccatggtttgcttcttatgctggagaacattgacagaaggaaaaatgaaattgtccctattgattctaaccttgatgcagagatacttcaggaccatcacaaacagcttatggtaagatgtgtgaactctggcagcctccagttatttttagcagggttgcatttcatttacagaaaatgaatataagtggtaagtgttgtttctttttttttaactttttgcattatagtctctactttacacttttttaactccctgtggtttccaatctttgtaaagcaaacatgtgcatagaagatgatatctgctagctttagaatctgattctaaagttgttgctcagttgtaaaaatcttagtgttctcaagcaatcttaattagcttgtgttgtttattaaggcagcttaatttaaacttcatgttacatctatggcccaaaagtatatttggtggcttgtagtaaaaggtcattaaaatattagaatagaatgagacaattaagtcttttgtttgtttttgttgtcgttgttttttgagacagagtctcactctgttgcccagggtggagtgcagtggtgcgatctcggctcactgcaatctccgcctccgggattcgagcaattctcctgccaattctcctgcctcaccctcccgagtaggtgggactacaggtgtaagccaccacgcctcactaatgtttgtatttttagtagagacagggtttcaccatgttggccaggctggtctcgaactcctggccgcaggtgatccacctgcctcagcctcccaaagtgctgggattacaggcatgagccaccacacccagccgagtctttcaaagaggaattaaatacatcagattaaacatgaacctgagcatcaagttttctgaaagccaagacaaaatgggaaacaaggagtaaacttactttcattatctggcaaaaacaaaacataccacttctcaaggaaggagaaactttttctagcactaaattcaagaggaaattaactggtagactcttatacaaggatctttggacaatataatgtacagtatatttaagtgactttatagaagataaggaagcatatttgagttccattagaagaaaatattatgcactttgtagctctctgtatttttaaaatgttatgtcttaacatttaacactcacctaaactacagaattggtaccttttaattcagtaccataatagtcttagaaacctagaggaaatagctgtggaactgcatttttacttcactttgacctctggcatcaagctgtgaatgacgaatcaccccttttttttttcaaatcttgactagatatcagaggatacctagacatacttctgcttcgctatatttaatgttgtgcttttctgtttaaaagattatcttacatctcacttgcatactaatctatattttaattactgtcatatatacattaactaatttgaaccttccaataatactgtggaccaggcatcaaatcaaactgagatcagagacggtcaggggtcttatagaatatttttggcagaggcaggattagaactcaggccgtgagctgctgcatcctttagtgtgtgagctccacgtttgatgctcaggtataatttcccaccaagttaagttgattgcattctgcacttttggagcttttgccaattatcaaaaatgcttagaaaaattaatttgtttttgtatgcatagcaaataaagcatgagctgttggaatcccaactcagagtagcctctttgcaagacatgtcttgccaactactggtgaatgctgaaggaacagactgtttagaagccaaagaaaaagtccatgttattggaaatcggctcaaacttctcttgaaggaggtcagtcgtcatatcaaggaactggagaagttattagacgtgtcaagtagtcagcaggatttgtcttcctggtcttctgctgatgaactggacacctcagggtctgtgagtcccacatcaggaaggagcaccccaaacagacagaaaacgccacgaggcaagtgtagtctctcacagcctggaccctctgtcagcagtccacatagcaggtccacaaaaggtggctccgattcctccctttctgagccagggccaggtcggtccggccgcggcttcctgttcagagtcctccgagcagctcttccccttcagcttctcctgctcctcctcatcgggcttgcctgccttgtaccaatgtcagaggaagactacagctgtgccctctccaacaactttgcccggtcattccaccccatgctcagatacacgaatggccctcctccactctgaactaagcagatgccatctgcagaagtgctggtagcataaggaggatcgggtcataagcaatcccaaactaccaacaagaggaccttgatcttggcgaaagccctcggtgtggcagctttagccctcctccagatcacatgtgtgcaaattatggcttcagaggtggaagataaacagtgacgggggaacaaacagacaacaagaaggtttggaagaaatctggtttgagactctgaaccttagcactaaggagattgagtaaggacctccaaagttccccggactcatgaattctgggcccttggcccattctgtgcacagccaaggacttcagtagaccatctgggcagctttcccatggtgctgctccaaccatcagataaatgaccctcccaagcaccatgtcagtgtcgtacaatctaccaaccaaccagtgctgaagagattttagaaccttgtaacatacaatttttaagagcttatatggcagcttcctttttaccttgttttcctttggggcatgatgttttaacctttgctttagaagcacaagctgtaaatctaaaaggcacttttttttagaggtataaagaaaaactagatgtaataaataagatcatggaaggctttatgtgaaaaaagttgaatgttatagtaaaaaaaaaaagatatttatgtatgtacagtttgctaaagccaagttttgtttgtattgatttctttgcatttattatagatattataaaatagtt

SEQ ID NO: 2010 - protein, 298 aa, Homosapiens
MVATAGDHSALESQIRQLGKALDDSRFQIQQTENIIRSKTPTGPELDTSYKGYMKLLGECSSSIDSVKRLEHKLKEEEESLPGFVNLHSTETQTAGVIDRWELLQAQALSKELRMKQNLQKWQQFNSDLNSIWAWLGDTEEELEQLQRLELSTDIQTIELQIKKLKELQKAVDHRKAIILSINLCSPEFTQADSKESRDLQDRLSQMNGRWDRVCSLLEEWRGLLQDALMQCQGFHEMSHGLLLMLENIDRRKNEIVPIDSNLDAEILQDHHKQLMVRCVNSGSLQLFLAGLHFIYRK

SEQ ID NO: 2011 - DNA, 3763 bp, Homosapiens
acacagacaaggggaaactttcatccccacgcaggatatagctttttgctctgcagagtctaacttttgcaagtggaagcttcatggtggtggcggaggacctgagtgccctgaggatggcagaggacagctgtgtggatgcagatctcccagattgtaactgcgatgtcacaagggtgaagaagctgaaggagaccctggtagccgtgcagcagcttgataagaacatgagcagcctgaggacctggctcgctcacatcgagtcagagctggccaagccaatagtctacgattcctgtaactcggaagaaatacagagaaagcttaatgagcagcaggagcttcagagagacatagagaagcacagtacaggtgttgcatctgtcctcaacctgtgtgaagtcctgctgcacgactgtgacgcctgtgccactgatgccgagtgtgactctatacagcaggctacgagaaacctggaccggcggtggagaaacatttgtgctatgtccatggaaaggaggctgaaaatcgaagagacgtggcgattgtggcagaaatttctggatgactattcacgttttgaagattggctgaagtcttcagaaaggacagctgcttttcccagctcttctggggtgatctatacagttgccaaggaagaactaaagaaatttgaggctttccagcgacaggtccacgagtgcctgacgcagctggaactgatcaacaagcagtaccgccgcctggccagggagaaccgcactgattcagcatgtagcctcaaacagatggttcacgaaggcaaccagagatgggacaacctgcaaaagcgtgtcacctccatcttgcgcagactcaagcattttattggccagcgtgaggagtttgagactgcgcgggacagcattctggtctggctcacagagatggatctgcagctcactaatattgaacatttttctgagtgtgatgttcaagctaaaataaagcaactcaaggccttccagcaggaaatttcactgaaccacaataagattgagcagataattgcccaaggagaacagctgatagaaaagagtgagcccttggatgcagcgatcatcgaggaggaactagatgagctccgacggtactgccaggaggtcttcgggcgtgtggaaagataccataagaaactgatccgcctgcctctcccagacgatgagcacgacctctcagacagggagctggagctggaagactctgcagctctgtcggacctgcactggcacgaccgctctgcagacagcctgctttctccacagccttcctccaatctctccctctcgctcgctcagcccctccggagcgagcggtcaggacgagacaccccggctagtgtggactccatccccctggagtgggatcacgactatgacctcagtcgggacctggagtctgcaatgtccagagctctgccctctgaggatgaagaaggtcaggatgacaaagatttctacctccggggagctgttggcttatcagatgtaatgatccccgaaagccctgaggcctatgtaaaactcacagaaaatgcaatcaaaaatacctccggggaccacagtgccctagagtcacagatccgacaactgggcaaagccctggatgatagccgttttcagatacagcaaaccgaaaatatcattcgcagcaaaactcccacggggccggagctagacaccagctacaaaggctacatgaaactgctgggcgaatgcagtagcagtatagactccgtgaagagactggagcacaaactgaaggaggaagaggagagccttcctggctttgttaacctgcatagtaccgaaacccaaacggctggtgtgattgaccgatgggagcttctccaggcccaggcattgagcaaggagttgaggatgaagcagaacctccagaagtggcagcagtttaactcagacttgaacagcatctgggcctggctgggggacacggaggaggagttggaacagctccagcgtctggaactcagcactgacatccagaccatcgagctccagatcaaaaagctcaaggagctccagaaagctgtggaccaccgcaaagccatcatcctctccatcaatctctgcagccctgagttcacccaggctgacagcaaggagagccgggacctgcaggatcgcttgtcgcagatgaatgggcgctgggaccgagtgtgctctctgctggaggagtggcggggcctgctgcaggatgccctgatgcagtgccagggtttccatgaaatgagccatggtttgcttcttatgctggagaacattgacagaaggaaaaatgaaattgtccctattgattctaaccttgatgcagagatacttcaggaccatcacaaacagcttatgcaaataaagcatgagctgttggaatcccaactcagagtagcctctttgcaagacatgtcttgccaactactggtgaatgctgaaggaacagactgtttagaagccaaagaaaaagtccatgttattggaaatcggctcaaacttctcttgaaggaggtcagtcgtcatatcaaggaactggagaagttattagacgtgtcaagtagtcagcaggatttgtcttcctggtcttctgctgatgaactggacacctcagggtctgtgagtcccacatcaggaaggagcaccccaaacagacagaaaacgccacgaggcaagtgtagtctctcacagcctggaccctctgtcagcagtccacatagcaggtccacaaaaggtggctccgattcctccctttctgagccagggccaggtcggtccggccgcggcttcctgttcagagtcctccgagcagctcttccccttcagcttctcctgctcctcctcatcgggcttgcctgccttgtaccaatgtcagaggaagactacagctgtgccctctccaacaactttgcccggtcattccaccccatgctcagatacacgaatggccctcctccactctgaactaagcagatgccatctgcagaagtgctggtagcataaggaggatcgggtcataagcaatcccaaactaccaacaagaggaccttgatcttggcgaaagccctcggtgtggcagctttagccctcctccagatcacatgtgtgcaaattatggcttcagaggtggaagataaacagtgacgggggaacaaacagacaacaagaaggtttggaagaaatctggtttgagactctgaaccttagcactaaggagattgagtaaggacctccaaagttccccggactcatgaattctgggcccttggcccattctgtgcacagccaaggacttcagtagaccatctgggcagctttcccatggtgctgctccaaccatcagataaatgaccctcccaagcaccatgtcagtgtcgtacaatctaccaaccaaccagtgctgaagagattttagaaccttgtaacatacaatttttaagagcttatatggcagcttcctttttaccttgttttcctttggggcatgatgttttaacctttgctttagaagcacaagctgtaaatctaaaaggcacttttttttagaggtataaagaaaaactagatgtaataaataagatcatggaaggctttatgtgaaaaaagttgaatgttatagtaaaaaaaaaaagatatttatgtatgtacagtttgctaaagccaagttttgtttgtattgatttctttgcatttattatagatattataaaatagtt

SEQ ID NO: 2012 - protein, 975 aa, Homosapiens
MVVAEDLSALRMAEDSCVDADLPDCNCDVTRVKKLKETLVAVQQLDKNMSSLRTWLAHIESELAKPIVYDSCNSEEIQRKLNEQQELQRDIEKHSTGVASVLNLCEVLLHDCDACATDAECDSIQQATRNLDRRWRNICAMSMERRLKIEETWRLWQKFLDDYSRFEDWLKSSERTAAFPSSSGVIYTVAKEELKKFEAFQRQVHECLTQLELINKQYRRLARENRTDSACSLKQMVHEGNQRWDNLQKRVTSILRRLKHFIGQREEFETARDSILVWLTEMDLQLTNIEHFSECDVQAKIKQLKAFQQEISLNHNKIEQIIAQGEQLIEKSEPLDAAIIEEELDELRRYCQEVFGRVERYHKKLIRLPLPDDEHDLSDRELELEDSAALSDLHWHDRSADSLLSPQPSSNLSLSLAQPLRSERSGRDTPASVDSIPLEWDHDYDLSRDLESAMSRALPSEDEEGQDDKDFYLRGAVGLSDVMIPESPEAYVKLTENAIKNTSGDHSALESQIRQLGKALDDSRFQIQQTENIIRSKTPTGPELDTSYKGYMKLLGECSSSIDSVKRLEHKLKEEEESLPGFVNLHSTETQTAGVIDRWELLQAQALSKELRMKQNLQKWQQFNSDLNSIWAWLGDTEEELEQLQRLELSTDIQTIELQIKKLKELQKAVDHRKAIILSINLCSPEFTQADSKESRDLQDRLSQMNGRWDRVCSLLEEWRGLLQDALMQCQGFHEMSHGLLLMLENIDRRKNEIVPIDSNLDAEILQDHHKQLMQIKHELLESQLRVASLQDMSCQLLVNAEGTDCLEAKEKVHVIGNRLKLLLKEVSRHIKELEKLLDVSSSQQDLSSWSSADELDTSGSVSPTSGRSTPNRQKTPRGKCSLSQPGPSVSSPHSRSTKGGSDSSLSEPGPGRSGRGFLFRVLRAALPLQLLLLLLIGLACLVPMSEEDYSCALSNNFARSFHPMLRYTNGPPPL

SEQ ID NO: 2013 - DNA, 3897 bp, Homosapiens
aaggtaaagccactagagagaaactgaaagaaaacattcttaagataaattgaattgacattttctctctaaaatatgatttatagaccacagataggaattaagagtttcctgataattttggcttcatattattttaaaggattatcaagaggaaattgctattgctcaagagaacaaaatacagctccaacaaatgggagaacgacttgctaaagccagccatgaaagcaaagcatctgagattgaatacaagctgggaaaggtcaacgaccggtggcagcatctcctggacctcattgcagccagggtgaagaagctgaaggagaccctggtagccgtgcagcagcttgataagaacatgagcagcctgaggacctggctcgctcacatcgagtcagagctggccaagccaatagtctacgattcctgtaactcggaagaaatacagagaaagcttaatgagcagcaggagcttcagagagacatagagaagcacagtacaggtgttgcatctgtcctcaacctgtgtgaagtcctgctgcacgactgtgacgcctgtgccactgatgccgagtgtgactctatacagcaggctacgagaaacctggaccggcggtggagaaacatttgtgctatgtccatggaaaggaggctgaaaatcgaagagacgtggcgattgtggcagaaatttctggatgactattcacgttttgaagattggctgaagtcttcagaaaggacagctgcttttcccagctcttctggggtgatctatacagttgccaaggaagaactaaagaaatttgaggctttccagcgacaggtccacgagtgcctgacgcagctggaactgatcaacaagcagtaccgccgcctggccagggagaaccgcactgattcagcatgtagcctcaaacagatggttcacgaaggcaaccagagatgggacaacctgcaaaagcgtgtcacctccatcttgcgcagactcaagcattttattggccagcgtgaggagtttgagactgcgcgggacagcattctggtctggctcacagagatggatctgcagctcactaatattgaacatttttctgagtgtgatgttcaagctaaaataaagcaactcaaggccttccagcaggaaatttcactgaaccacaataagattgagcagataattgcccaaggagaacagctgatagaaaagagtgagcccttggatgcagcgatcatcgaggaggaactagatgagctccgacggtactgccaggaggtcttcgggcgtgtggaaagataccataagaaactgatccgcctgcctctcccagacgatgagcacgacctctcagacagggagctggagctggaagactctgcagctctgtcggacctgcactggcacgaccgctctgcagacagcctgctttctccacagccttcctccaatctctccctctcgctcgctcagcccctccggagcgagcggtcaggacgagacaccccggctagtgtggactccatccccctggagtgggatcacgactatgacctcagtcgggacctggagtctgcaatgtccagagctctgccctctgaggatgaagaaggtcaggatgacaaagatttctacctccggggagctgttggcttatcagatgtaatgatccccgaaagccctgaggcctatgtaaaactcacagaaaatgcaatcaaaaatacctccggggaccacagtgccctagagtcacagatccgacaactgggcaaagccctggatgatagccgttttcagatacagcaaaccgaaaatatcattcgcagcaaaactcccacggggccggagctagacaccagctacaaaggctacatgaaactgctgggcgaatgcagtagcagtatagactccgtgaagagactggagcacaaactgaaggaggaagaggagagccttcctggctttgttaacctgcatagtaccgaaacccaaacggctggtgtgattgaccgatgggagcttctccaggcccaggcattgagcaaggagttgaggatgaagcagaacctccagaagtggcagcagtttaactcagacttgaacagcatctgggcctggctgggggacacggaggaggagttggaacagctccagcgtctggaactcagcactgacatccagaccatcgagctccagatcaaaaagctcaaggagctccagaaagctgtggaccaccgcaaagccatcatcctctccatcaatctctgcagccctgagttcacccaggctgacagcaaggagagccgggacctgcaggatcgcttgtcgcagatgaatgggcgctgggaccgagtgtgctctctgctggaggagtggcggggcctgctgcaggatgccctgatgcagtgccagggtttccatgaaatgagccatggtttgcttcttatgctggagaacattgacagaaggaaaaatgaaattgtccctattgattctaaccttgatgcagagatacttcaggaccatcacaaacagcttatgcaaataaagcatgagctgttggaatcccaactcagagtagcctctttgcaagacatgtcttgccaactactggtgaatgctgaaggaacagactgtttagaagccaaagaaaaagtccatgttattggaaatcggctcaaacttctcttgaaggaggtcagtcgtcatatcaaggaactggagaagttattagacgtgtcaagtagtcagcaggatttgtcttcctggtcttctgctgatgaactggacacctcagggtctgtgagtcccacatcaggaaggagcaccccaaacagacagaaaacgccacgaggcaagtgtagtctctcacagcctggaccctctgtcagcagtccacatagcaggtccacaaaaggtggctccgattcctccctttctgagccagggccaggtcggtccggccgcggcttcctgttcagagtcctccgagcagctcttccccttcagcttctcctgctcctcctcatcgggcttgcctgccttgtaccaatgtcagaggaagactacagctgtgccctctccaacaactttgcccggtcattccaccccatgctcagatacacgaatggccctcctccactctgaactaagcagatgccatctgcagaagtgctggtagcataaggaggatcgggtcataagcaatcccaaactaccaacaagaggaccttgatcttggcgaaagccctcggtgtggcagctttagccctcctccagatcacatgtgtgcaaattatggcttcagaggtggaagataaacagtgacgggggaacaaacagacaacaagaaggtttggaagaaatctggtttgagactctgaaccttagcactaaggagattgagtaaggacctccaaagttccccggactcatgaattctgggcccttggcccattctgtgcacagccaaggacttcagtagaccatctgggcagctttcccatggtgctgctccaaccatcagataaatgaccctcccaagcaccatgtcagtgtcgtacaatctaccaaccaaccagtgctgaagagattttagaaccttgtaacatacaatttttaagagcttatatggcagcttcctttttaccttgttttcctttggggcatgatgttttaacctttgctttagaagcacaagctgtaaatctaaaaggcacttttttttagaggtataaagaaaaactagatgtaataaataagatcatggaaggctttatgtgaaaaaagttgaatgttatagtaaaaaaaaaaagatatttatgtatgtacagtttgctaaagccaagttttgtttgtattgatttctttgcatttattatagatattataaaatagtt

SEQ ID NO: 2014 - protein, 982 aa, Homosapiens
MGERLAKASHESKASEIEYKLGKVNDRWQHLLDLIAARVKKLKETLVAVQQLDKNMSSLRTWLAHIESELAKPIVYDSCNSEEIQRKLNEQQELQRDIEKHSTGVASVLNLCEVLLHDCDACATDAECDSIQQATRNLDRRWRNICAMSMERRLKIEETWRLWQKFLDDYSRFEDWLKSSERTAAFPSSSGVIYTVAKEELKKFEAFQRQVHECLTQLELINKQYRRLARENRTDSACSLKQMVHEGNQRWDNLQKRVTSILRRLKHFIGQREEFETARDSILVWLTEMDLQLTNIEHFSECDVQAKIKQLKAFQQEISLNHNKIEQIIAQGEQLIEKSEPLDAAIIEEELDELRRYCQEVFGRVERYHKKLIRLPLPDDEHDLSDRELELEDSAALSDLHWHDRSADSLLSPQPSSNLSLSLAQPLRSERSGRDTPASVDSIPLEWDHDYDLSRDLESAMSRALPSEDEEGQDDKDFYLRGAVGLSDVMIPESPEAYVKLTENAIKNTSGDHSALESQIRQLGKALDDSRFQIQQTENIIRSKTPTGPELDTSYKGYMKLLGECSSSIDSVKRLEHKLKEEEESLPGFVNLHSTETQTAGVIDRWELLQAQALSKELRMKQNLQKWQQFNSDLNSIWAWLGDTEEELEQLQRLELSTDIQTIELQIKKLKELQKAVDHRKAIILSINLCSPEFTQADSKESRDLQDRLSQMNGRWDRVCSLLEEWRGLLQDALMQCQGFHEMSHGLLLMLENIDRRKNEIVPIDSNLDAEILQDHHKQLMQIKHELLESQLRVASLQDMSCQLLVNAEGTDCLEAKEKVHVIGNRLKLLLKEVSRHIKELEKLLDVSSSQQDLSSWSSADELDTSGSVSPTSGRSTPNRQKTPRGKCSLSQPGPSVSSPHSRSTKGGSDSSLSEPGPGRSGRGFLFRVLRAALPLQLLLLLLIGLACLVPMSEEDYSCALSNNFARSFHPMLRYTNGPPPL

SEQ ID NO: 2015 - DNA, 8192 bp, Homosapiens
tgttctcacgagggggcagcttgggcttgaccgagcaggagcttcatggtcccacacgtagtatgacatgtgacctctgcacattgtttacagttcctaaactgtgatttctttttctgtgaaatagttataatagtaagtggctaccaagtagaaagtggtcatggggggtgaaggttaaacacaataacggacacacagaacttacacagggcattttatgccaagctatattgaatatctatatccctctacctgcccgtcaatgtcatgaatattgacaattcactctagaccctgctagaagaatccaaagaaattgacagtgagctggaagcaatgactgagaaattacagtacctcactagcgtgtactgtacagaaaaaatgtctcagcaagtggcagaactgggacgggagactgaggagttgcgacagatgatcaaaattcgtttgcagaacctccaagatgcagctaaggatatgaaaaaatttgaagcagagttgaaaaagttacaagctgccttggagcaagcccaggcaacactgacttctccagaagttggacgtctcagtctcaaggagcagctctctcatcggcagcatttgttgtctgagatggagtcactgaagccgaaggtgcaagcagtgcagctctgccagagtgccctccggatccccgaggatgtggttgccagcttacctctctgtcatgctgctctgcggctgcaggaagaggccagccggctgcagcacaccgccatccagcagtgtaacatcatgcaggcagctgtggtacaatatgaacaatatgagcaagaaatgaaacatctccagcaactgatagaaggagctcacagagagattgaggataaacctgttgccaccagtaacatacaggagctgcaggctcagatttctcggcatgaggagctggcgcagaaaattaagggctaccaggagcagatcgcttctttgaattccaagtgcaagatgctgacgatgaaagccaagcacgccaccatgctgctgacggtgaccgaggtcgaggggctggcggaagggacagaggacctggatggggagctcctccccacgccttcggcccacccctctgtggtcatgatgactgcaggtcgctgtcacactttgctgtcaccggtcactgaggagtctggggaggagggaaccaacagtgagatttcctctccacctgcctgtcgctccccttcacctgtggctaatacagatgcttctgttaaccaggacattgcatattaccaagccttgtctgctgagaggttgcagacagatgctgcaaaaattcaccccagcacatccgcatcccaggagttctatgaaccgggattggagccatccgctactgccaaactgggtgatttgcagcgttcttgggaaaccttaaagaatgtgatcagtgagaagcagcgcacactctatgaagctttggaacgccagcagaagtaccaggactccctccagtccatctctacgaagatggaggccattgagctgaaactcagtgagagcccagagcctggcaggagtccagaaagccagatggctgaacatcaggcattgatggatgagattctcatgctccaggatgaaatcaatgagctccagtcctctctcgcagaggagctggtatccgagtcttgtgaggccgaccctgcggagcagctggccttgcagtccacgctcactgtcttagccgagcgaatgtccaccatcaggatgaaagcctcggggaaacggcagcttttggaggagaagttgaatgatcagctggaggaacaaaggcaggaacaggccctgcagaggtatcgctgtgaagccgatgagctggacagctggctcttgagtaccaaggccactctggacactgcgctgagtccacccaaggagcccatggacatggaggcccagcttatggactgccagaatatgctggtggaaatagagcagaaggtggtggctttatcagaactgtcagtccacaatgagaacctgctgctggagggcaaagctcacaccaaggacgaggccgagcagctggctggaaagctgagaaggctcaaggggagcctgctggagctgcagagagccctgcatgataagcagctcaacatgcagggaacagcacaggagaaggaggagagcgatgttgacctaacagccacgcagagccccggcgtccaggaatggctggcccaagctcgcaccacatggacccagcagcggcagagcagtctccagcaacaaaaagagttagaacaggaattagccgagcagaagagtctccttcgctcagtagccagtcgtggagaggagattctaattcaacattcggcggcagagacctctggtgatgctggcgaaaaacctgatgtgttatcccaggagttggggatggaaggggagaaatcatccgctgaagaccagatgagaatgaaatgggaaagcctacatcaagaatttagtaccaagcagaaactactacagaatgttctggaacaggaacaagagcaagtgctttatagcaggccaaatcgactcttgtctggtgtgccactgtacaaaggggacgtgccaacccaagataaatctgcagttacatctttgctggatggactgaaccaagccttcgaggaggtttcatcccagagtggaggggcaaagaggcagagtatacacttggagcagaagttgtatgatggagtctcagccacctctacttggttggatgacgttgaagaacgtttatttgttgccacagcacttttaccagaagaaacagagacttgtctcttcaaccaagagattcttgccaaagacattaaggaaatgtctgaagaaatggataagaacaaaaacttgttttcccaagcttttccagagaatggtgataatcgagatgttattgaagatactttgggttgtcttttgggcaggttatccttgctagactcagtagtgaatcaacgatgtcatcagatgaaagaaagacttcagcaaatactaaatttccagaatgatctgaaagtgctgtttacatcactggctgacaacaaatacatcattctgcaaaaactggcaaatgtgtttgaacagcccgtagcagaacaaatagaggcaatacaacaggctgaagatggactcaaagaatttgatgcaggaatcattgaattaaagaggcgtggtgacaagctacaggtcgagcagccgtccatgcaagaactctccaagctccaggacatgtatgatgagctgatgatgatcattggctcccggaggagtggtctgaatcagaaccttacactcaagagtcagtatgagagggccctacaagatctggctgacctgctagaaactggtcaggagaagatggcaggagaccagaaaatcatcgtgtcttccaaagaggaaatccagcaactacttgacaaacataaggaatactttcagggcctggaatctcatatgatcttgactgaaacactcttcagaaagataatcagctttgcagtccaaaaggaaacccagttccatacagagctgatggctcaggcttctgctgtactgaaacgggctcacaagaggggtgtggagctggagtacattctagagacgtggtcccatctggatgaggaccagcaggagctcagcagacagctggaggtggtggaaagcagcatcccaagcgtgggtctggtggaggagaacgaggacaggcttattgaccgcataacactctaccagcatttaaaatctagccttaatgaataccagcccaaattatatcaagtattagatgatgggaaacgacttctgatatccatcagctgctcagatctagaaagccaactaaatcaacttggagagtgctggctaagtaacaccaataaaatgtctaaggaacttcacagactggaaacaatattgaaacactggaccagatatcaaagtgaatctgcagatctaattcactggttacaatctgcaaaagaccggctagaattttggactcagcaatctgtgacagtcccacaagagctggaaatggtccgtgatcatctaaatgctttcctggagttttctaaagaagtggatgcccaatcttccctgaaatcatctgttctgagtactggaaatcagctccttcgactaaaaaaggtggacacagccacgctgcgctctgagctgtcgcgcattgatagccagtggactgacctgctaaccaatatcccagccgtccaggagaagctccaccagctccagatggataaactgccttcccgccatgccatttctgaagtcatgagttggatttctctaatggaaaatgttattcagaaggatgaagataatattaaaaattccataggttacaaggcaattcatgaataccttcagaaatataagggttttaagatagacattaactgtaaacagctgacagtggattttgtgaaccagtccgtgctacaaatcagcagtcaggatgtggaaagtaagcgtagtgataagactgattttgctgagcaacttggagcaatgaataaaagttggcaaattctgcaaggtctagtaactgagaagatccagctgttggaaggcttattggaatcttggtcagaatatgaaaataatgtacaatgtctgaaaacatggtttgaaacccaggaaaagagactaaaacaacagcatcgaattggagatcaggcttctgttcaaaatgcactgaaagactgtcaggatctggaagatttgattaaagcaaaagaaaaagaagtagagaaaattgagcagaatggacttgctttgattcagaacaagaaagaagacgtctctagcattgtcatgagcacactgcgagagctcggccaaacctgggcaaatttagatcacatggttggacaattaaagatactgctgaaatcagtgcttgaccaatggagtagtcacaaagtggcctttgacaagataaacagttacctcatggaggccagatactctctttcccgattccgtctgctgactggctccttagaagctgtgcaagttcaggtggacaatcttcagaatctccaagatgatctggaaaaacaggaaaggagcttacagaaatttggctctatcaccaaccaattattaaaagagtgtcacccacccgtgacagaaactcttaccaatacactgaaagaagtcaacatgagatggaataacttgctggaagagattgctgagcagctacagtccagcaaggccctacttcagctttggcaaagatacaaggactactccaaacagtgtgcttcgacagttcagcagcaggaggatcgaaccaatgagctgttgaaggcagccacaaacaaggacattgccgatgatgaggttgccacatggattcaagattgcaacgacctcctcaaaggactgggcacagttaaagattccctcttttttctccatgagctgggagagcaactgaagcaacaagtggatgcttccgcagcatcagctattcaatcggatcaactctctttgagtcaacacttgtgtgccctggagcaagctctctgcaaacagcagacttcattacaggctggagttcttgattatgaaacctttgccaagagtttagaagctttggaggcctggatagtggaagctgaagaaatactacaagggcaggaccctagccactcatctgacctctccacaatccaggaaaggatggaagaacttaagggacagatgttaaaattcagcagcatggctccagatttagaccgtctaaatgagcttggatataggttacccttgaatgataaggaaatcaaaagaatgcagaatctgaaccgccattggtctctgatctcctctcagactacagaaagattcagcaagttgcagtcatttttgctacaacatcagactttcttggaaaaatgtgaaacatggatggaattcctagttcagacagaacaaaagttagcagtagagatttcaggaaattatcagcaccttttggaacagcagagagcacacgagttgtttcaagccgagatgttcagtcgtcagcagattttgcactcaatcattattgatgggcaacgtcttctagaacaaggtcaagttgatgacagggatgaattcaacctgaaattgacactcctcagtaatcaatggcagggagtgattcgcagggcccagcagaggcgggggatcattgacagccagattcgccagtggcagcgctatagggagatggcagaaaagcttcgtaaatggttggttgaagtgtcctacctccccatgagtggtctcggaagtgttcctataccactgcaacaagcaaggaccctctttgatgaagtgcagttcaaagaaaaagtgtttctgcggcaacaaggcagctacatcctgactgtggaggctggcaagcaactccttctctcggcggacagtggcgctgaggccgccttgcaggccgaactcgctgaaatccaagagaaatggaaatcagccagcatgcggctggaagaacagaagaaaaaactagccttcttgttgaaagactgggaaaaatgtgagaaaggaatagcagattccctggagaaactacgaactttcaaaaagaagctttcgcagtctctcccggatcaccatgaagagctccatgcagaacaaatgcgttgcaaggaattagaaaatgcagttgggagctggacagatgacttgacccagttgagcctgctgaaggacaccctctctgcctatatcagtgctgatgatatctccattcttaatgaacgcgtagagcttctgcaaaggcagtgggaagaactatgccaccagctctccttaaggcggcagcaaataggtgaaagattgaatgaatgggcagtcttcagtgaaaagaacaaggaactctgtgagtggttgactcaaatggaaagcaaagtttctcagaatggagacattctcattgaagaaatgatagagaagctcaagaaggattatcaagaggaaattgctattgctcaagagaacaaaatacagctccaacaaatgggagaacgacttgctaaagccagccatgaaagcaaagcatctgagattgaatacaagctgggaaaggtcaacgaccggtggcagcatctcctggacctcattgcagccagggtgaagaagctgaaggagaccctggtagccgtgcagcagcttgataagaacatgagcagcctgaggacctggctcgctcacatcgagtcagagctggccaagccaatagtctacgattcctgtaactcggaagaaatacagagaaagcttaatgagcagcaggagcttcagagagacatagagaagcacagtacaggtgttgcatctgtcctcaacctgtgtgaagtcctgctgcacgactgtgacgcctgtgccactgatgccgagtgtgactctatacagcaggctacgagaaacctggaccggcggtggagaaacatttgtgctatgtccatggaaaggaggctgaaaatcgaagagacgtggcgattgtggcagaaatttctggatgactattcacgttttgaagattggctgaagtcttcagaaaggacagctgcttttcccagctcttctggggtgatctatacagttgccaaggaagaactaaagaaatttgaggctttccagcgacaggtccacgagtgcctgacgcagctggaactgatcaacaagcagtaccgccgcctggccagggagaaccgcactgattcagcatgtagcctcaaacagatggttcacgaaggcaaccagagatgggacaacctgcaaaagcgtgtcacctccatcttgcgcagactcaagcattttattggccagcgtgaggagtttgagactgcgcgggacagcattctggtctggctcacagagatggatctgcagctcactaatattgaacatttttctgagtgtgatgttcaagctaaaataaagcaactcaaggccttccagcaggaaatttcactgaaccacaataagattgagcagataattgcccaaggagaacagctgatagaaaagagtgagcccttggatgcagcgatcatcgaggaggaactagatgagctccgacggtactgccaggaggtcttcgggcgtgt

SEQ ID NO: 2016 - protein, 3212 aa, Homosapiens
MTEKLQYLTSVYCTEKMSQQVAELGRETEELRQMIKIRLQNLQDAAKDMKKFEAELKKLQAALEQAQATLTSPEVGRLSLKEQLSHRQHLLSEMESLKPKVQAVQLCQSALRIPEDVVASLPLCHAALRLQEEASRLQHTAIQQCNIMQAAVVQYEQYEQEMKHLQQLIEGAHREIEDKPVATSNIQELQAQISRHEELAQKIKGYQEQIASLNSKCKMLTMKAKHATMLLTVTEVEGLAEGTEDLDGELLPTPSAHPSVVMMTAGRCHTLLSPVTEESGEEGTNSEISSPPACRSPSPVANTDASVNQDIAYYQALSAERLQTDAAKIHPSTSASQEFYEPGLEPSATAKLGDLQRSWETLKNVISEKQRTLYEALERQQKYQDSLQSISTKMEAIELKLSESPEPGRSPESQMAEHQALMDEILMLQDEINELQSSLAEELVSESCEADPAEQLALQSTLTVLAERMSTIRMKASGKRQLLEEKLNDQLEEQRQEQALQRYRCEADELDSWLLSTKATLDTALSPPKEPMDMEAQLMDCQNMLVEIEQKVVALSELSVHNENLLLEGKAHTKDEAEQLAGKLRRLKGSLLELQRALHDKQLNMQGTAQEKEESDVDLTATQSPGVQEWLAQARTTWTQQRQSSLQQQKELEQELAEQKSLLRSVASRGEEILIQHSAAETSGDAGEKPDVLSQELGMEGEKSSAEDQMRMKWESLHQEFSTKQKLLQNVLEQEQEQVLYSRPNRLLSGVPLYKGDVPTQDKSAVTSLLDGLNQAFEEVSSQSGGAKRQSIHLEQKLYDGVSATSTWLDDVEERLFVATALLPEETETCLFNQEILAKDIKEMSEEMDKNKNLFSQAFPENGDNRDVIEDTLGCLLGRLSLLDSVVNQRCHQMKERLQQILNFQNDLKVLFTSLADNKYIILQKLANVFEQPVAEQIEAIQQAEDGLKEFDAGIIELKRRGDKLQVEQPSMQELSKLQDMYDELMMIIGSRRSGLNQNLTLKSQYERALQDLADLLETGQEKMAGDQKIIVSSKEEIQQLLDKHKEYFQGLESHMILTETLFRKIISFAVQKETQFHTELMAQASAVLKRAHKRGVELEYILETWSHLDEDQQELSRQLEVVESSIPSVGLVEENEDRLIDRITLYQHLKSSLNEYQPKLYQVLDDGKRLLISISCSDLESQLNQLGECWLSNTNKMSKELHRLETILKHWTRYQSESADLIHWLQSAKDRLEFWTQQSVTVPQELEMVRDHLNAFLEFSKEVDAQSSLKSSVLSTGNQLLRLKKVDTATLRSELSRIDSQWTDLLTNIPAVQEKLHQLQMDKLPSRHAISEVMSWISLMENVIQKDEDNIKNSIGYKAIHEYLQKYKGFKIDINCKQLTVDFVNQSVLQISSQDVESKRSDKTDFAEQLGAMNKSWQILQGLVTEKIQLLEGLLESWSEYENNVQCLKTWFETQEKRLKQQHRIGDQASVQNALKDCQDLEDLIKAKEKEVEKIEQNGLALIQNKKEDVSSIVMSTLRELGQTWANLDHMVGQLKILLKSVLDQWSSHKVAFDKINSYLMEARYSLSRFRLLTGSLEAVQVQVDNLQNLQDDLEKQERSLQKFGSITNQLLKECHPPVTETLTNTLKEVNMRWNNLLEEIAEQLQSSKALLQLWQRYKDYSKQCASTVQQQEDRTNELLKAATNKDIADDEVATWIQDCNDLLKGLGTVKDSLFFLHELGEQLKQQVDASAASAIQSDQLSLSQHLCALEQALCKQQTSLQAGVLDYETFAKSLEALEAWIVEAEEILQGQDPSHSSDLSTIQERMEELKGQMLKFSSMAPDLDRLNELGYRLPLNDKEIKRMQNLNRHWSLISSQTTERFSKLQSFLLQHQTFLEKCETWMEFLVQTEQKLAVEISGNYQHLLEQQRAHELFQAEMFSRQQILHSIIIDGQRLLEQGQVDDRDEFNLKLTLLSNQWQGVIRRAQQRRGIIDSQIRQWQRYREMAEKLRKWLVEVSYLPMSGLGSVPIPLQQARTLFDEVQFKEKVFLRQQGSYILTVEAGKQLLLSADSGAEAALQAELAEIQEKWKSASMRLEEQKKKLAFLLKDWEKCEKGIADSLEKLRTFKKKLSQSLPDHHEELHAEQMRCKELENAVGSWTDDLTQLSLLKDTLSAYISADDISILNERVELLQRQWEELCHQLSLRRQQIGERLNEWAVFSEKNKELCEWLTQMESKVSQNGDILIEEMIEKLKKDYQEEIAIAQENKIQLQQMGERLAKASHESKASEIEYKLGKVNDRWQHLLDLIAARVKKLKETLVAVQQLDKNMSSLRTWLAHIESELAKPIVYDSCNSEEIQRKLNEQQELQRDIEKHSTGVASVLNLCEVLLHDCDACATDAECDSIQQATRNLDRRWRNICAMSMERRLKIEETWRLWQKFLDDYSRFEDWLKSSERTAAFPSSSGVIYTVAKEELKKFEAFQRQVHECLTQLELINKQYRRLARENRTDSACSLKQMVHEGNQRWDNLQKRVTSILRRLKHFIGQREEFETARDSILVWLTEMDLQLTNIEHFSECDVQAKIKQLKAFQQEISLNHNKIEQIIAQGEQLIEKSEPLDAAIIEEELDELRRYCQEVFGRVERYHKKLIRLPLPDDEHDLSDRELELEDSAALSDLHWHDRSADSLLSPQPSSNLSLSLAQPLRSERSGRDTPASVDSIPLEWDHDYDLSRDLESAMSRALPSEDEEGQDDKDFYLRGAVGLSGDHSALESQIRQLGKALDDSRFQIQQTENIIRSKTPTGPELDTSYKGYMKLLGECSSSIDSVKRLEHKLKEEEESLPGFVNLHSTETQTAGVIDRWELLQAQALSKELRMKQNLQKWQQFNSDLNSIWAWLGDTEEELEQLQRLELSTDIQTIELQIKKLKELQKAVDHRKAIILSINLCSPEFTQADSKESRDLQDRLSQMNGRWDRVCSLLEEWRGLLQDALMQCQGFHEMSHGLLLMLENIDRRKNEIVPIDSNLDAEILQDHHKQLMQIKHELLESQLRVASLQDMSCQLLVNAEGTDCLEAKEKVHVIGNRLKLLLKEVSRHIKELEKLLDVSSSQQDLSSWSSADELDTSGSVSPTSGRSTPNRQKTPRGKCSLSQPGPSVSSPHSRSTKGGSDSSLSEPGPGRSGRGFLFRVLRAALPLQLLLLLLIGLACLVPMSEEDYSCALSNNFARSFHPMLRYTNGPPPL

SEQ ID NO: 2017 - DNA, 8192 bp, Homosapiens
caaaaatcagtctgatctcgggaaacctggagaaatttattttctgtactctaatgttctttcattttggtgaccatcaaggtgctgggagaggaattagatggctgtaattcaaagttaatggaattagatgcagcagtacagaaattcttggaacagaatggccaactgggtaagccactggccaagaagataggaaaactgactgaacttcaccagcagaccattagacaagctgagaatcggctctccaagctcaatcaggcagcatcacatttagaagaatacaatgaaatgcttgaattaattttgaagtggattgaaaaagctaaagtcttggctcatggaactattgcatggaattctgcaagccagcttcgggaacaatatattttgcatcagaccctgctagaagaatccaaagaaattgacagtgagctggaagcaatgactgagaaattacagtacctcactagcgtgtactgtacagaaaaaatgtctcagcaagtggcagaactgggacgggagactgaggagttgcgacagatgatcaaaattcgtttgcagaacctccaagatgcagctaaggatatgaaaaaatttgaagcagagttgaaaaagttacaagctgccttggagcaagcccaggcaacactgacttctccagaagttggacgtctcagtctcaaggagcagctctctcatcggcagcatttgttgtctgagatggagtcactgaagccgaaggtgcaagcagtgcagctctgccagagtgccctccggatccccgaggatgtggttgccagcttacctctctgtcatgctgctctgcggctgcaggaagaggccagccggctgcagcacaccgccatccagcagtgtaacatcatgcaggcagctgtggtacaatatgaacaatatgagcaagaaatgaaacatctccagcaactgatagaaggagctcacagagagattgaggataaacctgttgccaccagtaacatacaggagctgcaggctcagatttctcggcatgaggagctggcgcagaaaattaagggctaccaggagcagatcgcttctttgaattccaagtgcaagatgctgacgatgaaagccaagcacgccaccatgctgctgacggtgaccgaggtcgaggggctggcggaagggacagaggacctggatggggagctcctccccacgccttcggcccacccctctgtggtcatgatgactgcaggtcgctgtcacactttgctgtcaccggtcactgaggagtctggggaggagggaaccaacagtgagatttcctctccacctgcctgtcgctccccttcacctgtggctaatacagatgcttctgttaaccaggacattgcatattaccaagccttgtctgctgagaggttgcagacagatgctgcaaaaattcaccccagcacatccgcatcccaggagttctatgaaccgggattggagccatccgctactgccaaactgggtgatttgcagcgttcttgggaaaccttaaagaatgtgatcagtgagaagcagcgcacactctatgaagctttggaacgccagcagaagtaccaggactccctccagtccatctctacgaagatggaggccattgagctgaaactcagtgagagcccagagcctggcaggagtccagaaagccagatggctgaacatcaggcattgatggatgagattctcatgctccaggatgaaatcaatgagctccagtcctctctcgcagaggagctggtatccgagtcttgtgaggccgaccctgcggagcagctggccttgcagtccacgctcactgtcttagccgagcgaatgtccaccatcaggatgaaagcctcggggaaacggcagcttttggaggagaagttgaatgatcagctggaggaacaaaggcaggaacaggccctgcagaggtatcgctgtgaagccgatgagctggacagctggctcttgagtaccaaggccactctggacactgcgctgagtccacccaaggagcccatggacatggaggcccagcttatggactgccagaatatgctggtggaaatagagcagaaggtggtggctttatcagaactgtcagtccacaatgagaacctgctgctggagggcaaagctcacaccaaggacgaggccgagcagctggctggaaagctgagaaggctcaaggggagcctgctggagctgcagagagccctgcatgataagcagctcaacatgcagggaacagcacaggagaaggaggagagcgatgttgacctaacagccacgcagagccccggcgtccaggaatggctggcccaagctcgcaccacatggacccagcagcggcagagcagtctccagcaacaaaaagagttagaacaggaattagccgagcagaagagtctccttcgctcagtagccagtcgtggagaggagattctaattcaacattcggcggcagagacctctggtgatgctggcgaaaaacctgatgtgttatcccaggagttggggatggaaggggagaaatcatccgctgaagaccagatgagaatgaaatgggaaagcctacatcaagaatttagtaccaagcagaaactactacagaatgttctggaacaggaacaagagcaagtgctttatagcaggccaaatcgactcttgtctggtgtgccactgtacaaaggggacgtgccaacccaagataaatctgcagttacatctttgctggatggactgaaccaagccttcgaggaggtttcatcccagagtggaggggcaaagaggcagagtatacacttggagcagaagttgtatgatggagtctcagccacctctacttggttggatgacgttgaagaacgtttatttgttgccacagcacttttaccagaagaaacagagacttgtctcttcaaccaagagattcttgccaaagacattaaggaaatgtctgaagaaatggataagaacaaaaacttgttttcccaagcttttccagagaatggtgataatcgagatgttattgaagatactttgggttgtcttttgggcaggttatccttgctagactcagtagtgaatcaacgatgtcatcagatgaaagaaagacttcagcaaatactaaatttccagaatgatctgaaagtgctgtttacatcactggctgacaacaaatacatcattctgcaaaaactggcaaatgtgtttgaacagcccgtagcagaacaaatagaggcaatacaacaggctgaagatggactcaaagaatttgatgcaggaatcattgaattaaagaggcgtggtgacaagctacaggtcgagcagccgtccatgcaagaactctccaagctccaggacatgtatgatgagctgatgatgatcattggctcccggaggagtggtctgaatcagaaccttacactcaagagtcagtatgagagggccctacaagatctggctgacctgctagaaactggtcaggagaagatggcaggagaccagaaaatcatcgtgtcttccaaagaggaaatccagcaactacttgacaaacataaggaatactttcagggcctggaatctcatatgatcttgactgaaacactcttcagaaagataatcagctttgcagtccaaaaggaaacccagttccatacagagctgatggctcaggcttctgctgtactgaaacgggctcacaagaggggtgtggagctggagtacattctagagacgtggtcccatctggatgaggaccagcaggagctcagcagacagctggaggtggtggaaagcagcatcccaagcgtgggtctggtggaggagaacgaggacaggcttattgaccgcataacactctaccagcatttaaaatctagccttaatgaataccagcccaaattatatcaagtattagatgatgggaaacgacttctgatatccatcagctgctcagatctagaaagccaactaaatcaacttggagagtgctggctaagtaacaccaataaaatgtctaaggaacttcacagactggaaacaatattgaaacactggaccagatatcaaagtgaatctgcagatctaattcactggttacaatctgcaaaagaccggctagaattttggactcagcaatctgtgacagtcccacaagagctggaaatggtccgtgatcatctaaatgctttcctggagttttctaaagaagtggatgcccaatcttccctgaaatcatctgttctgagtactggaaatcagctccttcgactaaaaaaggtggacacagccacgctgcgctctgagctgtcgcgcattgatagccagtggactgacctgctaaccaatatcccagccgtccaggagaagctccaccagctccagatggataaactgccttcccgccatgccatttctgaagtcatgagttggatttctctaatggaaaatgttattcagaaggatgaagataatattaaaaattccataggttacaaggcaattcatgaataccttcagaaatataagggttttaagatagacattaactgtaaacagctgacagtggattttgtgaaccagtccgtgctacaaatcagcagtcaggatgtggaaagtaagcgtagtgataagactgattttgctgagcaacttggagcaatgaataaaagttggcaaattctgcaaggtctagtaactgagaagatccagctgttggaaggcttattggaatcttggtcagaatatgaaaataatgtacaatgtctgaaaacatggtttgaaacccaggaaaagagactaaaacaacagcatcgaattggagatcaggcttctgttcaaaatgcactgaaagactgtcaggatctggaagatttgattaaagcaaaagaaaaagaagtagagaaaattgagcagaatggacttgctttgattcagaacaagaaagaagacgtctctagcattgtcatgagcacactgcgagagctcggccaaacctgggcaaatttagatcacatggttggacaattaaagatactgctgaaatcagtgcttgaccaatggagtagtcacaaagtggcctttgacaagataaacagttacctcatggaggccagatactctctttcccgattccgtctgctgactggctccttagaagctgtgcaagttcaggtggacaatcttcagaatctccaagatgatctggaaaaacaggaaaggagcttacagaaatttggctctatcaccaaccaattattaaaagagtgtcacccacccgtgacagaaactcttaccaatacactgaaagaagtcaacatgagatggaataacttgctggaagagattgctgagcagctacagtccagcaaggccctacttcagctttggcaaagatacaaggactactccaaacagtgtgcttcgacagttcagcagcaggaggatcgaaccaatgagctgttgaaggcagccacaaacaaggacattgccgatgatgaggttgccacatggattcaagattgcaacgacctcctcaaaggactgggcacagttaaagattccctcttttttctccatgagctgggagagcaactgaagcaacaagtggatgcttccgcagcatcagctattcaatcggatcaactctctttgagtcaacacttgtgtgccctggagcaagctctctgcaaacagcagacttcattacaggctggagttcttgattatgaaacctttgccaagagtttagaagctttggaggcctggatagtggaagctgaagaaatactacaagggcaggaccctagccactcatctgacctctccacaatccaggaaaggatggaagaacttaagggacagatgttaaaattcagcagcatggctccagatttagaccgtctaaatgagcttggatataggttacccttgaatgataaggaaatcaaaagaatgcagaatctgaaccgccattggtctctgatctcctctcagactacagaaagattcagcaagttgcagtcatttttgctacaacatcagactttcttggaaaaatgtgaaacatggatggaattcctagttcagacagaacaaaagttagcagtagagatttcaggaaattatcagcaccttttggaacagcagagagcacacgagttgtttcaagccgagatgttcagtcgtcagcagattttgcactcaatcattattgatgggcaacgtcttctagaacaaggtcaagttgatgacagggatgaattcaacctgaaattgacactcctcagtaatcaatggcagggagtgattcgcagggcccagcagaggcgggggatcattgacagccagattcgccagtggcagcgctatagggagatggcagaaaagcttcgtaaatggttggttgaagtgtcctacctccccatgagtggtctcggaagtgttcctataccactgcaacaagcaaggaccctctttgatgaagtgcagttcaaagaaaaagtgtttctgcggcaacaaggcagctacatcctgactgtggaggctggcaagcaactccttctctcggcggacagtggcgctgaggccgccttgcaggccgaactcgctgaaatccaagagaaatggaaatcagccagcatgcggctggaagaacagaagaaaaaactagccttcttgttgaaagactgggaaaaatgtgagaaaggaatagcagattccctggagaaactacgaactttcaaaaagaagctttcgcagtctctcccggatcaccatgaagagctccatgcagaacaaatgcgttgcaaggaattagaaaatgcagttgggagctggacagatgacttgacccagttgagcctgctgaaggacaccctctctgcctatatcagtgctgatgatatctccattcttaatgaacgcgtagagcttctgcaaaggcagtgggaagaactatgccaccagctctccttaaggcggcagcaaataggtgaaagattgaatgaatgggcagtcttcagtgaaaagaacaaggaactctgtgagtggttgactcaaatggaaagcaaagtttctcagaatggagacattctcattgaagaaatgatagagaagctcaagaaggattatcaagaggaaattgctattgctcaagagaacaaaatacagctccaacaaatgggagaacgacttgctaaagccagccatgaaagcaaagcatctgagattgaatacaagctgggaaaggtcaacgaccggtggcagcatctcctggacctcattgcagccagggtgaagaagctgaaggagaccctggtagccgtgcagcagcttgataagaacatgagcagcctgaggacctggctcgctcacatcgagtcagagctggccaagccaatagtctacgattcctgtaactcggaagaaatacagagaaagcttaatgagcagcaggagcttcagagagacatagagaagcacagtacaggtgttgcatctgtcctcaacctgtgtgaagtcctgctgcacgactgtgacgcctgtgccactgatgccgagtgtgactctatacagcaggctacgagaaacctggaccggcggtggagaaacatttgtgctatgtccatggaaaggaggctgaaaatcgaagagacgtggcgattgtggcagaaatttctggatgactattcacgttttgaagattggctgaagtcttcagaaaggacagctgcttttcccagctcttctggggtgatctatacagttgccaaggaagaactaaagaaatttgaggctttccagcgacaggtccacgagtgcctgacgcagctggaactgatcaacaagcagtaccgccgcctggccagggagaaccgcactgattcagcatgtagcctcaaacagatggttcacgaaggcaaccagagatgggacaacctgcaaaagcgtgtcacctccatcttgcgcagactcaagcattttattggccagcgtgaggagtttgagactgcgcgggacagcattctggtctggctcacagagatggatctgcagctcactaatattgaacatttttctgagtgtgatgttcaagctaaaataaagcaactcaaggccttccagcaggaaatttcactgaaccacaataagattgagcagataat

SEQ ID NO: 2018 - protein, 3321 aa, Homosapiens
MELDAAVQKFLEQNGQLGKPLAKKIGKLTELHQQTIRQAENRLSKLNQAASHLEEYNEMLELILKWIEKAKVLAHGTIAWNSASQLREQYILHQTLLEESKEIDSELEAMTEKLQYLTSVYCTEKMSQQVAELGRETEELRQMIKIRLQNLQDAAKDMKKFEAELKKLQAALEQAQATLTSPEVGRLSLKEQLSHRQHLLSEMESLKPKVQAVQLCQSALRIPEDVVASLPLCHAALRLQEEASRLQHTAIQQCNIMQAAVVQYEQYEQEMKHLQQLIEGAHREIEDKPVATSNIQELQAQISRHEELAQKIKGYQEQIASLNSKCKMLTMKAKHATMLLTVTEVEGLAEGTEDLDGELLPTPSAHPSVVMMTAGRCHTLLSPVTEESGEEGTNSEISSPPACRSPSPVANTDASVNQDIAYYQALSAERLQTDAAKIHPSTSASQEFYEPGLEPSATAKLGDLQRSWETLKNVISEKQRTLYEALERQQKYQDSLQSISTKMEAIELKLSESPEPGRSPESQMAEHQALMDEILMLQDEINELQSSLAEELVSESCEADPAEQLALQSTLTVLAERMSTIRMKASGKRQLLEEKLNDQLEEQRQEQALQRYRCEADELDSWLLSTKATLDTALSPPKEPMDMEAQLMDCQNMLVEIEQKVVALSELSVHNENLLLEGKAHTKDEAEQLAGKLRRLKGSLLELQRALHDKQLNMQGTAQEKEESDVDLTATQSPGVQEWLAQARTTWTQQRQSSLQQQKELEQELAEQKSLLRSVASRGEEILIQHSAAETSGDAGEKPDVLSQELGMEGEKSSAEDQMRMKWESLHQEFSTKQKLLQNVLEQEQEQVLYSRPNRLLSGVPLYKGDVPTQDKSAVTSLLDGLNQAFEEVSSQSGGAKRQSIHLEQKLYDGVSATSTWLDDVEERLFVATALLPEETETCLFNQEILAKDIKEMSEEMDKNKNLFSQAFPENGDNRDVIEDTLGCLLGRLSLLDSVVNQRCHQMKERLQQILNFQNDLKVLFTSLADNKYIILQKLANVFEQPVAEQIEAIQQAEDGLKEFDAGIIELKRRGDKLQVEQPSMQELSKLQDMYDELMMIIGSRRSGLNQNLTLKSQYERALQDLADLLETGQEKMAGDQKIIVSSKEEIQQLLDKHKEYFQGLESHMILTETLFRKIISFAVQKETQFHTELMAQASAVLKRAHKRGVELEYILETWSHLDEDQQELSRQLEVVESSIPSVGLVEENEDRLIDRITLYQHLKSSLNEYQPKLYQVLDDGKRLLISISCSDLESQLNQLGECWLSNTNKMSKELHRLETILKHWTRYQSESADLIHWLQSAKDRLEFWTQQSVTVPQELEMVRDHLNAFLEFSKEVDAQSSLKSSVLSTGNQLLRLKKVDTATLRSELSRIDSQWTDLLTNIPAVQEKLHQLQMDKLPSRHAISEVMSWISLMENVIQKDEDNIKNSIGYKAIHEYLQKYKGFKIDINCKQLTVDFVNQSVLQISSQDVESKRSDKTDFAEQLGAMNKSWQILQGLVTEKIQLLEGLLESWSEYENNVQCLKTWFETQEKRLKQQHRIGDQASVQNALKDCQDLEDLIKAKEKEVEKIEQNGLALIQNKKEDVSSIVMSTLRELGQTWANLDHMVGQLKILLKSVLDQWSSHKVAFDKINSYLMEARYSLSRFRLLTGSLEAVQVQVDNLQNLQDDLEKQERSLQKFGSITNQLLKECHPPVTETLTNTLKEVNMRWNNLLEEIAEQLQSSKALLQLWQRYKDYSKQCASTVQQQEDRTNELLKAATNKDIADDEVATWIQDCNDLLKGLGTVKDSLFFLHELGEQLKQQVDASAASAIQSDQLSLSQHLCALEQALCKQQTSLQAGVLDYETFAKSLEALEAWIVEAEEILQGQDPSHSSDLSTIQERMEELKGQMLKFSSMAPDLDRLNELGYRLPLNDKEIKRMQNLNRHWSLISSQTTERFSKLQSFLLQHQTFLEKCETWMEFLVQTEQKLAVEISGNYQHLLEQQRAHELFQAEMFSRQQILHSIIIDGQRLLEQGQVDDRDEFNLKLTLLSNQWQGVIRRAQQRRGIIDSQIRQWQRYREMAEKLRKWLVEVSYLPMSGLGSVPIPLQQARTLFDEVQFKEKVFLRQQGSYILTVEAGKQLLLSADSGAEAALQAELAEIQEKWKSASMRLEEQKKKLAFLLKDWEKCEKGIADSLEKLRTFKKKLSQSLPDHHEELHAEQMRCKELENAVGSWTDDLTQLSLLKDTLSAYISADDISILNERVELLQRQWEELCHQLSLRRQQIGERLNEWAVFSEKNKELCEWLTQMESKVSQNGDILIEEMIEKLKKDYQEEIAIAQENKIQLQQMGERLAKASHESKASEIEYKLGKVNDRWQHLLDLIAARVKKLKETLVAVQQLDKNMSSLRTWLAHIESELAKPIVYDSCNSEEIQRKLNEQQELQRDIEKHSTGVASVLNLCEVLLHDCDACATDAECDSIQQATRNLDRRWRNICAMSMERRLKIEETWRLWQKFLDDYSRFEDWLKSSERTAAFPSSSGVIYTVAKEELKKFEAFQRQVHECLTQLELINKQYRRLARENRTDSACSLKQMVHEGNQRWDNLQKRVTSILRRLKHFIGQREEFETARDSILVWLTEMDLQLTNIEHFSECDVQAKIKQLKAFQQEISLNHNKIEQIIAQGEQLIEKSEPLDAAIIEEELDELRRYCQEVFGRVERYHKKLIRLPLPDDEHDLSDRELELEDSAALSDLHWHDRSADSLLSPQPSSNLSLSLAQPLRSERSGRDTPASVDSIPLEWDHDYDLSRDLESAMSRALPSEDEEGQDDKDFYLRGAVGLSGDHSALESQIRQLGKALDDSRFQIQQTENIIRSKTPTGPELDTSYKGYMKLLGECSSSIDSVKRLEHKLKEEEESLPGFVNLHSTETQTAGVIDRWELLQAQALSKELRMKQNLQKWQQFNSDLNSIWAWLGDTEEELEQLQRLELSTDIQTIELQIKKLKELQKAVDHRKAIILSINLCSPEFTQADSKESRDLQDRLSQMNGRWDRVCSLLEEWRGLLQDALMQCQGFHEMSHGLLLMLENIDRRKNEIVPIDSNLDAEILQDHHKQLMQIKHELLESQLRVASLQDMSCQLLVNAEGTDCLEAKEKVHVIGNRLKLLLKEVSRHIKELEKLLDVSSSQQDLSSWSSADELDTSGSVSPTSGRSTPNRQKTPRGKCSLSQPGPSVSSPHSRSTKGGSDSSLSEPGPGRSGRGFLFRVLRAALPLQLLLLLLIGLACLVPMSEEDYSCALSNNFARSFHPMLRYTNGPPPL

SEQ ID NO: 2019 - DNA, 1838 bp, Homosapiens
atagtagaattattcattataatatttggctttgacaaaaatcagtctgatctcgggaaacctggagaaatttattttctgtactctaatgttctttcattttggtgaccatcaaggtgctgggagaggaattagatggctgtaattcaaagttaatggaattagatgcagcagtacagaaattcttggaacagaatggccaactgggtaagccactggccaagaagataggaaaactgactgaacttcaccagcagaccattagacaagctgagaatcggctctccaagctcaatcaggcagcatcacatttagaagaatacaatgaaatgcttgaattaattttgaagtggattgaaaaagctaaagtcttggctcatggaactattgcatggaattctgcaagccagcttcgggaacaatatattttgcatcagaccctgctagaagaatccaaagaaattgacagtgagctggaagcaatgactgagaaattacagtacctcactagcgtgtactgtacagaaaaaatgtctcagcaagtggcagaactgggacgggagactgaggagttgcgacagatgatcaaaattcgtttgcagaacctccaagatgcagctaaggatatgaaaaaatttgaagcagagttgaaaaagttacaagctgccttggagcaagcccaggcaacactgacttctccagaagttggacgtctcagtctcaaggagcagctctctcatcggcagcatttgttgtctgagatggagtcactgaagccgaaggtgcaagcagtgcagctctgccagagtgccctccggatccccgaggatgtggttgccagcttacctctctgtcatgctgctctgcggctgcaggaagaggccagccggctgcagcacaccgccatccagcagtgtaacatcatgcaggcagctgtggtacaatatgaacaatatgagcaagaaatgaaacatctccagcaactgatagaaggagctcacagagagattgaggataaacctgttgccaccagtaacatacaggagctgcaggctcagatacacgaatggccctcctccactctgaactaagcagatgccatctgcagaagtgctggtagcataaggaggatcgggtcataagcaatcccaaactaccaacaagaggaccttgatcttggcgaaagccctcggtgtggcagctttagccctcctccagatcacatgtgtgcaaattatggcttcagaggtggaagataaacagtgacgggggaacaaacagacaacaagaaggtttggaagaaatctggtttgagactctgaaccttagcactaaggagattgagtaaggacctccaaagttccccggactcatgaattctgggcccttggcccattctgtgcacagccaaggacttcagtagaccatctgggcagctttcccatggtgctgctccaaccatcagataaatgaccctcccaagcaccatgtcagtgtcgtacaatctaccaaccaaccagtgctgaagagattttagaaccttgtaacatacaatttttaagagcttatatggcagcttcctttttaccttgttttcctttggggcatgatgttttaacctttgctttagaagcacaagctgtaaatctaaaaggcacttttttttagaggtataaagaaaaactagatgtaataaataagatcatggaaggctttatgtgaaaaaagttgaatgttatagtaaaaaaaaaaagatatttatgtatgtacagtttgctaaagccaagttttgtttgtattgatttctttgcatttattatagatattataaaatagtt

SEQ ID NO: 2020 - protein, 311 aa, Homosapiens
MELDAAVQKFLEQNGQLGKPLAKKIGKLTELHQQTIRQAENRLSKLNQAASHLEEYNEMLELILKWIEKAKVLAHGTIAWNSASQLREQYILHQTLLEESKEIDSELEAMTEKLQYLTSVYCTEKMSQQVAELGRETEELRQMIKIRLQNLQDAAKDMKKFEAELKKLQAALEQAQATLTSPEVGRLSLKEQLSHRQHLLSEMESLKPKVQAVQLCQSALRIPEDVVASLPLCHAALRLQEEASRLQHTAIQQCNIMQAAVVQYEQYEQEMKHLQQLIEGAHREIEDKPVATSNIQELQAQIHEWPSSTLN

SEQ ID NO: 2021 - DNA, 8192 bp, Homosapiens; identical to SEQ ID NO: 207

SEQ ID NO: 2022 - protein, 4000 aa, Homosapiens
MATSRGASRCPRDIANVMQRLQDEQEIVQKRTFTKWINSHLAKRKPPMVVDDLFEDMKDGVKLLALLEVLSGQKLPCEQGRRMKRIHAVANIGTALKFLEGRKSMHRGSPIKLVNINSTDIADGRPSIVLGLMWTIILYFQIEELTSNLPQLQSLSSSASSVDSIVSSETPSPPSKRKVTTKIQGNAKKALLKWVQYTAGKQTGIEVKDFGKSWRSGVAFHSVIHAIRPELVDLETVKGRSNRENLEDAFTIAETELGIPRLLDPEDVDVDKPDEKSIMTYVAQFLKHYPDIHNASTDGQEDDEILPGFPSFANSVQNFKREDRVIFKEMKVWIEQFERDLTRAQMVESNLQDKYQSFKHFRVQYEMKRKQIEHLIQPLHRDGKLSLDQALVKQSWDRVTSRLFDWHIQLDKSLPAPLGTIGAWLYRAEVALREEITVQQVHEETANTIQRKLEQHKDLLQNTDAHKRAFHEIYRTRSVNGIPVPPDQLEDMAERFHFVSSTSELHLMKMEFLELKYRLLSLLVLAESKLKSWIIKYGRRESVEQLLQNYVSFIENSKFFEQYEVTYQILKQTAEMYVKADGSVEEAENVMKFMNETTAQWRNLSVEVRSVRSMLEEVISNWDRYGNTVASLQAWLEDAEKMLNQSENAKKDFFRNLPHWIQQHTAMNDAGNFLIETCDEMVSRDLKQQLLLLNGRWRELFMEVKQYAQADEMDRMKKEYTDCVVTLSAFATEAHKKLSEPLEVSFMNVKLLIQDLEDIEQRVPVMDAQYKIITKTAHLITKESPQEEGKEMFATMSKLKEQLTKVKECYSPLLYESQQLLIPLEELEKQMTSFYDSLGKINEIITVLEREAQSSALFKQKHQELLACQENCKKTLTLIEKGSQSVQKFVTLSNVLKHFDQTRLQRQIADIHVAFQSMVKKTGDWKKHVETNSRLMKKFEESRAELEKVLRIAQEGLEEKGDPEELLRRHTEFFSQLDQRVLNAFLKACDELTDILPEQEQQGLQEAVRKLHKQWKDLQGEAPYHLLHLKIDVEKNRFLASVEECRTELDRETKLMPQEGSEKIIKEHRVFFSDKGPHHLCEKRLQLIEELCVKLPVRDPVRDTPGTCHVTLKELRAAIDSTYRKLMEDPDKWKDYTSRFSEFSSWISTNETQLKGIKGEAIDTANHGEVKRAVEEIRNGVTKRGETLSWLKSRLKVLTEVSSENEAQKQGDELAKLSSSFKALVTLLSEVEKMLSNFGDCVQYKEIVKNSLEELISGSKEVQEQAEKILDTENLFEAQQLLLHHQQKTKRISAKKRDVQQQIAQAQQGEGGLPDRGHEELRKLESTLDGLERSRERQERRIQVTLRKWERFETNKETVVRYLFQTGSSHERFLSFSSLESLSSELEQTKEFSKRTESIAVQAENLVKEASEIPLGPQNKQLLQQQAKSIKEQVKKLEDTLEEDIKTMEMVKTKWDHFGSNFETLSVWITEKEKELNALETSSSAMDMQISQIKVTIQEIESKLSSIVGLEEEAQSFAQFVTTGESARIKAKLTQIRRYGEELREHAQCLEGTILGHLSQQQKFEENLRKIQQSVSEFEDKLAVPIKICSSATETYKVLQEHMDLCQALESLSSAITAFSASARKVVNRDSCVQEAAALQQQYEDILRRAKERQTALENLLAHWQRLEKELSSFLTWLERGEAKASSPEMDISADRVKVEGELQLIQALQNEVVSQASFYSKLLQLKESLFSVASKDDVKMMKLHLEQLDERWRDLPQIINKRINFLQSVVAEHQQFDELLLSFSVWIKLFLSELQTTSEISIMDHQVALTRHKDHAAEVESKKGELQSLQGHLAKLGSLGRAEDLHLLQGKAEDCFQLFEEASQVVERRQLALSHLAEFLQSHASLSGILRQLRQTVEATNSMNKNESDLIEKDLNDALQNAKALESAAVSLDGILSKAQYHLKIGSSEQRTSCRATADQLCGEVERIQNLLGTKQSEADALAVLKKAFQDQKEELLKSIEDIEERTDKERLKEPTRQALQQRLRVFNQLEDELNSHEHELCWLKDKAKQIAQKDVAFAPEVDREINRLEVTWDDTKRLIHENQGQCCGLIDLMREYQNLKSAVSKVLENASSVIVTRTTIKDQEDLKWAFSKHETAKNKMNYKQKDLDNFTSKGKHLLSELKKIHSSDFSLVKTDMESTVDKWLDVSEKLEENMDRLRVSLSIWDDVLSTRDEIEGWSNNCVPQMAENISNLDNHLRAEELLKEFESEVKNKALRLEELHSKVNDLKELTKNLETPPDLQFIEADLMQKLEHAKEITEVAKGTLKDFTAQSTQVEKFINDITTWFTKVEESLMNCAQNETCEALKKVKDIQKELQSQQSNISSTQENLNSLCRKYHSAELESLGRAMTGLIKKHEAVSQLCSKTQASLQESLEKHFSESMQEFQEWFLGAKAAAKESSDRTGDSKVLEAKLHDLQNILDSVSDGQSKLDAVTQEGQTLYAHLSKQIVSSIQEQITKANEEFQAFLKQCLKDKQALQDCASELGSFEDQHRKLNLWIHEMEERFNTENLGESKQHIPEKKNEVHKVEMFLGELLAARESLDKLSQRGQLLSEEGHGAGQEGRLCSQLLTSHQNLLRMTKEKLRSCQVALQEHEALEEALQSMWFWVKAIQDRLACAESTLGSKDTLEKRLSQIQDILLMKGEGEVKLNMAIGKGEQALRSSNKEGQRVIQTQLETLKEVWADIMSSSVHAQSTLESVISQWNDYVERKNQLEQWMESVDQKIEHPLQPQPGLKEKFVLLDHLQSILSEAEDHTRALHRLIAKSRELYEKTEDESFKDTAQEELKTQFNDIMTVAKEKMRKVEEIVKDHLMYLDAVHEFTDWLHSAKEELHRWSDMSGDSSATQKKLSKIKELIDSREIGASRLSRVESLAPEVKQNTTASGCELMHTEMQALRADWKQWEDSVFQTQSCLENLVSQMALSEQEFSGQVAQLEQALEQFSALLKTWAQQLTLLEGKNTDEEIVECWHKGQEILDALQKAEPRTEDLKSQLNELCRFSRDLSTYSGKVSGLIKEYNCLCLQASKGCQNKEQILQQRFRKAFRDFQQWLVNAKITTAKCFDIPQNISEVSTSLQKIQEFLSESENGQHKLNMMLSKGELLSTLLTKEKAKGIQAKVTAAKEDWKNFHSNLHQKESALENLKIQMKDFEVSAEPIQDWLSKTEKMVHESSNRLYDLPAKRREQQKLQSVLEEIHCYEPQLNRLKEKAQQLWEGQAASKSFRHRVSQLSSQYLALSNLTKEKVSRLDRIVAEHNQFSLGIKELQDWMTDAIHMLDSYCHPTSDKSVLDSRTLKLEALLSVKQEKEIQMKMIVTRGESVLQNTSPEGIPTIQQQLQSVKDMWASLLSAGIRCKSQLEGALSKWTSYQDGVRQFSGWMDSMEANLNESERQHAELRDKTTMLGKAKLLNEEVLSYSSLLETIEVKGAGMTEHYVTQLELQDLQERYRAIQERAKEAVTKSEKLVRLHQEYQRDLKAFEVWLGQEQEKLDQYSVLEGDAHTHETTLRDLQELQVHCAEGQALLNSVLHTREDVIPSGIPQAEDRALESLRQDWQAYQHRLSETRTQFNNVVNKLRLMEQKFQQVDEWLKTAEEKKWHEEVTAYRDEVEEVGARAQEILDESHVNSRMGCQATQLTSRYQALLLQVLEQIKFLEEEIQSLEESESSLSSYSDWYGSTHKNFKNVATKIDKVDTVMMGKKLKTLEVLLKDMEKGHSLLKSAREKGERAVKYLEEGEAERLRKEIHDHMEQLKELTSTVRKEHMTLEKGLHLAKEFSDKCKALTQWIAEYQEILHVPEEPKMELYEKKAQLSKYKSLQQTVLSHEPSVKSVREKGEALLELVQDVTLKDKIDQLQSDYQDLCSIGKAMMEEIAGFEDRLNNLQMKGDTLIGQCADHLQAKLKQNVHAHLQGTKDSYSAICSTAQRMYQSLEHELQKHVSRQDTLQQCQAWLSAVQPDLEPSPQPPLSRAE

SEQ ID NO: 2023 - DNA, 8192 bp, Homosapiens
cccgggcagtggaaaccgtgggcaaaagttagctggcaggacagcgcagctcctccaggcagcggaggcagcgcgtcccggctctcagggacatttccttcccacctcgacccccgggaggtggtcccggtataaaggctcgctgagcgggtgggtcacagcacagctttgcagctgcggagaaacgcccaaggccgtgcatctccaggagggcggctgggctcccgcagtcctgcagaccgcgcccgatcccggcgacagggcgggcggacagccgcgcatccccggggtcccgccgagcctgggcgcagagagccgggaggaagcgttcgctcgcttcgccttgctgctgggaaactgaacgaggccgagagagaaggttcttgagttcatgtaagaggacagtcttaaaacggaagaagaaaaagaagcagttcagtctttgggagagctgcctccttgttgagtgctgcaaaggcctggaattcatttatgacagaatagatctagaaaagtccaagcatgttttctagagtggtgtagccctgtgctgcctccagtgaagagtctcttggtgttggcttcgtgcttccggagggaccatggcaacctccagaggggcctcccggtgtcctcgggatatcgccaatgtgatgcagaggctgcaagatgagcaagagatagtacaaaaacgaactttcacaaaatggatcaactctcatctggccaagcggaaacctccaatggtggtggacgatctttttgaagacatgaaagatggtgttaaactgcttgcccttctggaggtcctgtctgggcagaaactgccttgtgaacaaggacgccggatgaagcgaatccatgctgtggctaacattggcacggcactcaagttcctcgaaggaagaaagattaaattagtcaacattaactccaccgatatagctgatggccgaccctcaatagttcttggattgatgtggaccattattctatatttccagattgaagagttgaccagcaacctgccccagctccagtctttgtccagcagcgcatcctccgtggacagcatagttagctctgagactcccagcccaccaagtaaacggaaggtgaccaccaagatccaaggaaatgctaagaaggctttattaaagtgggttcagtacacagctggcaagcagactggaatagaagtaaaagattttgggaagagttggagaagcggggttgcctttcattcagttattcatgccattcgaccggaattggtggacttggagacagtgaaaggcagatccaaccgagaaaatttggaggatgctttcactatcgccgaaacagaactggggatcccaagactgctagatcctgaagacgttgatgtggataaaccagatgagaaatctattatgacctatgtagcccagtttctgaaacattatcctgacatccacaatgcaagcactgatgggcaagaggatgatgaaatacttccaggtttcccatcttttgcaaattctgtacaaaattttaagagagaagacagagtaatttttaaggaaatgaaagtttggatagaacaatttgagagagatttgacaagagcacagatggtggaatcaaatttacaggataaatatcagtcatttaagcacttcagagttcaatatgaaatgaagaggaaacagattgaacatttaatacaaccattacacagagacggtaaattgtcacttgaccaagcattggtaaaacaatcttgggatagagtgacctccaggctctttgactggcatatacagcttgataaatctcttcctgcacctctgggcaccataggtgcctggctgtacagagcggaggtggccctgagagaggaaataaccgttcaacaggtccacgaggaaacagcaaacacgatacaacggaaacttgagcaacataaggatctgcttcaaaacacggatgcccacaaaagagcattccatgaaatctaccggaccaggtctgttaacgggattccagtgccacctgatcaattagaggacatggccgagaggtttcattttgtttcctccacatcagagctacacctaatgaaaatggaatttttagaattaaagtaccgtctgctctcactgctggttcttgcagagtcaaagctgaagtcttggatcattaagtacgggaggagagagtcagtggagcagcttctacaaaactacgtgtcttttatagaaaatagcaagttctttgaacaatatgaggtgacataccagatcttgaaacagacagctgagatgtatgtcaaagcagatggttcagtggaagaagctgagaatgtgatgaaattcatgaatgaaaccaccgctcagtggaggaatctctcagtagaagtgaggagtgtgaggagcatgctggaagaagtgatctctaactgggatcgctatggcaatacagtggctagtctgcaagcctggctagaggatgctgaaaaaatgctcaatcaatcagaaaatgccaaaaaggatttttttcgaaatttacctcattggattcagcagcatactgccatgaacgatgctggcaattttctaattgaaacctgtgatgagatggtttcccgtgacctgaagcagcaattactgttgctaaatgggcggtggagggagttgtttatggaagtcaagcaatatgctcaagctgatgagatggacagaatgaagaaggaatacacagactgtgttgttaccctgtctgcttttgcaacggaagcccataagaaactttctgaacccttagaagtctcttttatgaatgtcaagctattaattcaagacttggaggatattgagcagagggtgcctgtgatggatgcccaatacaagataattacaaagacagcacacctcattaccaaagaaagcccccaagaagaaggaaaagaaatgtttgcgaccatgtcaaagctcaaagagcagctaaccaaggtcaaagaatgttactccccactcctttatgagtctcagcagctgttgattccgttggaggaattagaaaagcagatgacgtccttttatgactcacttgggaaaatcaatgaaattatcacagttcttgagcgtgaggcacaatcgagtgccctttttaaacaaaaacatcaggaactgttagcttgtcaagaaaactgtaagaaaaccttgacacttattgagaaaggcagtcaaagtgttcaaaagtttgtgaccttgagcaacgtgttaaagcattttgatcagacgaggctacaaagacagattgcagatattcatgttgcttttcagagtatggtaaagaaaactggagattggaagaagcatgtggaaaccaacagtcgcttgatgaagaagtttgaggagtctcgagcagagttggagaaggtactgcggattgctcaggagggcctggaggaaaagggggatccagaggagctcctgcggagacacactgagtttttcagtcagctggatcagagggtgctcaatgctttcctgaaagcttgtgatgaactcaccgacatccttccagagcaggagcagcaggggctgcaggaagctgttcgaaagctccacaaacaatggaaggatcttcaaggagaagccccttatcatttgcttcatctgaagattgatgtggagaagaataggttcttagcctctgtagaagaatgcagaactgagctggatcgagagaccaagctgatgccccaggaaggcagtgaaaagataattaaagagcacagggttttcttcagtgacaaaggtcctcatcatctctgtgagaaaaggttacagctcatcgaggaactctgtgtgaaactcccagtgcgggacccagtaagggacacacctggaacctgtcacgtgactctcaaagagctcagagctgccattgacagcacctacaggaagctcatggaagacccagacaagtggaaggactacactagcagattctctgagttctcatcttggatatctacaaatgagacacaattaaaggggatcaagggtgaggccatcgatactgccaaccacggagaggttaaacgtgccgttgaagagatcagaaatggtgttaccaaaaggggtgagaccctcagctggctgaaatccaggctgaaagttttgacagaagtttcttctgagaatgaagcccaaaagcagggagatgagctggcaaaattatccagctctttcaaggctcttgtgacgctgctgtcagaggttgaaaagatgctaagcaattttggggactgtgtccagtacaaagaaatagtcaaaaattctctcgaagaattaatttctggctctaaagaagtccaggaacaagctgagaagatcttggatactgaaaatctgtttgaagcacagcagttacttcttcatcaccagcaaaagacaaagcggatctcagcaaagaagagagatgtgcagcagcagatcgcgcaggcgcagcagggagaaggggggctgcctgaccgaggccacgaggagctgcggaagctggagagcacactggatggcctggagcgcagccgggagaggcaggaacgccgcatccaggtcacattaagaaaatgggagcgatttgaaacaaacaaagaaacagtagtaagatacctttttcaaacaggttccagtcatgaacgcttcttgagttttagcagtttggaaagtttatcttcagaactggaacaaacaaaggagttttctaaacggacagaaagtattgcagtccaggctgagaaccttgtaaaggaagcttcagagataccgcttgggccccaaaataagcagctgcttcaacagcaggccaagtcaatcaaagaacaagtcaaaaaattagaagacacgcttgaagaagatattaaaaccatggaaatggtgaaaaccaagtgggatcattttggcagtaattttgagactctgtccgtctggataactgagaaagaaaaagaactcaatgccttggaaacttcgtcatctgccatggacatgcaaatcagccaaattaaggtcacaattcaggaaatagaaagtaagctcagcagcattgtaggattagaagaagaagcccagtcttttgctcagtttgttaccactggagaatctgctcgaattaaagccaagttgacacaaataagaagatacggggaagagcttcgagagcatgcacagtgtctggaaggaacaatcctgggacatttatctcagcagcaaaagtttgaagagaaccttagaaagatccagcaatctgtgtctgaatttgaagataaacttgctgttccaattaaaatatgttcttcagctacagaaacatacaaagttcttcaagaacatatggatctctgccaggccctggagtcactgagcagcgcgatcactgccttctcagccagtgccaggaaggttgtgaacagagattcctgtgttcaggaggctgcggctctacagcagcaatacgaggacatcctaaggagggcgaaggagagacagacggcgctggagaatctgctggcccactggcagaggctagagaaagaactatcatcctttttgacctggttagagcggggtgaagctaaagccagttccccagaaatggacatttctgcagacagagtcaaagtggaaggtgaacttcagttaatacaggcactgcaaaatgaagttgtatcccaggcctcattctatagcaaacttttgcaattgaaggaatcattgttctcagtagcctccaaagatgatgtgaaaatgatgaaactacatttggagcagttggatgagagatggagagatttaccacagatcattaacaaaaggattaattttcttcagtctgtggttgctgaacaccagcaatttgatgagctgctgctttccttttctgtctggattaaactgtttctcagtgaattacaaactacctctgagattagcataatggaccatcaagtagcccttactcggcataaggaccacgcagcagaagtagagagcaaaaagggcgaattgcagagtctgcagggtcacttagcaaagttgggttctctgggccgtgctgaggacctccacctcctgcagggaaaggctgaggactgcttccagctgtttgaggaggccagccaggttgtggagaggcggcagcttgccctgtcccatttggcagaattcctccagagccatgcctctctgtccggcattctccgccagctgaggcaaacagtggaagcaaccaacagtatgaataagaacgagtctgatttgatagaaaaggacctcaatgatgctcttcaaaatgctaaagcattagaatctgctgccgtcagtctggatggcattctttccaaagcccaataccatctgaaaatcgggagctctgagcaaaggacttcctgcagagccacggctgatcagctctgtggagaggtagagaggatccagaaccttctgggaaccaagcagagtgaggcagatgctctggcagtgttgaaaaaagcattccaagaccagaaagaggagcttctgaaaagcattgaggacattgaagaaaggactgacaaagagcgattgaaagaacctacccgccaagctcttcagcagaggttaagagtgtttaatcagctagaagatgaattgaattctcacgagcatgaactatgttggttgaaagacaaagccaagcaaattgcccagaaagatgtagcttttgcacctgaagttgacagggagataaaccgcttagaggtcacctgggatgataccaaaagactaattcatgaaaatcagggtcagtgctgtggacttattgacttaatgagagaatatcagaacctgaaatcagctgtatctaaagtcttagaaaatgccagcagtgtgattgtaaccagaactaccataaaagatcaggaggatcttaaatgggctttttccaagcatgaaactgccaagaacaaaatgaattacaaacagaaagacttggataactttaccagcaaaggaaaacacttgttatctgagctgaagaaaattcacagtagtgatttcagcttggtgaaaacagacatggagagcaccgtggacaaatggctggatgtatcagagaaacttgaagaaaacatggataggctgagagtaagcctgtccatttgggatgatgtactgtcaactagagatgagattgagggatggtcaaacaactgcgttccacagatggcagaaaacatcagcaacctggataaccacctcagagctgaagaactgcttaaagaatttgagtctgaagttaaaaacaaagcattgagattggaagaactgcattccaaagttaatgatctgaaagaattaactaaaaatctagaaacaccgccagaccttcagtttatagaagcagacttaatgcagaaactggagcatgccaaagaaataactgaagtagcaaaaggaaccctgaaggatttcacggctcaaagtacacaagtggagaagtttattaatgacataacaacatggttcacaaaagtggaagaatcgttgatgaactgtgcccaaaatgagacttgtgaagcattgaaaaaagtcaaggatatacaaaaagaacttcaaagtcaacaaagcaacatcagctctacccaagaaaatctcaatagcttgtgccgcaagtaccactcagctgagttggagagcctgggccgtgcaatgactggtctgataaagaaacatgaagccgtgagccagttgtgctccaaaacccaggccagcctgcaggaatctctggaaaaacacttcagtgagtctatgcaggaattccaagaatggtttttgggagcaaaggcagcagcaaaagaatcatcagatcgcaccggtgacagcaaagttctagaagcaaagctccatgatcttcagaacattttggactcagtcagtgatgggcagagcaaacttgatgcagtgactcaagaaggacaaactttgtatgcacatttgtctaaacaaattgtcagtagcattcaagaacaaatcacaaaggccaatgaagagtttcaagcatttctgaaacaatgccttaaagataagcaggctcttcaagactgtgcttcagaacttggaagctttgaagatcagcacagaaaactgaacttatgg

SEQ ID NO: 2024 - protein, 4000 aa, Homosapiens
MATSRGASRCPRDIANVMQRLQDEQEIVQKRTFTKWINSHLAKRKPPMVVDDLFEDMKDGVKLLALLEVLSGQKLPCEQGRRMKRIHAVANIGTALKFLEGRKIKLVNINSTDIADGRPSIVLGLMWTIILYFQIEELTSNLPQLQSLSSSASSVDSIVSSETPSPPSKRKVTTKIQGNAKKALLKWVQYTAGKQTGIEVKDFGKSWRSGVAFHSVIHAIRPELVDLETVKGRSNRENLEDAFTIAETELGIPRLLDPEDVDVDKPDEKSIMTYVAQFLKHYPDIHNASTDGQEDDEILPGFPSFANSVQNFKREDRVIFKEMKVWIEQFERDLTRAQMVESNLQDKYQSFKHFRVQYEMKRKQIEHLIQPLHRDGKLSLDQALVKQSWDRVTSRLFDWHIQLDKSLPAPLGTIGAWLYRAEVALREEITVQQVHEETANTIQRKLEQHKDLLQNTDAHKRAFHEIYRTRSVNGIPVPPDQLEDMAERFHFVSSTSELHLMKMEFLELKYRLLSLLVLAESKLKSWIIKYGRRESVEQLLQNYVSFIENSKFFEQYEVTYQILKQTAEMYVKADGSVEEAENVMKFMNETTAQWRNLSVEVRSVRSMLEEVISNWDRYGNTVASLQAWLEDAEKMLNQSENAKKDFFRNLPHWIQQHTAMNDAGNFLIETCDEMVSRDLKQQLLLLNGRWRELFMEVKQYAQADEMDRMKKEYTDCVVTLSAFATEAHKKLSEPLEVSFMNVKLLIQDLEDIEQRVPVMDAQYKIITKTAHLITKESPQEEGKEMFATMSKLKEQLTKVKECYSPLLYESQQLLIPLEELEKQMTSFYDSLGKINEIITVLEREAQSSALFKQKHQELLACQENCKKTLTLIEKGSQSVQKFVTLSNVLKHFDQTRLQRQIADIHVAFQSMVKKTGDWKKHVETNSRLMKKFEESRAELEKVLRIAQEGLEEKGDPEELLRRHTEFFSQLDQRVLNAFLKACDELTDILPEQEQQGLQEAVRKLHKQWKDLQGEAPYHLLHLKIDVEKNRFLASVEECRTELDRETKLMPQEGSEKIIKEHRVFFSDKGPHHLCEKRLQLIEELCVKLPVRDPVRDTPGTCHVTLKELRAAIDSTYRKLMEDPDKWKDYTSRFSEFSSWISTNETQLKGIKGEAIDTANHGEVKRAVEEIRNGVTKRGETLSWLKSRLKVLTEVSSENEAQKQGDELAKLSSSFKALVTLLSEVEKMLSNFGDCVQYKEIVKNSLEELISGSKEVQEQAEKILDTENLFEAQQLLLHHQQKTKRISAKKRDVQQQIAQAQQGEGGLPDRGHEELRKLESTLDGLERSRERQERRIQVTLRKWERFETNKETVVRYLFQTGSSHERFLSFSSLESLSSELEQTKEFSKRTESIAVQAENLVKEASEIPLGPQNKQLLQQQAKSIKEQVKKLEDTLEEDIKTMEMVKTKWDHFGSNFETLSVWITEKEKELNALETSSSAMDMQISQIKVTIQEIESKLSSIVGLEEEAQSFAQFVTTGESARIKAKLTQIRRYGEELREHAQCLEGTILGHLSQQQKFEENLRKIQQSVSEFEDKLAVPIKICSSATETYKVLQEHMDLCQALESLSSAITAFSASARKVVNRDSCVQEAAALQQQYEDILRRAKERQTALENLLAHWQRLEKELSSFLTWLERGEAKASSPEMDISADRVKVEGELQLIQALQNEVVSQASFYSKLLQLKESLFSVASKDDVKMMKLHLEQLDERWRDLPQIINKRINFLQSVVAEHQQFDELLLSFSVWIKLFLSELQTTSEISIMDHQVALTRHKDHAAEVESKKGELQSLQGHLAKLGSLGRAEDLHLLQGKAEDCFQLFEEASQVVERRQLALSHLAEFLQSHASLSGILRQLRQTVEATNSMNKNESDLIEKDLNDALQNAKALESAAVSLDGILSKAQYHLKIGSSEQRTSCRATADQLCGEVERIQNLLGTKQSEADALAVLKKAFQDQKEELLKSIEDIEERTDKERLKEPTRQALQQRLRVFNQLEDELNSHEHELCWLKDKAKQIAQKDVAFAPEVDREINRLEVTWDDTKRLIHENQGQCCGLIDLMREYQNLKSAVSKVLENASSVIVTRTTIKDQEDLKWAFSKHETAKNKMNYKQKDLDNFTSKGKHLLSELKKIHSSDFSLVKTDMESTVDKWLDVSEKLEENMDRLRVSLSIWDDVLSTRDEIEGWSNNCVPQMAENISNLDNHLRAEELLKEFESEVKNKALRLEELHSKVNDLKELTKNLETPPDLQFIEADLMQKLEHAKEITEVAKGTLKDFTAQSTQVEKFINDITTWFTKVEESLMNCAQNETCEALKKVKDIQKELQSQQSNISSTQENLNSLCRKYHSAELESLGRAMTGLIKKHEAVSQLCSKTQASLQESLEKHFSESMQEFQEWFLGAKAAAKESSDRTGDSKVLEAKLHDLQNILDSVSDGQSKLDAVTQEGQTLYAHLSKQIVSSIQEQITKANEEFQAFLKQCLKDKQALQDCASELGSFEDQHRKLNLWIHEMEERFNTENLGESKQHIPEKKNEVHKVEMFLGELLAARESLDKLSQRGQLLSEEGHGAGQEGRLCSQLLTSHQNLLRMTKEKLRSCQVALQEHEALEEALQSMWFWVKAIQDRLACAESTLGSKDTLEKRLSQIQDILLMKGEGEVKLNMAIGKGEQALRSSNKEGQRVIQTQLETLKEVWADIMSSSVHAQSTLESVISQWNDYVERKNQLEQWMESVDQKIEHPLQPQPGLKEKFVLLDHLQSILSEAEDHTRALHRLIAKSRELYEKTEDESFKDTAQEELKTQFNDIMTVAKEKMRKVEEIVKDHLMYLDAVHEFTDWLHSAKEELHRWSDMSGDSSATQKKLSKIKELIDSREIGASRLSRVESLAPEVKQNTTASGCELMHTEMQALRADWKQWEDSVFQTQSCLENLVSQMALSEQEFSGQVAQLEQALEQFSALLKTWAQQLTLLEGKNTDEEIVECWHKGQEILDALQKAEPRTEDLKSQLNELCRFSRDLSTYSGKVSGLIKEYNCLCLQASKGCQNKEQILQQRFRKAFRDFQQWLVNAKITTAKCFDIPQNISEVSTSLQKIQEFLSESENGQHKLNMMLSKGELLSTLLTKEKAKGIQAKVTAAKEDWKNFHSNLHQKESALENLKIQMKDFEVSAEPIQDWLSKTEKMVHESSNRLYDLPAKRREQQKLQSVLEEIHCYEPQLNRLKEKAQQLWEGQAASKSFRHRVSQLSSQYLALSNLTKEKVSRLDRIVAEHNQFSLGIKELQDWMTDAIHMLDSYCHPTSDKSVLDSRTLKLEALLSVKQEKEIQMKMIVTRGESVLQNTSPEGIPTIQQQLQSVKDMWASLLSAGIRCKSQLEGALSKWTSYQDGVRQFSGWMDSMEANLNESERQHAELRDKTTMLGKAKLLNEEVLSYSSLLETIEVKGAGMTEHYVTQLELQDLQERYRAIQERAKEAVTKSEKLVRLHQEYQRDLKAFEVWLGQEQEKLDQYSVLEGDAHTHETTLRDLQELQVHCAEGQALLNSVLHTREDVIPSGIPQAEDRALESLRQDWQAYQHRLSETRTQFNNVVNKLRLMEQKFQQVDEWLKTAEEKVSPRTRRQSNRATKEIQLHQMKKWHEEVTAYRDEVEEVGARAQEILDESHVNSRMGCQATQLTSRYQALLLQVLEQIKFLEEEIQSLEESESSLSSYSDWYGSTHKNFKNVATKIDKVDTVMMGKKLKTLEVLLKDMEKGHSLLKSAREKGERAVKYLEEGEAERLRKEIHDHMEQLKELTSTVRKEHMTLEKGLHLAKEFSDKCKALTQWIAEYQEILHVPEEPKMELYEKKAQLSKYKSLQQTVLSHEPSVKSVREKGEALLELVQDVTLKDKIDQLQSDYQDLCSIGKEHVFSLEAKVKDHEDYNSELQEVEKWLLQMSGRLVAPDLLETSSLETITQQLAHHKAMMEEIAGFEDRLNNLQMKGDTLIGQCADHLQA

SEQ ID NO: 2025 - DNA, 3689 bp, Homosapiens
acacagacaaggggaaactttcatccccacgcaggatatagctttttgctctgcagagtctaacttttgcaagtggaagcttcatggtggtggcggaggacctgagtgccctgaggatggcagaggacagctgtgtggatgcagatctcccagattgtaactgcgatgtcacaagggtgaagaagctgaaggagaccctggtagccgtgcagcagcttgataagaacatgagcagcctgaggacctggctcgctcacatcgagtcagagctggccaagccaatagtctacgattcctgtaactcggaagaaatacagagaaagcttaatgagcagcaggagcttcagagagacatagagaagcacagtacaggtgttgcatctgtcctcaacctgtgtgaagtcctgctgcacgactgtgacgcctgtgccactgatgccgagtgtgactctatacagcaggctacgagaaacctggaccggcggtggagaaacatttgtgctatgtccatggaaaggaggctgaaaatcgaagagacgtggcgattgtggcagaaatttctggatgactattcacgttttgaagattggctgaagtcttcagaaaggacagctgcttttcccagctcttctggggtgatctatacagttgccaaggaagaactaaagaaatttgaggctttccagcgacaggtccacgagtgcctgacgcagctggaactgatcaacaagcagtaccgccgcctggccagggagaaccgcactgattcagcatgtagcctcaaacagatggttcacgaaggcaaccagagatgggacaacctgcaaaagcgtgtcacctccatcttgcgcagactcaagcattttattggccagcgtgaggagtttgagactgcgcgggacagcattctggtctggctcacagagatggatctgcagctcactaatattgaacatttttctgagtgtgatgttcaagctaaaataaagcaactcaaggccttccagcaggaaatttcactgaaccacaataagattgagcagataattgcccaaggagaacagctgatagaaaagagtgagcccttggatgcagcgatcatcgaggaggaactagatgagctccgacggtactgccaggaggtcttcgggcgtgtggaaagataccataagaaactgatccgcctgcctctcccagacgatgagcacgacctctcagacagggagctggagctggaagactctgcagctctgtcggacctgcactggcacgaccgctctgcagacagcctgctttctccacagccttcctccaatctctccctctcgctcgctcagcccctccggagcgagcggtcaggacgagacaccccggctagtgtggactccatccccctggagtgggatcacgactatgacctcagtcgggacctggagtctgcaatgtccagagctctgccctctgaggatgaagaaggtcaggatgacaaagatttctacctccggggagctgttggcttatcagatgtaatgatccccgaaagccctgaggcctatgtaaaactcacagaaaatgcaatcaaaaatacctccggggaccacagtgccctagagtcacagatccgacaactgggcaaagccctggatgatagccgttttcagatacagcaaaccgaaaatatcattcgcagcaaaactcccacggggccggagctagacaccagctacaaaggctacatgaaactgctgggcgaatgcagtagcagtatagactccgtgaagagactggagcacaaactgaaggaggaagaggagagccttcctggctttgttaacctgcatagtaccgaaacccaaacggctggtgtgattgaccgatgggagcttctccaggcccaggcattgagcaaggagttgaggatgaagcagaacctccagaagtggcagcagtttaactcagacttgaacagcatctgggcctggctgggggacacggaggaggagttggaacagctccagcgtctggaactcagcactgacatccagaccatcgagctccagatcaaaaagctcaaggagctccagaaagctgtggaccaccgcaaagccatcatcctctccatcaatctctgcagccctgagttcacccaggctgacagcaaggagagccgggacctgcaggatcgcttgtcgcagatgaatgggcgctgggaccgagtgtgctctctgctggaggagtggcggggcctgctgcaggatgccctgatgcagtgccagggtttccatgaaatgagccatggtttgcttcttatgctggagaacattgacagaaggaaaaatgaaattgtccctattgattctaaccttgatgcagagatacttcaggaccatcacaaacagcttatgcaaataaagcatgagctgttggaatcccaactcagagtagcctctttgcaagacatgtcttgccaactactggtgaatgctgaaggaacagactgtttagaagccaaagaaaaagtccatgttattggaaatcggctcaaacttctcttgaaggaggtcagtcgtcatatcaaggaactggagaagttattagacgtgtcaagtagtcagcaggatttgtcttcctggtcttctgctgatgaactggacacctcagggtctgtgagtcccacatcaggaaggagcaccccaaacagacagaaaacgccacgaggcaagtgtagtctctcacagcctggaccctctgtcagcagtccacatagcaggtccacaaaaggtggctccgattcctccctttctgagccagggccaggtcggtccggccgcggcttcctgttcagagtcctccgagcagctcttccccttcagcttctcctgctcctcctcatcgggcttgcctgccttgtaccaatgtcagaggaagactacagctgtgccctctccaacaactttgcccggtcattccaccccatgctcagatacacgaatggccctcctccactctgaactaagcagatgccatctgcagaagtgctggtagcataaggaggatcgggtcataagcaatcccaaactaccaacaagaggaccttgatcttggcgaaagccctcggtgtggcagctttagccctcctccagatcacatgtgtgcaaattatggcttcagaggtggaagataaacagtgacgggggaacaaacagacaacaagaaggtttggaagaaatctggtttgagactctgaaccttagcactaaggagattgagtaaggacctccaaagttccccggactcatgaattctgggcccttggcccattctgtgcacagccaaggacttcagtagaccatctgggcagctttcccatggtgctgctccaaccatcagataaatgaccctcccaagcaccatgtcagtgtcgtacaatctaccaaccaaccagtgctgaagagattttagaaccttgtaacatacaatttttaagagcttatatggcagcttcctttttaccttgttttcctttggggcatgatgttttaacctttgctttagaagcacaagctgtaaatctaaaaggcacttttttttagaggtataaagaaaaactagatgtaataaataagatcatggaaggctttatgtgaaaaaagttgaatgttatagtaaaaaaaaaaagatatttatgt

SEQ ID NO: 2026 - protein, 975 aa, Homosapiens; identical to SEQ ID NO: 2012

SEQ ID NO: 2027 - DNA, 3823 bp, Homosapiens
aaggtaaagccactagagagaaactgaaagaaaacattcttaagataaattgaattgacattttctctctaaaatatgatttatagaccacagataggaattaagagtttcctgataattttggcttcatattattttaaaggattatcaagaggaaattgctattgctcaagagaacaaaatacagctccaacaaatgggagaacgacttgctaaagccagccatgaaagcaaagcatctgagattgaatacaagctgggaaaggtcaacgaccggtggcagcatctcctggacctcattgcagccagggtgaagaagctgaaggagaccctggtagccgtgcagcagcttgataagaacatgagcagcctgaggacctggctcgctcacatcgagtcagagctggccaagccaatagtctacgattcctgtaactcggaagaaatacagagaaagcttaatgagcagcaggagcttcagagagacatagagaagcacagtacaggtgttgcatctgtcctcaacctgtgtgaagtcctgctgcacgactgtgacgcctgtgccactgatgccgagtgtgactctatacagcaggctacgagaaacctggaccggcggtggagaaacatttgtgctatgtccatggaaaggaggctgaaaatcgaagagacgtggcgattgtggcagaaatttctggatgactattcacgttttgaagattggctgaagtcttcagaaaggacagctgcttttcccagctcttctggggtgatctatacagttgccaaggaagaactaaagaaatttgaggctttccagcgacaggtccacgagtgcctgacgcagctggaactgatcaacaagcagtaccgccgcctggccagggagaaccgcactgattcagcatgtagcctcaaacagatggttcacgaaggcaaccagagatgggacaacctgcaaaagcgtgtcacctccatcttgcgcagactcaagcattttattggccagcgtgaggagtttgagactgcgcgggacagcattctggtctggctcacagagatggatctgcagctcactaatattgaacatttttctgagtgtgatgttcaagctaaaataaagcaactcaaggccttccagcaggaaatttcactgaaccacaataagattgagcagataattgcccaaggagaacagctgatagaaaagagtgagcccttggatgcagcgatcatcgaggaggaactagatgagctccgacggtactgccaggaggtcttcgggcgtgtggaaagataccataagaaactgatccgcctgcctctcccagacgatgagcacgacctctcagacagggagctggagctggaagactctgcagctctgtcggacctgcactggcacgaccgctctgcagacagcctgctttctccacagccttcctccaatctctccctctcgctcgctcagcccctccggagcgagcggtcaggacgagacaccccggctagtgtggactccatccccctggagtgggatcacgactatgacctcagtcgggacctggagtctgcaatgtccagagctctgccctctgaggatgaagaaggtcaggatgacaaagatttctacctccggggagctgttggcttatcagatgtaatgatccccgaaagccctgaggcctatgtaaaactcacagaaaatgcaatcaaaaatacctccggggaccacagtgccctagagtcacagatccgacaactgggcaaagccctggatgatagccgttttcagatacagcaaaccgaaaatatcattcgcagcaaaactcccacggggccggagctagacaccagctacaaaggctacatgaaactgctgggcgaatgcagtagcagtatagactccgtgaagagactggagcacaaactgaaggaggaagaggagagccttcctggctttgttaacctgcatagtaccgaaacccaaacggctggtgtgattgaccgatgggagcttctccaggcccaggcattgagcaaggagttgaggatgaagcagaacctccagaagtggcagcagtttaactcagacttgaacagcatctgggcctggctgggggacacggaggaggagttggaacagctccagcgtctggaactcagcactgacatccagaccatcgagctccagatcaaaaagctcaaggagctccagaaagctgtggaccaccgcaaagccatcatcctctccatcaatctctgcagccctgagttcacccaggctgacagcaaggagagccgggacctgcaggatcgcttgtcgcagatgaatgggcgctgggaccgagtgtgctctctgctggaggagtggcggggcctgctgcaggatgccctgatgcagtgccagggtttccatgaaatgagccatggtttgcttcttatgctggagaacattgacagaaggaaaaatgaaattgtccctattgattctaaccttgatgcagagatacttcaggaccatcacaaacagcttatgcaaataaagcatgagctgttggaatcccaactcagagtagcctctttgcaagacatgtcttgccaactactggtgaatgctgaaggaacagactgtttagaagccaaagaaaaagtccatgttattggaaatcggctcaaacttctcttgaaggaggtcagtcgtcatatcaaggaactggagaagttattagacgtgtcaagtagtcagcaggatttgtcttcctggtcttctgctgatgaactggacacctcagggtctgtgagtcccacatcaggaaggagcaccccaaacagacagaaaacgccacgaggcaagtgtagtctctcacagcctggaccctctgtcagcagtccacatagcaggtccacaaaaggtggctccgattcctccctttctgagccagggccaggtcggtccggccgcggcttcctgttcagagtcctccgagcagctcttccccttcagcttctcctgctcctcctcatcgggcttgcctgccttgtaccaatgtcagaggaagactacagctgtgccctctccaacaactttgcccggtcattccaccccatgctcagatacacgaatggccctcctccactctgaactaagcagatgccatctgcagaagtgctggtagcataaggaggatcgggtcataagcaatcccaaactaccaacaagaggaccttgatcttggcgaaagccctcggtgtggcagctttagccctcctccagatcacatgtgtgcaaattatggcttcagaggtggaagataaacagtgacgggggaacaaacagacaacaagaaggtttggaagaaatctggtttgagactctgaaccttagcactaaggagattgagtaaggacctccaaagttccccggactcatgaattctgggcccttggcccattctgtgcacagccaaggacttcagtagaccatctgggcagctttcccatggtgctgctccaaccatcagataaatgaccctcccaagcaccatgtcagtgtcgtacaatctaccaaccaaccagtgctgaagagattttagaaccttgtaacatacaatttttaagagcttatatggcagcttcctttttaccttgttttcctttggggcatgatgttttaacctttgctttagaagcacaagctgtaaatctaaaaggcacttttttttagaggtataaagaaaaactagatgtaataaataagatcatggaaggctttatgtgaaaaaagttgaatgttatagtaaaaaaaaaaagatatttatgt

SEQ ID NO: 2028 - protein, 982 aa, Homosapiens; identical to SEQ ID NO: 2014

SEQ ID NO: 2029 - DNA, 5769 bp, Homosapiens
ctgaaatcagtgcttgaccaatggagtagtcacaaagtggcctttgacaagataaacagttacctcatggaggccagatactctctttcccgattccgtctgctgactggctccttagaagctgtgcaagttcaggtggacaatcttcagaatctccaagatgatctggaaaaacaggaaaggagcttacagaaatttggctctatcaccaaccaattattaaaagagtgtcacccacccgtgacagaaactcttaccaatacactgaaagaagtcaacatgagatggaataacttgctggaagagattgctgagcagctacagtccagcaaggccctacttcagctttggcaaagatacaaggactactccaaacagtgtgcttcgacagttcagcagcaggaggatcgaaccaatgagctgttgaaggcagccacaaacaaggacattgccgatgatgaggttgccacatggattcaagattgcaacgacctcctcaaaggactgggcacagttaaagattccctcttttttctccatgagctgggagagcaactgaagcaacaagtggatgcttccgcagcatcagctattcaatcggatcaactctctttgagtcaacacttgtgtgccctggagcaagctctctgcaaacagcagacttcattacaggctggagttcttgattatgaaacctttgccaagagtttagaagctttggaggcctggatagtggaagctgaagaaatactacaagggcaggaccctagccactcatctgacctctccacaatccaggaaaggatggaagaacttaagggacagatgttaaaattcagcagcatggctccagatttagaccgtctaaatgagcttggatataggttacccttgaatgataaggaaatcaaaagaatgcagaatctgaaccgccattggtctctgatctcctctcagactacagaaagattcagcaagttgcagtcatttttgctacaacatcagactttcttggaaaaatgtgaaacatggatggaattcctagttcagacagaacaaaagttagcagtagagatttcaggaaattatcagcaccttttggaacagcagagagcacacgagttgtttcaagccgagatgttcagtcgtcagcagattttgcactcaatcattattgatgggcaacgtcttctagaacaaggtcaagttgatgacagggatgaattcaacctgaaattgacactcctcagtaatcaatggcagggagtgattcgcagggcccagcagaggcgggggatcattgacagccagattcgccagtggcagcgctatagggagatggcagaaaagcttcgtaaatggttggttgaagtgtcctacctccccatgagtggtctcggaagtgttcctataccactgcaacaagcaaggaccctctttgatgaagtgcagttcaaagaaaaagtgtttctgcggcaacaaggcagctacatcctgactgtggaggctggcaagcaactccttctctcggcggacagtggcgctgaggccgccttgcaggccgaactcgctgaaatccaagagaaatggaaatcagccagcatgcggctggaagaacagaagaaaaaactagccttcttgttgaaagactgggaaaaatgtgagaaaggaatagcagattccctggagaaactacgaactttcaaaaagaagctttcgcagtctctcccggatcaccatgaagagctccatgcagaacaaatgcgttgcaaggaattagaaaatgcagttgggagctggacagatgacttgacccagttgagcctgctgaaggacaccctctctgcctatatcagtgctgatgatatctccattcttaatgaacgcgtagagcttctgcaaaggcagtgggaagaactatgccaccagctctccttaaggcggcagcaaataggtgaaagattgaatgaatgggcagtcttcagtgaaaagaacaaggaactctgtgagtggttgactcaaatggaaagcaaagtttctcagaatggagacattctcattgaagaaatgatagagaagctcaagaaggattatcaagaggaaattgctattgctcaagagaacaaaatacagctccaacaaatgggagaacgacttgctaaagccagccatgaaagcaaagcatctgagattgaatacaagctgggaaaggtcaacgaccggtggcagcatctcctggacctcattgcagccagggtgaagaagctgaaggagaccctggtagccgtgcagcagcttgataagaacatgagcagcctgaggacctggctcgctcacatcgagtcagagctggccaagccaatagtctacgattcctgtaactcggaagaaatacagagaaagcttaatgagcagcaggagcttcagagagacatagagaagcacagtacaggtgttgcatctgtcctcaacctgtgtgaagtcctgctgcacgactgtgacgcctgtgccactgatgccgagtgtgactctatacagcaggctacgagaaacctggaccggcggtggagaaacatttgtgctatgtccatggaaaggaggctgaaaatcgaagagacgtggcgattgtggcagaaatttctggatgactattcacgttttgaagattggctgaagtcttcagaaaggacagctgcttttcccagctcttctggggtgatctatacagttgccaaggaagaactaaagaaatttgaggctttccagcgacaggtccacgagtgcctgacgcagctggaactgatcaacaagcagtaccgccgcctggccagggagaaccgcactgattcagcatgtagcctcaaacagatggttcacgaaggcaaccagagatgggacaacctgcaaaagcgtgtcacctccatcttgcgcagactcaagcattttattggccagcgtgaggagtttgagactgcgcgggacagcattctggtctggctcacagagatggatctgcagctcactaatattgaacatttttctgagtgtgatgttcaagctaaaataaagcaactcaaggccttccagcaggaaatttcactgaaccacaataagattgagcagataattgcccaaggagaacagctgatagaaaagagtgagcccttggatgcagcgatcatcgaggaggaactagatgagctccgacggtactgccaggaggtcttcgggcgtgtggaaagataccataagaaactgatccgcctgcctctcccagacgatgagcacgacctctcagacagggagctggagctggaagactctgcagctctgtcggacctgcactggcacgaccgctctgcagacagcctgctttctccacagccttcctccaatctctccctctcgctcgctcagcccctccggagcgagcggtcaggacgagacaccccggctagtgtggactccatccccctggagtgggatcacgactatgacctcagtcgggacctggagtctgcaatgtccagagctctgccctctgaggatgaagaaggtcaggatgacaaagatttctacctccggggagctgttggcttatcagatgtaatgatccccgaaagccctgaggcctatgtaaaactcacagaaaatgcaatcaaaaatacctccggggaccacagtgccctagagtcacagatccgacaactgggcaaagccctggatgatagccgttttcagatacagcaaaccgaaaatatcattcgcagcaaaactcccacggggccggagctagacaccagctacaaaggctacatgaaactgctgggcgaatgcagtagcagtatagactccgtgaagagactggagcacaaactgaaggaggaagaggagagccttcctggctttgttaacctgcatagtaccgaaacccaaacggctggtgtgattgaccgatgggagcttctccaggcccaggcattgagcaaggagttgaggatgaagcagaacctccagaagtggcagcagtttaactcagacttgaacagcatctgggcctggctgggggacacggaggaggagttggaacagctccagcgtctggaactcagcactgacatccagaccatcgagctccagatcaaaaagctcaaggagctccagaaagctgtggaccaccgcaaagccatcatcctctccatcaatctctgcagccctgagttcacccaggctgacagcaaggagagccgggacctgcaggatcgcttgtcgcagatgaatgggcgctgggaccgagtgtgctctctgctggaggagtggcggggcctgctgcaggatgccctgatgcagtgccagggtttccatgaaatgagccatggtttgcttcttatgctggagaacattgacagaaggaaaaatgaaattgtccctattgattctaaccttgatgcagagatacttcaggaccatcacaaacagcttatgcaaataaagcatgagctgttggaatcccaactcagagtagcctctttgcaagacatgtcttgccaactactggtgaatgctgaaggaacagactgtttagaagccaaagaaaaagtccatgttattggaaatcggctcaaacttctcttgaaggaggtcagtcgtcatatcaaggaactggagaagttattagacgtgtcaagtagtcagcaggatttgtcttcctggtcttctgctgatgaactggacacctcagggtctgtgagtcccacatcaggaaggagcaccccaaacagacagaaaacgccacgaggcaagtgtagtctctcacagcctggaccctctgtcagcagtccacatagcaggtccacaaaaggtggctccgattcctccctttctgagccagggccaggtcggtccggccgcggcttcctgttcagagtcctccgagcagctcttccccttcagcttctcctgctcctcctcatcgggcttgcctgccttgtaccaatgtcagaggaagactacagctgtgccctctccaacaactttgcccggtcattccaccccatgctcagatacacgaatggccctcctccactctgaactaagcagatgccatctgcagaagtgctggtagcataaggaggatcgggtcataagcaatcccaaactaccaacaagaggaccttgatcttggcgaaagccctcggtgtggcagctttagccctcctccagatcacatgtgtgcaaattatggcttcagaggtggaagataaacagtgacgggggaacaaacagacaacaagaaggtttggaagaaatctggtttgagactctgaaccttagcactaaggagattgagtaaggacctccaaagttccccggactcatgaattctgggcccttggcccattctgtgcacagccaaggacttcagtagaccatctgggcagctttcccatggtgctgctccaaccatcagataaatgaccctcccaagcaccatgtcagtgtcgtacaatctaccaaccaaccagtgctgaagagattttagaaccttgtaacatacaatttttaagagcttatatggcagcttcctttttaccttgttttcctttggggcatgatgttttaacctttgctttagaagcacaagctgtaaatctaaaaggcacttttttttagaggtataaagaaaaactagatgtaataaataagatcatggaaggctttatgtgaaaaaagttgaatgttatagtaaaaaaaaaaagatatttatgt

SEQ ID NO: 2030 - protein, 1674 aa, Homosapiens
MEARYSLSRFRLLTGSLEAVQVQVDNLQNLQDDLEKQERSLQKFGSITNQLLKECHPPVTETLTNTLKEVNMRWNNLLEEIAEQLQSSKALLQLWQRYKDYSKQCASTVQQQEDRTNELLKAATNKDIADDEVATWIQDCNDLLKGLGTVKDSLFFLHELGEQLKQQVDASAASAIQSDQLSLSQHLCALEQALCKQQTSLQAGVLDYETFAKSLEALEAWIVEAEEILQGQDPSHSSDLSTIQERMEELKGQMLKFSSMAPDLDRLNELGYRLPLNDKEIKRMQNLNRHWSLISSQTTERFSKLQSFLLQHQTFLEKCETWMEFLVQTEQKLAVEISGNYQHLLEQQRAHELFQAEMFSRQQILHSIIIDGQRLLEQGQVDDRDEFNLKLTLLSNQWQGVIRRAQQRRGIIDSQIRQWQRYREMAEKLRKWLVEVSYLPMSGLGSVPIPLQQARTLFDEVQFKEKVFLRQQGSYILTVEAGKQLLLSADSGAEAALQAELAEIQEKWKSASMRLEEQKKKLAFLLKDWEKCEKGIADSLEKLRTFKKKLSQSLPDHHEELHAEQMRCKELENAVGSWTDDLTQLSLLKDTLSAYISADDISILNERVELLQRQWEELCHQLSLRRQQIGERLNEWAVFSEKNKELCEWLTQMESKVSQNGDILIEEMIEKLKKDYQEEIAIAQENKIQLQQMGERLAKASHESKASEIEYKLGKVNDRWQHLLDLIAARVKKLKETLVAVQQLDKNMSSLRTWLAHIESELAKPIVYDSCNSEEIQRKLNEQQELQRDIEKHSTGVASVLNLCEVLLHDCDACATDAECDSIQQATRNLDRRWRNICAMSMERRLKIEETWRLWQKFLDDYSRFEDWLKSSERTAAFPSSSGVIYTVAKEELKKFEAFQRQVHECLTQLELINKQYRRLARENRTDSACSLKQMVHEGNQRWDNLQKRVTSILRRLKHFIGQREEFETARDSILVWLTEMDLQLTNIEHFSECDVQAKIKQLKAFQQEISLNHNKIEQIIAQGEQLIEKSEPLDAAIIEEELDELRRYCQEVFGRVERYHKKLIRLPLPDDEHDLSDRELELEDSAALSDLHWHDRSADSLLSPQPSSNLSLSLAQPLRSERSGRDTPASVDSIPLEWDHDYDLSRDLESAMSRALPSEDEEGQDDKDFYLRGAVGLSDVMIPESPEAYVKLTENAIKNTSGDHSALESQIRQLGKALDDSRFQIQQTENIIRSKTPTGPELDTSYKGYMKLLGECSSSIDSVKRLEHKLKEEEESLPGFVNLHSTETQTAGVIDRWELLQAQALSKELRMKQNLQKWQQFNSDLNSIWAWLGDTEEELEQLQRLELSTDIQTIELQIKKLKELQKAVDHRKAIILSINLCSPEFTQADSKESRDLQDRLSQMNGRWDRVCSLLEEWRGLLQDALMQCQGFHEMSHGLLLMLENIDRRKNEIVPIDSNLDAEILQDHHKQLMQIKHELLESQLRVASLQDMSCQLLVNAEGTDCLEAKEKVHVIGNRLKLLLKEVSRHIKELEKLLDVSSSQQDLSSWSSADELDTSGSVSPTSGRSTPNRQKTPRGKCSLSQPGPSVSSPHSRSTKGGSDSSLSEPGPGRSGRGFLFRVLRAALPLQLLLLLLIGLACLVPMSEEDYSCALSNNFARSFHPMLRYTNGPPPL

SEQ ID NO: 2031 - DNA, 8192 bp, Homosapiens; identical to SEQ ID NO: 2015

SEQ ID NO: 2032 - protein, 3212 aa, Homosapiens; identical to SEQ ID NO: 2016

SEQ ID NO: 2033 - DNA, 8192 bp, Homosapiens; identical to SEQ ID NO: 2017

SEQ ID NO: 2034 - protein, 3321 aa, Homosapiens; identical to SEQ ID NO: 2018

SEQ ID NO: 2035 - DNA, 8192 bp, Homosapiens; identical to SEQ ID NO: 2023

SEQ ID NO: 2036 - protein, 4000 aa, Homosapiens; identical to SEQ ID NO: 2024

SEQ ID NO: 2037 - DNA, 900 bp, Homosapiens
tgaaaaactcagagagctaacctagaaatttggatttctccctttactggagatgaaagttaacactgggccaccgcttcccacagggatcaattgcctgaaactgtatgtggctgctgttttagacaggccgcatgtttttcagtttgccacagtctccatcactccctactcttcccagaaatagaggtccggtgtctactgccatttaccaaccgctttatgccattgttttgttctaatccttgactgatttccatcatttctattactgcctggtcctataggtatgttatttgagaataccttgttcaactctaggtacacattaaaatcactagggagtctttttaaaaataccaattttgagactcacccctagaaattctgattgttgttctgggatgtggcctaagcaaaggaaatttttaaaagttttaccagtgattcttatgtacagccagggcctggaaccattgctttactgtgttaaattctcaagattttaccttagcgtgatctatattaccttctactgaattcaacaggagaagttgaatgatcagctggaggaacaaaggcaggaacaggccctgcagaggtatcgctgtgaagccgatgagctggacagctggctcttgagtaccaaggccactctggacactgcgctgagtccacccaaggagcccatggacatggaggcccagcttatggactgccagaatatgctggtggaaatagagcagaaggtggtggctttatcagaactgtcagtccacaatgagaacctgctgctggagggcaaagctcacaccaaggacgaggccgagcagctggctggaaagctgagaaggctcaaggggagcctgctggagctgcagagagccctgcatgataagc

SEQ ID NO: 2038 - protein, 69 aa, Homosapiens
MDMEAQLMDCQNMLVEIEQKVVALSELSVHNENLLLEGKAHTKDEAEQLAGKLRRLKGSLLELQRALHD

SEQ ID NO: 2039 - DNA, 5724 bp, Homosapiens
cgcctgaacacaaggaaataaatcatttaaatgatcagtggctcgatttgtgccgtcagtctaacaacctgtgcttgcaaagggaagaggatcttcagagaacaagagattaccatgactgtatgaatgttgttgaagtgttcctagaaaaatttactacagaatgggataacttggccagatctgatgcagagagtacagctgtccacctggaagctttgaaaaagttagcattggcattgcaggagagaaagtatgctattgaagatctgaaagatcaaaagcagaaaatgatagagcatctgaatttagatgacaaggagttagtcaaagaacagacgagtcatttagagcaacgttggtttcagcttgaggacctcattaaaaggaaaatccaagtgtcagtcaccaacttggaggagttaaatgtggtgcagtccagatttcaggagctaatggagtgggcagaagagcaacaacccaacatcgccgaggcccttaagcagagccctcctccagatatggctcagaaccttctcatggatcacctggccatctgcagtgaactggaggccaagcagatgctcctgaaatcgcttataaaggacgcagacagggtcatggcagatcttggtctcaatgagcgacaggtcatccagaaggctctctctgatgcacaaagccacgtgaattgtctcagtgacttagtgggccagcgaagaaagtacttaaacaaagccttgtccgagaaaacccagtttctcatggcagtgttccaggccaccagccaaattcagcaacatgagcgaaagataatgttccgtgaacacatctgtctgttaccagatgatgtgagcaaacaagtcaaaacatgtaagagtgcacaagccagcctcaagacttaccaaaatgaagtcactggactttgggcccagggtcgcgaactaatgaaggaagtcacagagcaggaaaagagtgaagtgctggggaagcttcaggaattgcagagtgtctatgacagtgttttacaaaagtgcagtcaccggttacaagaactagagaagaatttggtttctaggaagcattttaaggaagattttgataaagcttgccactggctaaaacaagcagatattgttacatttcctgaaatcaacctaatgaatgagagttctgagcttcatacacaactggctaaataccaaaacattcttgaacaatctccagaatatgaaaatcttctacttacgctgcagagaactgggcagaccatattaccatcgctgaatgaagtcgatcattcctacctcagtgaaaagctaaatgctttgcctcgacaatttaatgtaattgttgccttggctaaagacaagttctataaagtccaggaagcaattcttgctcggaaggaatatgcttccttgattgagttgacaacccagtctctgagtgaacttgaagcccaattcttgaggatgagcaaagttcccaccgacctggccgttgaggaggctctttctctgcaagatggttgcagagccattctggacgaggtggcgggccttggggaggcggtggatgaactgaaccagaaaaaagaaggttttcgcagcacaggtcagccttggcagccagacaagatgctgcaccttgtcaccttatatcacaggctgaagcgacaaacagaacagagggttagcttattagaagacaccaccagtgcttaccaagaacacgagaagatgtgccaacagctggagagacaactgaagtctgtaaaagaggagcagtccaaagtgaatgaggaaacgctgcctgcagaggagaagctcaaaatgtatcactccctggcaggaagtctccaggactcagggattgtactgaaacgagtaaccatacatcttgaagatcttgccccacaccttgaccccttggcttatgagaaagccaggcatcagatccagtcctggcaaggggagttaaaactgttgacttctgccattggtgagacggtgacagaatgtgagagccgaatggtgcagagtatagacttccagactgagatgagtcgctccctggactggctgaggagagtgaaggcagagctcagtgggccggtgtacctagacctcaacctgcaggacatccaagaggaaatcagaaaaatccaaattcatcaggaagaggtccagtccagcttgagaatcatgaatgcgctgagtcacaaggaaaaggagaagttcacaaaggccaaggagctgatttctgcggatttagaacacagcctcgctgagctctcagagctggatggagacatccaggaagccttacgcaccagacaggctaccttgactgaaatatatagccagtgtcaaaggtattatcaggtatttcaagcagccaatgactggcttgaggatgcccaagaattgttacagctggcaggcaatggcctagacgtggagagcgcagaggaaaatctcaaaagccacatggaatttttcagtacagaggatcagttccatagtaacctggaggagctccacagcctggtagccaccctggacccactcatcaagccaaccggcaaagaagacctagaacagaaagtggcttctctggaactcaggagccagaggatgagccgggactctggtgcccaagtggatctcttgcagagatgcacagctcaatggcacgattaccagaaagcaagggaagaggttattgaattgatgaatgatacagaaaagaaattgtctgagttttctttgttgaagacttcgtctagtcatgaagcggaagaaaaattgtcagaacacaaggctttagtgtcagtggttaactctttccatgagaaaattgtggcccttgaggaaaaagcttcacaactggagaaaaccggaaatgatgccagcaaagccaccctgagcaggtcaatgaccaccgtctggcagcgctggacacgccttcgagctgtggcccaggaccaggagaagatcctggaagatgcagtggatgagtggacgggctttaacaacaaggttaaaaaggccactgaaatgattgatcagctgcaagataagttacctggaagttcagcagagaaagcatcgaaagcagagctcttaactcttcttgaataccacgacacgttcgttctggagctggagcagcagcagtcggccttgggcatgctgcggcagcaaaccctgagcatgctccaggatggagccgccccaacccctggggaagagcctccgctcatgcaggaaatcaccgccatgcaagatcggtgcctgaacatgcaggagaaagtgaagactaatggaaagttggtgaagcaagagctgaaggaccgagaaatggtggagactcagatcaattctgtgaaatgttgggttcaggaaacgaaagaatatttagggaatccaacaatagaaatagatgctcaacttgaagaacttcagattctcctaacagaagccacaaatcaccgacagaacattgaaaaaatggcagaagaacagaaggagaagtacttaggtctttataccatattaccttctgaactctcccttcagttggctgaagtggcgttagatctaaagatccgagatcagatccaagacaaaataaaagaagttgagcagagcaaggccacgagccaggaactcagccggcaaattcagaagttagctaaagacctcacaactattctaactaagctgaaagcgaagacagataatgtagttcaagctaaaactgaccaaaaggtgctgggagaggaattagatggctgtaattcaaagttaatggaattagatgcagcagtacagaaattcttggaacagaatggccaactgggtaagccactggccaagaagataggaaaactgactgaacttcaccagcagaccattagacaagctgagaatcggctctccaagctcaatcaggcagcatcacatttagaagaatacaatgaaatgcttgaattaattttgaagtggattgaaaaagctaaagtcttggctcatggaactattgcatggaattctgcaagccagcttcgggaacaatatattttgcatcaggtaaccttaggaaaaataatctttaaaaagtaaccaagggcaatttgatttaactgggtagactgacacaacacttagagggctgtgatgtaaaatttttggagctaccagataaaaagaatgctaaggtacccctaagttgttcagtagttggacagaaaggagcttctcatgaaatttcatgaaattgaataaataaatatccttgatcttccctaaacctaccttacaccaagacccaaaccaatcagccttgtagaactcattttctgtagcttctttgaaataattatctgcagggatctggtgggaaattctttcctgtgaagagatgcaatgaagtgtggaaagattctagactccacactcagactggtgggaaaaccaagctccgccatgcagggctgtgtgatttggagcagaatgctttgcctctctgaattctgtcttctcatcatttgtatgaagacgtaaataatattcgtatttcagacttatgagatcaagtggtttaaggtacacacgtgcaaacgtctgcctggcacatgcaggtgctcagtgggagatctcccgcctcctccctcagccctcacccaggcctgtcatctggccttccacaggaggtcgggcagcccagagcaagccatgagtccacatcacatgctggctatgttagttcatttcctctgaagttacatgagaaaaatgttccttttctgtcagtcacgtcatccaggaaattatttcatccttttgtaacttaagcttaaattagacacagatagttaataggctagttatcatataataaaatatagggtgacttttataggagttacatgggtatcgagtattctagatttttgtctcttatattatttatgtatccttgtggcctttaaatgaatccctgtttccattcttgtttacagggttctagatcaaagcctcatttttccatttttggaatgctttaacagcttctaatttttccctatattcacagtctttcttctctgatcaatcttgcgtattcttcccacaatgtctttcttaagcaactccaatcttttgctttaagatatgcttagatatgaacagacaggacttaagttaccactgatttgaaaacaatgaaaaaaagccaacatccttagaagtctagaaatgcaaatttcagcaaaaaaagagaggaagaaagacaaacttaactgtcacattcatactgtttctttcaagttcatatttaaggaagtgagagctctcaaacattgctggtatcctggtaaaatctctttgaaaaataattggcaaaatgtatggtgattgtcaaaaatgttgctactctgggccacgtgcggtggctcacacctgtaatcccagcactttgggaggccgaggtgggtggatcacaaggtcaggagttcaagaccagcttggccaatatggtgaaaccccatctctactaaaaatacaaaagttagctgggcatggtggtgggcacctgtagtcccagctactcaggaatctgaggcaggagaatcgcttgaactcgggaggtggaggttgcagtgagccaagatcatgccactgcactccagcctgggtgacagtgagactccatctc

SEQ ID NO: 2040 - protein, 1335 aa, Homosapiens
MNVVEVFLEKFTTEWDNLARSDAESTAVHLEALKKLALALQERKYAIEDLKDQKQKMIEHLNLDDKELVKEQTSHLEQRWFQLEDLIKRKIQVSVTNLEELNVVQSRFQELMEWAEEQQPNIAEALKQSPPPDMAQNLLMDHLAICSELEAKQMLLKSLIKDADRVMADLGLNERQVIQKALSDAQSHVNCLSDLVGQRRKYLNKALSEKTQFLMAVFQATSQIQQHERKIMFREHICLLPDDVSKQVKTCKSAQASLKTYQNEVTGLWAQGRELMKEVTEQEKSEVLGKLQELQSVYDSVLQKCSHRLQELEKNLVSRKHFKEDFDKACHWLKQADIVTFPEINLMNESSELHTQLAKYQNILEQSPEYENLLLTLQRTGQTILPSLNEVDHSYLSEKLNALPRQFNVIVALAKDKFYKVQEAILARKEYASLIELTTQSLSELEAQFLRMSKVPTDLAVEEALSLQDGCRAILDEVAGLGEAVDELNQKKEGFRSTGQPWQPDKMLHLVTLYHRLKRQTEQRVSLLEDTTSAYQEHEKMCQQLERQLKSVKEEQSKVNEETLPAEEKLKMYHSLAGSLQDSGIVLKRVTIHLEDLAPHLDPLAYEKARHQIQSWQGELKLLTSAIGETVTECESRMVQSIDFQTEMSRSLDWLRRVKAELSGPVYLDLNLQDIQEEIRKIQIHQEEVQSSLRIMNALSHKEKEKFTKAKELISADLEHSLAELSELDGDIQEALRTRQATLTEIYSQCQRYYQVFQAANDWLEDAQELLQLAGNGLDVESAEENLKSHMEFFSTEDQFHSNLEELHSLVATLDPLIKPTGKEDLEQKVASLELRSQRMSRDSGAQVDLLQRCTAQWHDYQKAREEVIELMNDTEKKLSEFSLLKTSSSHEAEEKLSEHKALVSVVNSFHEKIVALEEKASQLEKTGNDASKATLSRSMTTVWQRWTRLRAVAQDQEKILEDAVDEWTGFNNKVKKATEMIDQLQDKLPGSSAEKASKAELLTLLEYHDTFVLELEQQQSALGMLRQQTLSMLQDGAAPTPGEEPPLMQEITAMQDRCLNMQEKVKTNGKLVKQELKDREMVETQINSVKCWVQETKEYLGNPTIEIDAQLEELQILLTEATNHRQNIEKMAEEQKEKYLGLYTILPSELSLQLAEVALDLKIRDQIQDKIKEVEQSKATSQELSRQIQKLAKDLTTILTKLKAKTDNVVQAKTDQKVLGEELDGCNSKLMELDAAVQKFLEQNGQLGKPLAKKIGKLTELHQQTIRQAENRLSKLNQAASHLEEYNEMLELILKWIEKAKVLAHGTIAWNSASQLREQYILHQVTLGKIIFKK

SEQ ID NO: 2041 - DNA, 7372 bp, Homosapiens
aggagctgatagattccagagagattggtgcaagccgtctcagcagagtggagtcgctggctcccgaagtgaaacagaacacaactgccagtgggtgtgagctcatgcacacggagatgcaggccctgcgtgccgactggaagcagtgggaagacagtgtattccaaacgcagagctgtttggagaacctggtcagccagatggccctttcggagcaggaattctcaggccaagtggctcaactggagcaggccctggaacagttcagtgcccttctgaaaacctgggctcagcagttaaccctcctggaaggcaagaacacggatgaggagatagtggaatgctggcacaaaggacaagagatactggatgctttgcaaaaagcagagcctagaacagaggatctcaagtctcagctgaatgaactttgtcgattttccagagacctgagtacctacagtggaaaagtttctggcttgattaaagagtataattgtctttgtttgcaagcatccaagggctgccagaataaagaacagattttacagcaaagatttcgaaaggccttcagggatttccagcagtggttggttaatgcaaaaatcactaccgccaagtgttttgatatacctcaaaatataagtgaagtttcaactagtcttcagaaaatacaggagtttttgtcagaaagtgaaaatggacagcacaagctaaacatgatgctgtctaaaggggaacttctgagtaccctgctgaccaaagagaaagcgaaagggatccaggccaaagttacagctgcaaaagaagattggaaaaattttcattcaaatctccaccaaaaagaatctgctctagagaatctaaagatccaaatgaaggactttgaagtaagtgctgagcctatccaggactggctgagtaaaactgagaagatggtccatgaaagcagcaatcgcctctatgatctgccagcaaagaggagggagcagcagaagctccaggtgatgagcccgcctccccgtagccccatctgacctagtctttgtccgtcctctgtcgaccttacagatgcatgctcagcacccttgagttagactgtgctgccgtgagacatagtgtgtttttccccatttctggtggattttatgttttctgactttccttggaagtatgatttgtttccttccatgatttgtgctccacggtgtgtagattggagataataaagcctccagggtacacggactgcctgccagtgttgatttccatgttctctgggccaaagcttcgtccgcgatgtgcttttccccagcctctgaatagtaacttgcttgtgcttttcagtctgtccttgaggaaatacactgctacgagcctcagctcaacaggctgaaagagaaagctcagcagctgtgggaaggacaagctgccagcaagagctttaggcacagagtgtcgcagctgtcttctcagtatctagcgctaagcaatttaacaaaggtaacgcctggcacgtgctgtgtgtgagtgtgatactgatgtcgcaaaattggagttgcagcaggttctgcagggtgtgcattgcatcctgacccgcccacagtgtgggtctccaggtcagcagtaaggggcgtgtgtgctgtttccttagccttgcaatctgagttcatcattgttgttgcataagcttgatgtggctctctgaaaaggccgaaggaggtttcaaagattgaggagactttcagtcttcattattgcacaagatattccttttaatactgaaatgatatgtttcccagggctttgatttggaagactcaaatcataaacatgattttttttgttctaaataatcccagagtttttgttctaaataatcccagattaaattactttagaaaaaacatggattctaaacagtttaaattttattagattaaatataatgatatttttaaaaaattcatctgaatctttgcattcattatatagtagtcaaggatgtgttgattgagagtttcagttcagattctagagcagagctcaaaattggcaatggttcagacaactgattaaacctcttttcaaatagcttagaagaaaataaatggaatcctactacaatctcatttagaacattcagccattttgacgtagatggtaacgtagacccattttgaactgtgtgttgcagacctatcttgagctttatgtggcttataacctttgtttcctatgtttttaactttcaggtgttagaatatagggacactggtataatttagtctttaatttggcctcatctgttctgtaagtgtgcatttacagagggtctgctcatttgggtcttcaatacacatcactgaagcagtcacactagcttaggtctgggagtaaatagtctatgtttacacccatttttattctatgattgttattttggatgtttttataaaatctggcacatacctaagttaagataaggaatgaatcatcttagaatgaatgaagaacatctttccattcctttgtatttacttagataccaaaagtaatcgatatatgaatattttgagagctgtagattattcttgcaaagtcttcactgtgttagatataacctataattgataaacaaaaccatgtgtatggtcccatgttttaaaatttagagatattacaaaaatctcagattattttttttttagaactctggctacaatgtaggtcatgtgggttgttgtgtcaggtgagcctaatgtgatatgtgaaaactagaaactactttgaccagtctcccagacaaggcattagggagaaattttactgatttaaaataatcatgatagtcataaagaattggagaggcataaaattgtaacttttttttttgcttttgacccagttattctaatagttttatgatttagaaagatctttaacatatctcatagatttaggccagacttgcctcgtatctgtgcagcgtatgaagccatgactgattgcctttgtttcaaacaaactgttagctttgcagtttgtctctgtgggatggacagctcgaaaaccatttctgtcatttccaggagaaagtgtcaagactggatagaatcgttgcagaacacaatcagttctctcttgggattaaagaattacaagactggatgacggatgcgattcacatgctggattcatactgccacccgacatccgacaaaagtgtgctggacagcaggacgctcaagctcgaggctctattatcagtcaaacaggaaaaagagattcagatgaaaatgatagtgaccaggggagaatctgtccttcagaatacttctccagaaggcattcccactattcagcagcagctgcagagtgtgaaggatatgtgggcatcccttttgtctgcagggattcgttgtaaaagccaactcgaaggagctctctccaagtggacaagttatcaggatggcgttcgacagttctccggttggatggatagtatggaagccaacctgaatgaatcagaaaggcagcatgcggagctgcgggataaaacaacgatgctcggaaaagccaagttattaaatgaagaagtgctgagttacagcagcttgctggagaccatcgaagtcaaaggggctggcatgacagaacactatgtcacccagctagaactccaggatctacaggaacgatacagagccatccaagagagggccaaggaagccgtaaccaagtctgaaaaacttgtccgcctgcaccaagagtatcagagagacctaaaggcatttgaagtttggttggggcaagaacaagaaaagctcgaccagtattcagttcttgaaggtgatgcccacactcatgagacaacattgcgtgatcttcaggagctacaggtacactgtgcagaggggcaggccctgttgaactcagtgctgcacaccagagaggatgtgatcccatcaggtatcccacaggcagaggaccgggctttagagtctctccggcaagactggcaggcttaccagcacaggctgtccgagactcgaactcagttcaataacgtggtgaacaaattgaggctaatggagcaaaagtttcagcaagtagatgaatggctcaaaacagcagaggagaaagttagtcccaggaccagacgtcagtctaacagggcaaccaaggagatacaattacatcagatgaagaagtggcacgaagaagtgactgcatacagagatgaagttgaggaagtgggagctagagctcaggagatactggacgagagccacgtgaacagcagaatgggttgccaggccacccagctgacttccagataccaggccctgcttctccaagtgctggaacaaataaaattcctggaggaggagattcagagtttggaggaatcagaatcatccctcagttcctattctgattggtatggctctactcataaaaacttcaagaatgtggctaccaagattgacaaagtagatacagtaatgatggggaagaaattgaagacgttggaggttttgctcaaagacatggagaaaggtcacagtttgctgaaatcagcccgggagaaaggagagagggctgttaaatacttggaggaaggcgaggcagagaggttaagaaaggagattcatgatcacatggagcagttgaaggaactgaccagcactgtccggaaagaacacatgacgctggaaaaaggtcttcatttagcaaaggaattctcagataaatgcaaagcactgacacagtggatagcagaataccaggaaattctacatgttcctgaagaacccaaaatggaattatatgagaaaaaagctcagttatctaaatacaagtcacttcaacaaacggtgctgtcccatgaaccatcagtaaagtcagtgagagagaagggtgaagctcttttggaactggtgcaggacgtcactttaaaggacaaaatagatcaacttcaaagtgattaccaggacctgtgcagcataggaaaggagcatgtcttcagtctggaggcgaaagtcaaagaccatgaagactacaacagtgagctccaagaggtcgaaaagtggctgctgcagatgtctggcagactggtggcacctgacctcctggagacaagcagcctggagacaatcacccagcaattggcccaccacaaggcaatgatggaagaaattgctggttttgaagaccgtttgaacaatcttcaaatgaaaggtgatactttgattggccaatgtgcagaccacctgcaagcgaaacttaaacaaaacgtgcatgctcatctgcagggcacaaaggacagctactcagcgatctgcagcacagctcagaggatgtaccagagtttggaacacgaacttcagaagcacgtcagccgacaagacaccctgcagcagtgccaggcctggctttctgcagtccagccggatttagagccaagtcctcaaccacctcttagtagggcagaagccattaagcaggtcaaacacttcagagctttgcaagagcaggcaaggacctacctagatctcctttgctccatgtgtgacctgtcaaatgcttcggtgaaaaccacagcaaaagacattcaacaaacagagcaaacgattgaacaaaagcttgtccaggcccagaacttaactcagggctgggaagagatcaagcacctgaagtctgagctctggatttacctgcaagatgctgatcagcaactgcagaacatgaagaggaggcactctgagctggagctgaacattgcacagaacatggtttcacaagttaaggtgggaattaatttgcccccaagggagataaaagaggccaacagagtagaaaacctgaaatgtgttcagtgtattcacttcaatatgcctgagtgtctgtcaatccttagacattaatacaactctttaaggcagaggtccccaagccccaggttatggacaagcacaagtccatgtcctgttaggaacctggccgcacagtgggaggcgagcaagcattaatgcctgaactccacctcctgtcagatcagaggccacatcagattctcataggagtgcaaaccctactgtgaactgcgcatgcaagggatctaggttgcatgctccttatgataatctaactaatatctgatgatttgaggtggaacagcttcatcctgaaaccatccccctccagccccattcacggaaaaattgttttccacaaaacccatcccaggtgccaaaaagtttggggaccgctgctttaaggaatagcaaatctgaacaaacatcatttggtgccagggaaaacagattataaagtagacattcaaatatattactgaagcttcagatggccactttcatcagaagacattcatactctacattattcctgagaaaagcaggtgtgatttagtctacagagtagactgcttagtcagaaaactctgtgactaagcaaacatggaacattattctttttttagattttcatcaccatattatgctaaaactgtaggactgtaagcttatcaattcattagttatatatttgagctatatgtaattaatttaaagtataatataaatgcagtttgtattacatatttatatataatttaaataatttaaaatatataggaaattgtggccgggtgtggtggctcatgcctgtaatcccagcactttgggaagctgaggtgggcagatcacttgaggccaggagtttgagaccaggctggccaacatggtgagaccacatctctattaaaaatacaaaaattagccttgcgtggcacatgcctataatctcagctacttgggaggctgaggcacgagaatcatttgaacttgggaggcggaggttgcagtgagccatgatcatgccactgcactccagcctgggccacagagtgagactctgtctcaaaaaaaagggaaaaaagaaaattataagtgtattaacttaattggaagttgggtcagattttaaataaacttaaagatgttttttctctgtgattatgagtcaataataatatattgtctactggagtgctgtttgcaagtacagagaaaaaagagaatagggatcgggataataagatttattttttctcagaagcatgaactcttttttaaaaaaatttgtgaaccatcctagaaatttaattttttaaaatgtattttataagaaaagttttgtttattataaaaggcttagaaaatacagaaatgtcttaataagcaaatttaaatcacaatcacttatgatactaccattcagagataataaacaatgccaatattttgctgtatttgttttagatatacacataataaaaacattcaagatg

SEQ ID NO: 2042 - protein, 919 aa, Homosapiens
MTDAIHMLDSYCHPTSDKSVLDSRTLKLEALLSVKQEKEIQMKMIVTRGESVLQNTSPEGIPTIQQQLQSVKDMWASLLSAGIRCKSQLEGALSKWTSYQDGVRQFSGWMDSMEANLNESERQHAELRDKTTMLGKAKLLNEEVLSYSSLLETIEVKGAGMTEHYVTQLELQDLQERYRAIQERAKEAVTKSEKLVRLHQEYQRDLKAFEVWLGQEQEKLDQYSVLEGDAHTHETTLRDLQELQVHCAEGQALLNSVLHTREDVIPSGIPQAEDRALESLRQDWQAYQHRLSETRTQFNNVVNKLRLMEQKFQQVDEWLKTAEEKVSPRTRRQSNRATKEIQLHQMKKWHEEVTAYRDEVEEVGARAQEILDESHVNSRMGCQATQLTSRYQALLLQVLEQIKFLEEEIQSLEESESSLSSYSDWYGSTHKNFKNVATKIDKVDTVMMGKKLKTLEVLLKDMEKGHSLLKSAREKGERAVKYLEEGEAERLRKEIHDHMEQLKELTSTVRKEHMTLEKGLHLAKEFSDKCKALTQWIAEYQEILHVPEEPKMELYEKKAQLSKYKSLQQTVLSHEPSVKSVREKGEALLELVQDVTLKDKIDQLQSDYQDLCSIGKEHVFSLEAKVKDHEDYNSELQEVEKWLLQMSGRLVAPDLLETSSLETITQQLAHHKAMMEEIAGFEDRLNNLQMKGDTLIGQCADHLQAKLKQNVHAHLQGTKDSYSAICSTAQRMYQSLEHELQKHVSRQDTLQQCQAWLSAVQPDLEPSPQPPLSRAEAIKQVKHFRALQEQARTYLDLLCSMCDLSNASVKTTAKDIQQTEQTIEQKLVQAQNLTQGWEEIKHLKSELWIYLQDADQQLQNMKRRHSELELNIAQNMVSQVKVGINLPPREIKEANRVENLKCVQCIHFNMPECLSILRH

SEQ ID NO: 2043 - DNA, 1547 bp, Homosapiens
aggagctgatagattccagagagattggtgcaagccgtctcagcagagtggagtcgctggctcccgaagtgaaacagaacacaactgccagtgggtgtgagctcatgcacacggagatgcaggccctgcgtgccgactggaagcagtgggaagacagtgtattccaaacgcagagctgtttggagaacctggtcagccagatggccctttcggagcaggaattctcaggccaagtggctcaactggagcaggccctggaacagttcagtgcccttctgaaaacctgggctcagcagttaaccctcctggaaggcaagaacacggatgaggagatagtggaatgctggcacaaaggacaagagatactggatgctttgcaaaaagcagagcctagaacagaggatctcaagtctcagctgaatgaactttgtcgattttccagagacctgagtacctacagtggaaaagtttctggcttgattaaagagtataattgtctttgtttgcaagcatccaagggctgccagaataaagaacagattttacagcaaagatttcgaaaggccttcagggatttccagcagtggttggttaatgcaaaaatcactaccgccaagtgttttgatatacctcaaaatataagtgaagtttcaactagtcttcagaaaatacaggagtttttgtcagaaagtgaaaatggacagcacaagctaaacatgatgctgtctaaaggggaacttctgagtaccctgctgaccaaagagaaagcgaaagggatccaggccaaagttacagctgcaaaagaagattggaaaaattttcattcaaatctccaccaaaaagaatctgctctagagaatctaaagatccaaatgaaggactttgaagtaagtgctgagcctatccaggactggctgagtaaaactgagaagatggtccatgaaagcagcaatcgcctctatgatctgccagcaaagaggagggagcagcagaagctccagtctgtccttgaggaaatacactgctacgagcctcagctcaacaggctgaaagagaaagctcagcagctgtgggaaggacaagctgccagcaagagctttaggcacagagtgtcgcagctgtcttctcagtatctagcgctaagcaatttaacaaaggagaaagtgtcaagactggatagaatcgttgcagaacacaatcagttctctcttgggattaaagaattacaagactggatgacggatgcgattcacatgctggattcatactgccacccgacatccgacaaaagtgtgctggacagcaggacgctcaagctcgaggtgtgcatctttacacagaaatatctccaacctacagaatttgtttttctcaaaatttcccgtctccatccacctggggtgatgatgtcacattctctccatgataaatctcagatgctttgtgagtgcaacgctgtctgccttgggtgcacatgccagagaattcctgaatcatctgaccccggatgttttccaaaaaataaaataaaataaagcccgaatgtg

SEQ ID NO: 2044 - protein, 476 aa, Homosapiens
MHTEMQALRADWKQWEDSVFQTQSCLENLVSQMALSEQEFSGQVAQLEQALEQFSALLKTWAQQLTLLEGKNTDEEIVECWHKGQEILDALQKAEPRTEDLKSQLNELCRFSRDLSTYSGKVSGLIKEYNCLCLQASKGCQNKEQILQQRFRKAFRDFQQWLVNAKITTAKCFDIPQNISEVSTSLQKIQEFLSESENGQHKLNMMLSKGELLSTLLTKEKAKGIQAKVTAAKEDWKNFHSNLHQKESALENLKIQMKDFEVSAEPIQDWLSKTEKMVHESSNRLYDLPAKRREQQKLQSVLEEIHCYEPQLNRLKEKAQQLWEGQAASKSFRHRVSQLSSQYLALSNLTKEKVSRLDRIVAEHNQFSLGIKELQDWMTDAIHMLDSYCHPTSDKSVLDSRTLKLEVCIFTQKYLQPTEFVFLKISRLHPPGVMMSHSLHDKSQMLCECNAVCLGCTCQRIPESSDPGCFPKNKIK

SEQ ID NO: 2045 - DNA, 715 bp, Homosapiens
aaaaccacacagaggagagctaatcggggagataactatttgctgtgctgtaggagattaccaagagggttaactgctgagcccaggttttcagaagggcactgaactgttccagggcctgctccagttgagccacttggcctgagaattcctgctccgaaagggccatctggctgaccaggttctccaaacagctctgcgtttggaatacactgtcttcccactgcttccagtcggcacgcagggcctgcatctccgtgtgcatgagctcacacccactggcagttgtgttctgtttcacttcgggagccagcgactccactctgctgagacggcttgcaccaatctctctggaatctatcagctcctgtaatggaatatcaccatggtaactgaagagcctgtgagtcacttggactgcaagttttcaactgtgtacacagggggaccctgtcctgccaggaagttttaacaagtgtgccacaaggacccagaatcaattcatctgtccactcttaaattataatagcgggagttgtcatcacgagtgcctaaggcttatggcaaaaaaatcccgagaatcctcaatatcctgaaacagactaaacagagaccctgaaatcaggcattattcgcacacgtgaaaatgtttagtgactcaagtgtttgcctgtggtggattgctcctgtgaatgattaaacccatatttccctc

SEQ ID NO: 2046 - protein, 42 aa, Homosapiens
MSSHPLAVVFCFTSGASDSTLLRRLAPISLESISSCNGISPW

SEQ ID NO: 2047 - DNA, 381 bp, Homosapiens
tatcctcatatggtggtctcttcctttcttttcctctcctggttcatatttgggccagagtgacctctggcatttacctccaactaactttgaggtgcaggaccccacaagccatcatttatcctttggcaaatatagcagcagttagccagcctgtctgtcacttttaggattctttgggggatagagatcagactcccatgcctgccaaatgcaggggacaaatatcctgttcttcaggtggcactgccggaacccttctgccttgagtaacataaagaagaggaaagaagatcaaagaattatgaaacaaatgagatgcttgtaaacttcattagttatatgaaaccacaaaggggcatttaataaactattcctctc

SEQ ID NO: 2048 - protein, 38 aa, Homosapiens
MQGTNILFFRWHCRNPSALSNIKKRKEDQRIMKQMRCL

SEQ ID NO: 2049 - DNA, 702 bp, Homosapiens
ggcaaatacacctcaataaaatattggaatgaaattgaaaaaatagacaaatgcagattgaatttcttcccacaaccaaatgacgtgaatacaaaggggaaaacaacagcaaaggcatacagtgacaaggaggtggtctcatttccccagaccttgagtctgggctggcattgagatctacattgatcaataatatgacagaagtgattttaagtgacatctgaggctgggccttaagaggacttgagattccactttggctatattggaattcaactctgctctgagacctctacacaaggaaactggtctaagatcctcgtgaataagaagtcacttggaggatagattctaaacctcaagaataagaaataaaagtacaaattggtgtgatgaaggtatattcctatttttggggattgggaggctttacttatttttaaaaactctattgaggtaaagagttaagctgtaacatacttcattgatttcctcacccttttcggctctgttttactatatcccctaatttgttggttgtgctaatatttgtagaaagaggtcttgtatttgctgcatcataatgacatttgtacttttttgactggtttaagtacaaatgaatgaaataaccatttttcctttagttgactttaccctgatttcacctagtgtttcaatgagtaaaaatacagctaaaag

SEQ ID NO: 2050 - protein, 57 aa, Homosapiens
GKYTSIKYWNEIEKIDKCRLNFFPQPNDVNTKGKTTAKAYSDKEVVSFPQTLSLGWH

SEQ ID NO: 2051 - DNA, 1419 bp, Homosapiens
ttttcggacttagcccgcctgcacccaggtgaaataaacagccttgttgctcacacaaagcctgtttgatggtctcttcacatggacgcaagtgaaacaatcctttgctgatgaattccatttagagaagtatgggagtctcactctgtgccaggctggagtgcggtggtgcgatctcggcttactgcaacctccacctcccgcgttcaagtgattctcctgcctcagcctctcaagcagctgggactacaggcgcccactaccacgcccagctaatttttgtatttttagtagaaacggggtttcaccatgttggccaggatggtctcgatctcttgacctcgtgatccacctgccgcggcctcccaaagtgctgagattacaggcgtgagccactgcgcctggccaagaagataatagtatttcttactattatttattactatgtaatggcattggtaggagatccagactggatggcacctccaattatcaggaaccggagcccccttcttttggttctaccattctcaacttgttgctatcatttcatggtcctagatggctgcccagcaacttccacatcatatgcattccagcaagaagaaatgaaaaatgcagggagaggggttatttatcctaacgttaagtcaggaccaggaagtggcccttggcacttccgtttatgtctgattggccagcacttaattgcctgctgcgcctggttctgtgggatactggaacgttaggctttagctgggaggctatgcaagagttaaaattccattttccgggatacgaagagaatgctttttggaggtacaatgagcaattgaacctcatgaactaataatgcatcacattttctttttaaagataataactcaaggtacacattaaaatttatttgtaaaaggtgttaaagtaaaaatcccccttaacattccactccatatccattttcctccacagacttaatcactgttaacattttgatgctttcttctttgtattttcatgtaataacatatcatatttactacgcacctattcaactgccttttttaaccaaataaaaatgttattacatagtctggtttttcatttaactatatgtcttagagattgtcctattttgttttgtatggttttatctaaatctactaagctgatgcatagaatttgacagtgtagtcataccatatatgatttaactggtccccattaatagacatttaggctgtttctaatttgtttgcaattcaaaaatttatttcacaaagatactgaattttatgaccagagcctgtgttatagtaaactgtgggtatatttctatggaatagatctattgagagcagtttatgcatcaaagtatatattcatttaaacattcttgcatatttactttttcatgag

SEQ ID NO: 2052 - protein, 71 aa, Homosapiens
MGVSLCARLECGGAISAYCNLHLPRSSDSPASASQAAGTTGAHYHAQLIFVFLVETGFHHVGQDGLDLLTS

SEQ ID NO: 2053 - DNA, 2531 bp, Homosapiens
tccttttatgcgaacacaagtatatgaggggttgtgtaaaaattatttttctcttgctgtactacaaagagatagaatcaaactgctttttttcgacatactggtttttctttctgtttttcttctctttcttctatttcttgtggatattatggctaataacacaacaagtttagggagtccatggccagaaaacttttgggaggaccttatcatgtccttcactgtatccatggcaatcgggctggtacttggaggatttatttgggctgtgttcatttgtctgtctcgaagaagaagagccagtgctcccatctcacagtggagttcaagcaggagatctaggtcttcttacacccacggcctcaacagaactggattttaccgccacagtggctgtgaacgtcgaagcaacctcagcctggccagtctcaccttccagcgacaagcttccctggaacaagcaaattcctttccaagaaaatcaagtttcagagcttctactttccatccctttctgcaatgtccaccacttcctgtggaaactgagagtcagctggtgactctcccttcttccaatatctctcccaccatcagcacttcccacagtctgagccgtcctgactactggtccagtaacagtcttcgagtgggcctttcaacaccgcccccacctgcctatgagtccatcatcaaggcattcccagattcctgaggtcttgatccgtcgcccaggcgggagttgcagtagcatgatcaggactcactgcagcctctatctcccaggctcaagtaatcctcccatcttagtgccccaagtagctgggactacaggggtgcactaccacaccgggttgaatttttttttaattttagtagagatgaagtgtcactatgttaccaaggctggtctcaaactcctaaactcagatgatcctcctgcctcggcctcccaaagtgctggaattagcctggccaatcttggatttttaatggaatatgtgggcacaaaatgacagaacataggacattctaaagttccttgatttgatcattataagaagtgtgggactcaagcacaggaaactgaactcttttggtgtcattggatgtttcatttttgacactaattttttctggacaaactctttatgtgtttttcccaagaatagttatctacttcctggaggcaaaatccttggatttactaacatgatgatttaccttttcttcaccgttgtcgttacattgttagaaaagcaacaggaaaaaatccaattcatttgacctaaaaacaagcctcaagtttaaaaccaagctcacgtttttcttaagggaaaaattttctttcttaaacttacatctagcaacttggaaagcactttctctggggatcttcttttgtaactttgcagacaaataagtatgagtcactggggagagagtttgttattgaaatagatgttgcccatgaagaattctccttcctggattgactcttaatcatcaggcatcattcctggtttgcttctctacgaatctcaattccaacttctctgcagagtctgtacagtgattaagccatgccagatggtctttggtgcacacagttatttaagaatccacttccacaggtggctgcccttgtaaggaagaatgcatccctaaatgtggccaccagagagttccagtgggcagatgtctgtggctgcccttctcatttaaggacatgagttcactggagtattactcaaaaagtctgtggttcatttccagtattgtgaatatttagtttatgtggccgtttctttgtttctttgaacagtgggattttcagtgaaaaagtaccctctttttcatttcctattgcagtggtcacagctaatagtgtctgaacatggttcaagaataagagattccatgtagcattttctttattattttcatttcccttatattatccatcattccttaaggacaattattcttaataatgcttatagaaaatgttctctaattaaacatgccaaaaggaaaaagtaagagaaagagggagcaagaagaaaatggaagaaaaagggaaaaaagctaaccggataaccaatttgttataagttggttttcaacaaagaaatttagcagccaagtaaggtttcaagggaatattaacttggtatcagggctacttttttttttttttttttacttgcatgtcatccttaatgtctaacatgaaaaatcagcaaagagtatggtttttatcaagaatttgtgttgggagtaaaaactgctttatagctcccaaattaggaagagaagagcagaaatcctctggggcatttaaccatctggcagaattgttgctgcacccttatcccagttataagacagtcaaaatgactatttcctaaatattgtgagtgtatgaaatgtgaaattaaagcaaaaactggagacttttaatgtatttctttaatttgaaatgttttgtggattgtgaaataaaaataaatttatgtcaagttttattc

SEQ ID NO: 2054 - protein, 235 aa, Homosapiens
MRTQVYEGLCKNYFSLAVLQRDRIKLLFFDILVFLSVFLLFLLFLVDIMANNTTSLGSPWPENFWEDLIMSFTVSMAIGLVLGGFIWAVFICLSRRRRASAPISQWSSSRRSRSSYTHGLNRTGFYRHSGCERRSNLSLASLTFQRQASLEQANSFPRKSSFRASTFHPFLQCPPLPVETESQLVTLPSSNISPTISTSHSLSRPDYWSSNSLRVGLSTPPPPAYESIIKAFPDS

SEQ ID NO: 2055 - DNA, 2671 bp, Homosapiens
tccttttatgcgaacacaagtatatgaggggttgtgtaaaaattatttttctcttgctgtactacaaagagatagaatcaaactgctttttttcgacatactggtttttctttctgtttttcttctctttcttctatttcttgtggatattatggctaataacacaacaagtttagggagtccatggccagaaaacttttgggaggaccttatcatgtccttcactgtatccatggcaatcgggctggtacttggaggatttatttgggctgtgttcatttgtctgtctcgaagaagaagagccagtgctcccatctcacagtggagttcaagcaggagatctaggtcttcttacacccacggcctcaacagaactggattttaccgccacagtggctgtgaacgtcgaagcaacctcagcctggccagtctcaccttccagcgacaagcttccctggaacaagcaaattcctttccaagaaaatcaagtttcagagcttctactttccatccctttctgcaatgtccaccacttcctgtggaaactgagagtcagctggtgactctcccttcttccaatatctctcccaccatcagcacttcccacagtctgagccgtcctgactactggtccagtaacagtcttcgagtgggcctttcaacaccgcccccacctgcctatgagtccatcatcaaggcattcccagattcctgaggtcttgatccgtcgcccaggcgggagttgcagtagcatgatcaggactcactgcagcctctatctcccaggctcaagtaatcctcccatcttagtgccccaagtagctgggactacaggggtgcactaccacaccgggttgaatttttttttaattttagtagagatgaagtgtcactatgttaccaaggctggtctcaaactcctaaactcagatgatcctcctgcctcggcctcccaaagtgctggaattagcctggccaatcttggatttttaatggaatatgtgggcacaaaatgacagaacataggacattctaaagttccttgatttgatcattataagaagtgtgggactcaagcacaggaaactgaactcttttggtgtcattggatgtttcatttttgacactaattttttctggacaaactctttatgtgtttttcccaagaatagttatctacttcctggaggcaaaatccttggatttactaacatgatgatttaccttttcttcaccgttgtcgttacattgttagaaaagcaacaggaaaaaatccaattcatttgacctaaaaacaagcctcaagtttaaaaccaagctcacgtttttcttaagggaaaaattttctttcttaaacttacatctagcaacttggaaagcactttctctggggatcttcttttgtaactttgcagacaaataagtatgagtcactggggagagagtttgttattgaaatagatgttgcccatgaagaattctccttcctggattgactcttaatcatcaggcatcattcctggtttgcttctctacgaatctcaattccaacttctctgcagagtctgtacagtgattaagccatgccagatggtctttggtgcacacagttatttaagaatccacttccacaggtggctgcccttgtaaggaagaatgcatccctaaatgtggccaccagagagttccagtgggcagatgtctgtggctgcccttctcatttaaggacatgagttcactggagtattactcaaaaagtctgtggttcatttccagtattgtgaatatttagtttatgtggccgtttctttgtttctttgaacagtgggattttcagtgaaaaagtaccctctttttcatttcctattgcagtggtcacagctaatagtgtctgaacatggttcaagaataagagattccatgtagcattttctttattattttcatttcccttatattatccatcattccttaaggacaattattcttaataatgcttatagaaaatgttctctaattaaacatgccaaaaggaaaaagtaagagaaagagggagcaagaagaaaatggaagaaaaagggaaaaaagctaaccggataaccaatttgttataagttggttttcaacaaagaaatttagcagccaagtaaggtttcaagggaatattaacttggtatcagggctacttttttttttttttttttacttgcatgtcatccttaatgtctaacatgaaaaatcagcaaagagtatggtttttatcaagaatttgtgttgggagtaaaaactgctttatagctcccaaattaggaagagaagagcagaaatcctctggggcatttaaccatctggcagaattgttgctgcacccttatcccagttataagacagtcaaaatgactatttcctaaatattgtgagtgtatgaaatgtgaaattaaagcaaaaactggagacttttaatgtatttctttaatttgaaatgttttgtggattgtgaaataaaaataaatttatgtcaagttttattcaaaattcatttatgaaataatgccaacactgttctaaaaagcaaggagtcaagaaattataaaattcagattaaatcaggaaaacacattagatggaaaattatactatagaatttgagcttattaaaatttattgcata

SEQ ID NO: 2056 - protein, 235 aa, Homosapiens; identical to SEQ ID NO: 2054

SEQ ID NO: 2057 - DNA, 3035 bp, Homosapiens
ttatgcgaacacaagtatatgaggggttgtgtaaaaattatttttctcttgctgtactacaaagagatagaatcaaactgctttttttcgacatactggtttttctttctgtttttcttctctttcttctatttcttgtggatattatggctaataacacaacaagtttagggagtccatggccagaaaacttttgggaggaccttatcatgtccttcactgtatccatggcaatcgggctggtacttggaggatttatttgggctgtgttcatttgtctgtctcgaagaagaagagccagtgctcccatctcacagtggagttcaagcaggagatctaggtcttcttacacccacggcctcaacagaactggattttaccgccacagtggctgtgaacgtcgaagcaacctcagcctggccagtctcaccttccagcgacaagcttccctggaacaagcaaattcctttccaagaaaatcaagtttcagagcttctactttccatccctttctgcaatgtccaccacttcctgtggaaactgagagtcagctggtgactctcccttcttccaatatctctcccaccatcagcacttcccacagtctgagccgtcctgactactggtccagtaacagtcttcgagtgggcctttcaacaccgcccccacctgcctatgagtccatcatcaaggcattcccagattcctgagtagggtggcttttggtttttgtttctttcttgtcttgtcttttattgaaaggaaatcaaaaataggctaaacagaattttgagggcatggcccaaataactcatgagttccaagttgaaacatggttgtgcaagttggacattacaatgtaaaacacattttcttcaaacacgttttcccttttgtttcaaaaaatgtaatattttcccccaagcgttttatatttatgtattttgtattcaatgtgaggcttattaaaaatagtgattctaatgtaagaatcagctaagatgcattatatatattttaattaaaattaaaacttcagatatttgtggattacaatcctcatttacttccaatgtgactaaaaagagaaaaaaaatcactgtgtcactttaaagaaaaatcttctaagggatttggattttactttctttagaatgacaagtgaatcatattgacattttacaatcttagatttttctttttttttcttttgagacagggtcttgatccgtcgcccaggcgggagttgcagtagcatgatcaggactcactgcagcctctatctcccaggctcaagtaatcctcccatcttagtgccccaagtagctgggactacaggggtgcactaccacaccgggttgaatttttttttaattttagtagagatgaagtgtcactatgttaccaaggctggtctcaaactcctaaactcagatgatcctcctgcctcggcctcccaaagtgctggaattagcctggccaatcttggatttttaatggaatatgtgggcacaaaatgacagaacataggacattctaaagttccttgatttgatcattataagaagtgtgggactcaagcacaggaaactgaactcttttggtgtcattggatgtttcatttttgacactaattttttctggacaaactctttatgtgtttttcccaagaatagttatctacttcctggaggcaaaatccttggatttactaacatgatgatttaccttttcttcaccgttgtcgttacattgttagaaaagcaacaggaaaaaatccaattcatttgacctaaaaacaagcctcaagtttaaaaccaagctcacgtttttcttaagggaaaaattttctttcttaaacttacatctagcaacttggaaagcactttctctggggatcttcttttgtaactttgcagacaaataagtatgagtcactggggagagagtttgttattgaaatagatgttgcccatgaagaattctccttcctggattgactcttaatcatcaggcatcattcctggtttgcttctctacgaatctcaattccaacttctctgcagagtctgtacagtgattaagccatgccagatggtctttggtgcacacagttatttaagaatccacttccacaggtggctgcccttgtaaggaagaatgcatccctaaatgtggccaccagagagttccagtgggcagatgtctgtggctgcccttctcatttaaggacatgagttcactggagtattactcaaaaagtctgtggttcatttccagtattgtgaatatttagtttatgtggccgtttctttgtttctttgaacagtgggattttcagtgaaaaagtaccctctttttcatttcctattgcagtggtcacagctaatagtgtctgaacatggttcaagaataagagattccatgtagcattttctttattattttcatttcccttatattatccatcattccttaaggacaattattcttaataatgcttatagaaaatgttctctaattaaacatgccaaaaggaaaaagtaagagaaagagggagcaagaagaaaatggaagaaaaagggaaaaaagctaaccggataaccaatttgttataagttggttttcaacaaagaaatttagcagccaagtaaggtttcaagggaatattaacttggtatcagggctacttttttttttttttttttacttgcatgtcatccttaatgtctaacatgaaaaatcagcaaagagtatggtttttatcaagaatttgtgttgggagtaaaaactgctttatagctcccaaattaggaagagaagagcagaaatcctctggggcatttaaccatctggcagaattgttgctgcacccttatcccagttataagacagtcaaaatgactatttcctaaatattgtgagtgtatgaaatgtgaaattaaagcaaaaactggagacttttaatgtatttctttaatttgaaatgttttgtggattgtgaaataaaaataaatttatgtcaagttttattc

SEQ ID NO: 2058 - protein, 235 aa, Homosapiens; identical to SEQ ID NO: 2054

SEQ ID NO: 2059 - DNA, 2331 bp, Homosapiens
ctcttgctgtactacaaagagatagaatcaaactgctttttttcgacatactggtttttctttctgtttttcttctctttcttctatttcttgtggatattatggctaataacacaacaagtttagggagtccatggccagaaaacttttgggaggaccttatcatgtccttcactgtatccatggcaatcgggctggtacttggaggatttatttgggctgtgttcatttgtcttctcaccttccagcgacaagcttccctggaacaagcaaattcctttccaagaaaatcaagtttcagagcttctactttccatccctttctgcaatgtccaccacttcctgtggaaactgagagtcagctggtgactctcccttcttccaatatctctcccaccatcagcacttcccacagtctgagccgtcctgactactggtccagtaacagtcttcgagtgggcctttcaacaccgcccccacctgcctatgagtccatcatcaaggcattcccagattcctgagtagggtggcttttggtttttgtttctttcttgtcttgtcttttattgaaaggaaatcaaaaataggctaaacagaattttgagggcatggcccaaataactcatgagttccaagttgaaacatggttgtgcaagttggacattacaatttttagtagagatgaagtgtcactatgttaccaaggctggtctcaaactcctaaactcagatgatcctcctgcctcggcctcccaaagtgctggaattagcctggccaatcttggatttttaatggaatatgtgggcacaaaatgacagaacataggacattctaaagttccttgatttgatcattataagaagtgtgggactcaagcacaggaaactgaactcttttggtgtcattggatgtttcatttttgacactaattttttctggacaaactctttatgtgtttttcccaagaatagttatctacttcctggaggcaaaatccttggatttactaacatgatgatttaccttttcttcaccgttgtcgttacattgttagaaaagcaacaggaaaaaatccaattcatttgacctaaaaacaagcctcaagtttaaaaccaagctcacgtttttcttaagggaaaaattttctttcttaaacttacatctagcaacttggaaagcactttctctggggatcttcttttgtaactttgcagacaaataagtatgagtcactggggagagagtttgttattgaaatagatgttgcccatgaagaattctccttcctggattgactcttaatcatcaggcatcattcctggtttgcttctctacgaatctcaattccaacttctctgcagagtctgtacagtgattaagccatgccagatggtctttggtgcacacagttatttaagaatccacttccacaggtggctgcccttgtaaggaagaatgcatccctaaatgtggccaccagagagttccagtgggcagatgtctgtggctgcccttctcatttaaggacatgagttcactggagtattactcaaaaagtctgtggttcatttccagtattgtgaatatttagtttatgtggccgtttctttgtttctttgaacagtgggattttcagtgaaaaagtaccctctttttcatttcctattgcagtggtcacagctaatagtgtctgaacatggttcaagaataagagattccatgtagcattttctttattattttcatttcccttatattatccatcattccttaaggacaattattcttaataatgcttatagaaaatgttctctaattaaacatgccaaaaggaaaaagtaagagaaagagggagcaagaagaaaatggaagaaaaagggaaaaaagctaaccggataaccaatttgttataagttggttttcaacaaagaaatttagcagccaagtaaggtttcaagggaatattaacttggtatcagggctacttttttttttttttttttacttgcatgtcatccttaatgtctaacatgaaaaatcagcaaagagtatggtttttatcaagaatttgtgttgggagtaaaaactgctttatagctcccaaattaggaagagaagagcagaaatcctctggggcatttaaccatctggcagaattgttgctgcacccttatcccagttataagacagtcaaaatgactatttcctaaatattgtgagtgtatgaaatgtgaaattaaagcaaaaactggagacttttaatgtatttctttaatttgaaatgttttgtggattgtgaaataaaaataaatttatgtcaagttttattc

SEQ ID NO: 2060 - protein, 139 aa, Homosapiens
MANNTTSLGSPWPENFWEDLIMSFTVSMAIGLVLGGFIWAVFICLLTFQRQASLEQANSFPRKSSFRASTFHPFLQCPPLPVETESQLVTLPSSNISPTISTSHSLSRPDYWSSNSLRVGLSTPPPPAYESIIKAFPDS

SEQ ID NO: 2061 - DNA, 2471 bp, Homosapiens
ctcttgctgtactacaaagagatagaatcaaactgctttttttcgacatactggtttttctttctgtttttcttctctttcttctatttcttgtggatattatggctaataacacaacaagtttagggagtccatggccagaaaacttttgggaggaccttatcatgtccttcactgtatccatggcaatcgggctggtacttggaggatttatttgggctgtgttcatttgtcttctcaccttccagcgacaagcttccctggaacaagcaaattcctttccaagaaaatcaagtttcagagcttctactttccatccctttctgcaatgtccaccacttcctgtggaaactgagagtcagctggtgactctcccttcttccaatatctctcccaccatcagcacttcccacagtctgagccgtcctgactactggtccagtaacagtcttcgagtgggcctttcaacaccgcccccacctgcctatgagtccatcatcaaggcattcccagattcctgagtagggtggcttttggtttttgtttctttcttgtcttgtcttttattgaaaggaaatcaaaaataggctaaacagaattttgagggcatggcccaaataactcatgagttccaagttgaaacatggttgtgcaagttggacattacaatttttagtagagatgaagtgtcactatgttaccaaggctggtctcaaactcctaaactcagatgatcctcctgcctcggcctcccaaagtgctggaattagcctggccaatcttggatttttaatggaatatgtgggcacaaaatgacagaacataggacattctaaagttccttgatttgatcattataagaagtgtgggactcaagcacaggaaactgaactcttttggtgtcattggatgtttcatttttgacactaattttttctggacaaactctttatgtgtttttcccaagaatagttatctacttcctggaggcaaaatccttggatttactaacatgatgatttaccttttcttcaccgttgtcgttacattgttagaaaagcaacaggaaaaaatccaattcatttgacctaaaaacaagcctcaagtttaaaaccaagctcacgtttttcttaagggaaaaattttctttcttaaacttacatctagcaacttggaaagcactttctctggggatcttcttttgtaactttgcagacaaataagtatgagtcactggggagagagtttgttattgaaatagatgttgcccatgaagaattctccttcctggattgactcttaatcatcaggcatcattcctggtttgcttctctacgaatctcaattccaacttctctgcagagtctgtacagtgattaagccatgccagatggtctttggtgcacacagttatttaagaatccacttccacaggtggctgcccttgtaaggaagaatgcatccctaaatgtggccaccagagagttccagtgggcagatgtctgtggctgcccttctcatttaaggacatgagttcactggagtattactcaaaaagtctgtggttcatttccagtattgtgaatatttagtttatgtggccgtttctttgtttctttgaacagtgggattttcagtgaaaaagtaccctctttttcatttcctattgcagtggtcacagctaatagtgtctgaacatggttcaagaataagagattccatgtagcattttctttattattttcatttcccttatattatccatcattccttaaggacaattattcttaataatgcttatagaaaatgttctctaattaaacatgccaaaaggaaaaagtaagagaaagagggagcaagaagaaaatggaagaaaaagggaaaaaagctaaccggataaccaatttgttataagttggttttcaacaaagaaatttagcagccaagtaaggtttcaagggaatattaacttggtatcagggctacttttttttttttttttttacttgcatgtcatccttaatgtctaacatgaaaaatcagcaaagagtatggtttttatcaagaatttgtgttgggagtaaaaactgctttatagctcccaaattaggaagagaagagcagaaatcctctggggcatttaaccatctggcagaattgttgctgcacccttatcccagttataagacagtcaaaatgactatttcctaaatattgtgagtgtatgaaatgtgaaattaaagcaaaaactggagacttttaatgtatttctttaatttgaaatgttttgtggattgtgaaataaaaataaatttatgtcaagttttattcaaaattcatttatgaaataatgccaacactgttctaaaaagcaaggagtcaagaaattataaaattcagattaaatcaggaaaacacattagatggaaaattatactatagaatttgagcttattaaaatttattgcata

SEQ ID NO: 2062 - protein, 139 aa, Homosapiens; identical to SEQ ID NO: 2060

SEQ ID NO: 2063 - DNA, 1234 bp, Homosapiens
cccacgtatgtgtgattcaggagtcaaccaaagatatgtgaaatgtttataaataaaatttggggattctcctctctggctttctcttctccaggatttccctctcacattctcagcagctcttgtttccacaatctctgtcctttgtttctcaagatcagaaacagtgcaggttttcgactgtagctttacctgtcccagactggaagcttccctcaggttaaaaggtttgaaaactggagcttgactagtacttgctgttcttttcttccaggtctcaactcctctccagtagctacaagcatttggtcattcttaaggcctttagaggaccttatcatgtccttcactgtatccatggcaatcgggctggtacttggaggatttatttgggctgtgttcatttgtctgtctcgaagaagaagagccagtgctcccatctcacagtggagttcaagcaggagatctaggtcttcttacacccacggcctcaacagaactggattttaccgccacagtggctgtgaacgtcgaagcaacctcagcctggccagtctcaccttccagcgacaagcttccctggaacaagcaaattcctttccaagaaaatcaagtttcagagcttctactttccatccctttctgcaatgtccaccacttcctgtggaaactgagagtcagctggtgactctcccttcttccaatatctctcccaccatcagcacttcccacagtctgagccgtcctgactactggtccagtaacagtcttcgagtgggcctttcaacaccgcccccacctgcctatgagtccatcatcaaggcattcccagattcctgagtagggtggcttttggtttttgtttctttcttgtcttgtcttttattgaaaggaaatcaaaaataggctaaacagaattttgagggcatggcccaaataactcatgagttccaagttgaaacatggttgtgcaagttggacattacaatgtaaaacacattttcttcaaacacgttttcccttttgtttcaaaaaatgtaatattttcccccaagcgttttatatttatgtattttgtattcaatgtgaggcttattaaaaatagtgattctaatgtaagaatcagctaagatgcattatatatattttaattaaaattaaaacttcagatatttgtggattacaatcctcatttacttccaatgtgactaaaaagagaaaaaaaatcactgtg

SEQ ID NO: 2064 - protein, 166 aa, Homosapiens [sequence omitted]

SEQ ID NO: 2065 - DNA, 1583 bp, Homosapiens
agggtagagtgagaagcaccagcaggcagtaacagccaacccttagccattgctaagggcagagaactggtggagcctttctcttactcccaggacttcagcacctaagacagctccaaaacaaaccagaacagtcagctccgggggagcacgactgggcgagaggcacagaaatggacaccagaaataaggcccagctccttgtgctcctgactcttctcagtgtgctcttctcacagacttcggcatggcctctttacagggcaccttctgctctcaggttgggtgacagaataccctttgagggagcaaatgaacctgatcaagtttcattaaaagaagacattgacatgttgcaaaatgcattagctgaaaatgacacaccctattatgatgtatccagaaatgccaggcatgctgatggagttttcaccagtgacttcagtaaactcttgggtcaactttctgccaaaaagtaccttgagtctcttatgggaaaacgtgttagcagtaacatctcagaagaccctgtaccagtcaaacgtcactcagatgcagtcttcactgacaactatacccgccttagaaaacaaatggctgtaaagaaatatttgaactcaattctgaatggaaagaggagcagtgagggagaatctcccgactttccagaagagttagaaaaatgatgaaaaagacctttggagcaaagctgatgacaacttcccagtgaattcttgaaggaaaatgatacgcaacataattaaattttgagttctacataagtaattcaagaaaacaacttcaatatccaaaccaaataaaaatattgtgttgtgaatgttgtgatgtattctagctaatgtaataactgtgaagtttacattgtaaatagtatttgagagttctaaattttgtctttaactcataaaaagcctgcaatttcatatgctgtatatcctttctaacaaaaaaatatatttaatgataagtaaatgctaggttaattccaattatatgagacgtttttggaagagtagtaatagagcaaaattgatgtgtttatttatagagtgtacttaactattcaggagagtagaacagataatcagtgtgtctaaatttgaatgttaagcagatggaatgctgtgttaaataaacctcaaaatgtctaagatagtaacaatgaagataaaaagacattcttccaaaaagattttcagaaaatattatgtgtttccatattttataggcaacctttatttttaatggtgttttaaaaaatctcaaatttggattgctaatcaccaaaggctctctcctgatagtctttcagttaaggagaacgacccctgcttctgacactgaaacttccctttctgcttgtgttaagtatgtgtaaaatgtgaagtgaatgaaacactcagttgttcaataataaatatttttgccataatgactcagaatattgctttggtcatatgagcttccttctgtgaaagtacatttggagacacaactatttttccaaaataattttaagaaatcaaagagagaaaataaagaccttgcttatgattgcagat

SEQ ID NO: 2066 - protein, 170 aa, Homosapiens; identical to SEQ ID NO: 216

SEQ ID NO: 2067 - DNA, 442 bp, Homosapiens
tgtcatataagcaaattatgtggcacagaagtttggtgtatggattatttcatcacccagaaacacataaaacagtggtcttctcctctgatgtgattttactaagtattccttcactcttcagtttagaaagagctgaattactcaaagaaataaacaacaaaacattctgtacttcatcaggtcagaaaagctgacttttgagaagataaaatttgaagtaagaagatatggaataatttttcattattcatttcaaactttcaaatgtaattgtctttcaagtttcttacacttaacctgaggcactttttctgcatttttgtaattgattatgagactcgctacttgtatcttcctttctgatttgtttattctaggatacttttacaagaaaaattaatcttcagtgtttaaaaataaaatatctcaacatttgcaa

SEQ ID NO: 2068 - protein, 59 aa, Homosapiens
MWHRSLVYGLFHHPETHKTVVFSSDVILLSIPSLFSLERAELLKEINNKTFCTSSGQKS

SEQ ID NO: 2069 - DNA, 239 bp, Homosapiens
cataaaacagtggtcttctcctctgatgtgattttactaagtattccttcactcttcagtttagaaagagctgaattactcaaagaaataaacaacaaaacattctgtacttcatcaggtccaggagctcaaatgttggaaaggagccagaattgttattgccccctgtgaatcaagcaggatgtacacagtcaaaagaagctgctcactagaagtttatctatattaaataacttata

SEQ ID NO: 2070 - protein, 45 aa, Homosapiens
ITQRNKQQNILYFIRSRSSNVGKEPELLLPPVNQAGCTQSKEAAH

SEQ ID NO: 2071 - DNA, 287 bp, Homosapiens
atcagcgactcatgatgctcatctctacagcccagaggacatttaaagaactaaataaagatatagaaggcggccccttctctcatcagtaagccttaccatctaagggacactctggacatcggaagattccaagtcgtctcttatggaggattcatctggcgactcagcaggttagtgaagaaaaagttagaagaatattaccctaaatcacggtcaggtgataagggtctgcattatgacagctggaactgaagtgaatgaaataaatgtgagcaccacaaagg

SEQ ID NO: 2072 - protein, 62 aa, Homosapiens
KAAPSLISKPYHLRDTLDIGRFQVVSYGGFIWRLSRLVKKKLEEYYPKSRSGDKGLHYDSWN

SEQ ID NO: 2073 - DNA, 411 bp, Homosapiens
atggcagaagaaactcgacaaagcaaattggccatagccaaggaaaagttaaaagaatattggcagagaaacagccttggtgttccagcaggagtgaagaggaacaggaaaacgagtggcagtagccctgaaacagccacttctggtggttgccactcacctgaggattcagcaacaggtatccacggggagggccctacatcatctgctaccctgaaggatctggagagcccatgccaagaactagcagtagtcctggacccgaggtccataaaaatcagtcaactgaataacaccatcaaatctttggtgatcatggctaacattttggtgtttgtctttccaaagtgtatagttatagatctgaatagaaatgtagatacagagatatcaaagatgagcatgggctaa

SEQ ID NO: 2074 - protein, 136 aa, Homosapiens
MAEETRQSKLAIAKEKLKEYWQRNSLGVPAGVKRNRKTSGSSPETATSGGCHSPEDSATGIHGEGPTSSATLKDLESPCQELAVVLDPRSIKISQLNNTIKSLVIMANILVFVFPKCIVIDLNRNVDTEISKMSMG

SEQ ID NO: 2075 - DNA, 1214 bp, Homosapiens
agaaggtacttgcttctctttctcctgccaaagcatgaccttataattgtaagtttccggaggcctccccagccatgcggaactttttcctaaaattcccttttccactggtgtgtggtgcaagatgaggcacattttccatggatggtgaacagagggaggagccttttgatcacaaccaggtcaccccacttctaagccactgtgcctccagccccacaagactaaggagagagagcgcagcgtggtggagagtgagctgtgctgggaccattgtttccgtaacctcgttttctgtgtccagctgacacaccttcaaagtggcatcaggtcctaaactgtagcttgcaatgtgcctgtttccagaaaccaaggtgaaagtgcttttagacagtgttcccatgcaagagtcccttcccagcttttttctggaaatgcatgtttctctgaactctgagtcccaagaaaaatcacttgagacaccaagaaaatgggggaagtgctaaaattgtgtgggaattcaagcttaacaataaacatcaagacatttttgataaaaatgaatccactgacatcggggaggagcaagagaacagcacgctgacactgggtcagaggctaagaccgacatttctgggaaccactcccggaagggcacagaggagacgctttcagcctctcatcagccagcctggcctgtagctgctgcacgttatgagtgtgttcctggcatgactgcttctaacaaagaaatgctgaggcagtgtcacgctggtgtctgtcctccttacagaatgcctgaacagttccattgactcaaagtgaagatcaaaagaaccaaatgacagcaatagccaagtgtaatcatcagtaaccctgtgttctatccacagttaaaagaatattggcagagaaacagccttggtgttccagcaggagtgaagaggaacaggaaaacgagtggcagtagccctgaaacagccacttctggtggttgccactcacctgaggatgtggggtcttgccatttgcccaggctggtgtcaaactcctcaagtaatccttctgcctcggcctcctaaagtgccaggattataggcctgagccactacacacagcccggagtttttaaaaaatactcaattaaaatgcttcatttaagtgtatgtctctaagaaaatttaataattgattaaatattgttgaatagactg

SEQ ID NO: 2076 - protein, 55 aa, Homosapiens
MDGEQREEPFDHNQVTPLLSHCASSPTRLRRESAAWWRVSCAGTIVSVTSFSVSS

SEQ ID NO: 2077 - DNA, 368 bp, Homosapiens
ttgaggcttcaggaggggagggtagagtctgcagcagggagccccaggagtcaccagcccaaagtcacccagggacaactggtgaaggaaacaggctcagaagtccaagagcttgaccaaagtaactcagctggtatgtagcagaaccagctctcatacaaagatgacctgaggacagagacagtagaggacagtgcagggtagtgcaagaagctgtggctctggggtctggtcaagatgcccctttcttctgttaggaagctttcccactcctctgcctgctttcgcatctcttccaaaatacaagtgattgcatgtgactcccttgttagagcaggctctcaataaataggctttgcttgatttca

SEQ ID NO: 2078 - protein, 36 aa, Homosapiens
MPLSSVRKLSHSSACFRISSKIQVIACDSLVRAGSQ

SEQ ID NO: 2079 - DNA, 1006 bp, Homosapiens
acatgaaacacataatttgacacacagtaggcaatcaatactcatttcctgaaaaaaatctcaaaggcaattacttcaggttttaatttctcagtgtaactaaacatctttttttcctccaagaattctcttttctcacttagattcaattgctaatccttttgccaaattaattaaatcctctccagattctccccagtcaaattccttagactattgagttggttttaggcggtgacatggtttgtctgtgtccccacccagatctcattgtgaattgtagctcctatacttcccttgtgtcatgggaggtaattgaatcatgggggcgggtctttcccgtgctgttctcgtgacagtgaatgagtgtcacaagatctgatggttttttaaaggggtgttcccctacacaaactctctcttccctgctgccatgcaagatgtgactttgcttctcattcgccttccaccatgattgtgaggcctcccaagccatgtggaactataaaggaaacctctttcctttataaactacccagtttcgggcatgcagagaagcctctgttctctctgccgcgctgtggcgtctcacctagacacctggcccctgaagcagagatctgtctgctgccaccacagctcctctctccagactgttcagatctggtccctgtaggatggaagtgcacacactgtctctgcctgtccccagggagcaagatgtaaacttcctccttcatcattcgggcaaaaactgaataaatagatgaacaccaaattatggaaatcttcattatgcaggccaggttgccaaacatgcccagacctgcttaagctgagaagtaaaggctgatcaagctcacatgtaaaatcctgggttataagaaaaattccagctgacttggaacacagccccaactcctcccacatgaccagcaaagagctggtccaggaaaaattccacttgtttggccgggtgtggtggctcacgcctgtaatcccagca

SEQ ID NO: 2080 - protein, 84 aa, Homosapiens
MIVRPPKPCGTIKETSFLYKLPSFGHAEKPLFSLPRCGVSPRHLAPEAEICLLPPQLLSPDCSDLVPVGWKCTHCLCLSPGSKM

SEQ ID NO: 2081 - DNA, 583 bp, Homosapiens
atcatttccctgagctcactttatccttttccttcttaaaggcgaccatttcattaagtttttaagtgcctggtaattgcttggttatgaccggtgtctgctccatggcagcctcttcctgaagaaatgctgaggcagtgtcacgctggtgtctgtcctccttacagaatgcctgaacagttccattgactcaaagtgaagatcaaaagaaccaaatgacagcaatagccaagtgtaatcatcagtaaccctgtgttctatccacaggtaaaaaacaatcatcctcttcattatgggtttcaattttaaatgtaatacatttttagaaatgcctatttccttttataatctctttatataatctaggttattctggctcttaggtcttcatttagctactgaaaagatttgatctcaaatcaatgatctaaccacccatgaccatctcccacctctctccccgtacaccccccagcatgaattctgggaactcaggtaaaatgctttctggaaacctgcctgtattagtctgttgtcaagctgctaataaacacatacccgaaactgggtagtttataaagga

SEQ ID NO: 2082 - protein, 44 aa, Homosapiens
MTISHLSPRTPPSMNSGNSGKMLSGNLPVLVCCQAANKHIPETG

SEQ ID NO: 2083 - DNA, 1888 bp, Homosapiens
tttaaaaatgtttggttcacagccttcactggattacctattggagcaaacaaagtgtaaccatgtaaaacctgtgagcttgtattgatatctcatggctagagttccaagcgaatgggtctcatgagatctgatggttttgaaaatgggagttgccctgcacaagctctccttttgcctgctgccatccacataagatgtgatttgctcttccttgccttccaccatgattgtgaggccttcccagcatgtggaaatttgcaggaatttagccaattcagaggtcttgttctccataatttggaattttccttcggatttgatcaagttggatagagttggtcaaacccaatgggaaaaagatgaaaacaacaagaaacagaaacaaacagcaacaacaacaacaacaaaaacaatgcatttaattaaatgaagatgagctcatgctggagtagggtggactctgaacccagtgggacaagcgtccttattaagaagagggaaatctggacacacacagagcagagaccgccgtgtgaagatggaggcagagatcggagagatgctgccacacgccacaaatgcctggggctcccagaaactacacggagcctcccccagcggcttcagcaggagcatggctcggccaacactttgatcttggtcttccagcctccagaacgttttcctaaaattcccttttccactggtgtgtggtgcaagatgaggcacattttccatggatggtgaacagagggaggagccttttgatcacaaccaggtcaccccacttctaagccactgtgcctccagccccacaagactaaggagagagagcgcagcgtggtggagagtgagctgtgctgggaccattgtttccgtaacctcgttttctgtgtccagctgacacaccttcaaagtggcatcaggtcctaaactgtagcttgcaatgtgcctgtttccagaaaccaaggtgaaagtgcttttagacagtgttcccatgcaagagtcccttcccagcttttttctggaaatgcatgtttctctgaactctgagtcccaagaaaaatcacttgagacaccaagaaaatgggggaagtgctaaaattgtgtgggaattcaagcttaacaataaacatcaagacatttttgataaaaatgaatccactgacatcggggaggagcaagagaacagcacgctgacactgggtcagaggctaagaccgacatttctgggaaccactcccggaagggcacagaggagacgctttcagcctctcatcagccagcctggcctgtagctgctgcacgttatgagtgtgttcctggcatgactgcttctaacagcgaccatttcattaagtttttaagtgcctggtaattgcttggttatgaccggtgtctgctccatggcagcctcttcctgaagaaatgctgaggcagtgtcacgctggtgtctgtcctccttacagaatgcctgaacagttccattgactcaaagtgaagatcaaaagaaccaaatgacagcaatagccaagtgtaatcatcagtaaccctgtgttctatccacaggtaaaaaacaatcatcctcttcattatgggtttcaattttaaatgtaatacatttttagaaatgcctatttccttttataatctctttatataatctaggttattctggctcttaggtcttcatttagctactgaaaagatttgatctcaaatcaatgatctaaccacccatgaccatctcccacctctctccccgtacaccccccagcatgaattctgggaactcaggtaaaatgctttctggaaacctgcctgtattagtctgttgtcaagctgctaataaacacatacccgaaactgggtagtttataaagga

SEQ ID NO: 2084 - protein, 106 aa, Homosapiens
MKMSSCWSRVDSEPSGTSVLIKKREIWTHTEQRPPCEDGGRDRRDAATRHKCLGLPETTRSLPQRLQQEHGSANTLILVFQPPERFPKIPFSTGVWCKMRHIFHGW

SEQ ID NO: 2085 - DNA, 2437 bp, Homosapiens
ataatgcagcagggccaccagtcagtttcagataatgatgtcaaccccggccaccaagaagtaaccttgtctccactagacagagcaggttgcaggaatttagccaattcagaggtcttgttctccataatttggaattttccttcggatttgatcaagttggatagagttggtcaaacccaatgggaaaaagatgaaaacaacaagaaacagaaacaaacagcaacaacaacaacaacaaaaacaatgcatttaattaaatgaagatgagctcatgctggagtagggtggactctgaacccagtgggacaagcgtccttattaagaagagggaaatctggacacacacagagcagagaccgccgtgtgaagatggaggcagagatcggagagatgctgccacacgccacaaatgcctggggctcccagaaactacacggagcctcccccagcggcttcagcaggagcatggctcggccaacactttgatcttggtcttccagcctccagaacgttttcctaaaattcccttttccactggtgtgtggtgcaagatgaggcacattttccatggatggtgaacagagggaggagccttttgatcacaaccaggtcaccccacttctaagccactgtgcctccagccccacaagactaaggagagagagcgcagcgtggtggagagtgagctgtgctgggaccattgtttccgtaacctcgttttctgtgtccagctgacacaccttcaaagtggcatcaggtcctaaactgtagcttgcaatgtgcctgtttccagaaaccaaggtgaaagtgcttttagacagtgttcccatgcaagagtcccttcccagcttttttctggaaatgcatgtttctctgaactctgagtcccaagaaaaatcacttgagacaccaagaaaatgggggaagtgctaaaattgtgtgggaattcaagcttaacaataaacatcaagacatttttgataaaaatgaatccactgacatcggggaggagcaagagaacagcacgctgacactgggtcagaggctaagaccgacatttctgggaaccactcccggaagggcacagaggagacgctttcagcctctcatcagccagcctggcctgtagctgctgcacgttatgagtgtgttcctggcatgactgcttctaacaactgggtctcgcttgttgcccaggctgtagtgcactggtgcaatcatggctcactgcagccttgacctcctggatcaaggtatcctcccacctctcagcctcccaagcagctgggactatgggtgcatgccaccacacccagctaatttttgtatttatggagatatgggtctcaccatgttacccaggctggtcttgaacttctgggctcaagccttctgcctgccctggccttccaaagcattggaattacaggcctgagccactgtgctaggccagagccaacaggacttactgagaaattatctgagagagaggggtcaaggaagactccccctgttcaaccaagcaacgaggtgaatggtgctgctgcttcctgagatggggaagactgtagaggaaacaaaccaggaacgacaaatcagtaatttagctttgaatacattaggtttgagatggctagtctgtacccaaacagaccacactgtggcatctgggcagcaggatctgcagaatccagcaggatggatgctgatgccaagctgagtagacagttgggtctgtgagtctaaagctcagggaagacctcagggtctgggatacaaatctggagatcatcaccctgtccatgaaagccaagggaatgatggaagatactatgagaaaaagtgaagagaggaaagagaagaggtccatggaaggagacctgggagaatccaaccttcgattagatcaggaagaggagaagaatccagtaaaaaactctgagaagtctctgggaaggaagtcttccttccttcccctgtaccaggagaggtgctatcccagaaattagtaaagaaacagtttttgatggggagaacaggatcacctttgtcaactgctgctgcgagacttggaaaaataaggactgggaagagagcaatagaaactttgaaagccattggttatcttgataagagttgtttctgtgggggtggtgagaactggagcctgactggatgggttcaagagagaatggggagttctagccaagaaggctgatgaggatgagtcaaattaaaaatgttttctttttatgagtcctctcatatttactgatacaactgatatattgggtctccattctgccacattactttatattgatcatgtattgtatctgctatgcaattgtattgcatgtatctgcatggcaattgtattgccatgcaatgtatttttttttactttaaaaattatatttataaaggtttgtaa

SEQ ID NO: 2086 - protein, 106 aa, Homosapiens; identical to SEQ ID NO: 2084

SEQ ID NO: 2087 - DNA, 3301 bp, Homosapiens
cctacgtgggtgggctgacctggtggtcctggttacactgcccaccagccttctggtgtctctactaggagtaaggtgccttctctttctcctccaggaccccacacctccagaccctgctgagggagggccacccatttctagtcccagctcctactctaactatctgtgtgaccttaaacaaggcctttcccctctctggcctcagtatccgcctctgaataatggggctgggcctgccgaccttctggcccttttctgctctgtgagtttgtgaacttgtgatagggagacaggagtcctaggaaggaaatggaactggtgatagggagacaagagtcctaggaaggaaatggaacttgtgatagggagacaagagtcctaggaaatggaaggagagcacgtttcactctgtccagcagagggcagcagctacccacaaatcaacagctgagcaaggccagggctgtgtgggagctatgcacaggttctgcctccagaagccttcagtgcctgcctctgagccagagggttccaagcagaagaggtcccgcccccggagagggacctcagagaggtcctccaagcccctctcagctcttacttacggcatcccagatgccctattcctcttctgcagagagaaggtggttcagccactaaatggtgctgggacctcgcagtttggtgggaaggaggaagcttactcaagcaaggaatatgagacaggcaaaaacccacgcataagccaaaagcccctccaaagcgaggtgttgttccaggctgacaagtgtccagcagggtggacttcagactccctgttaggaactgaattgtgtcccccaaaaagagaaagtcaccccagggtatgacctaattcaggaaaggtcattgcagatgcatttaattaaatgaagatgagctcatgctggagtagggtggactctgaacccagtgggacaagcgtccttattaagaagagggaaatctggacacacacagagcagagaccgccgtgtgaagatggaggcagagatcggagagatgctgccacacgccacaaatgcctggggctcccagaaactacacggagcctcccccagcggcttcagcaggagcatggctcggccaacactttgatcttggtcttccagcctccagaacgttttcctaaaattcccttttccactggtgtgtggtgcaagatgaggcacattttccatggatggtgaacagagggaggagccttttgatcacaaccaggtcaccccacttctaagccactgtgcctccagccccacaagactaaggagagagagcgcagcgtggtggagagtgagctgtgctgggaccattgtttccgtaacctcgttttctgtgtccagctgacacaccttcaaagtggcatcaggtcctaaactgtagcttgcaatgtgcctgtttccagaaaccaaggtgaaagtgcttttagacagtgttcccatgcaagagtcccttcccagcttttttctggaaatgcatgtttctctgaactctgagtcccaagaaaaatcacttgagacaccaagaaaatgggggaagtgctaaaattgtgtgggaattcaagcttaacaataaacatcaagacatttttgataaaaatgaatccactgacatcggggaggagcaagagaacagcacgctgacactgggtcagaggctaagaccgacatttctgggaaccactcccggaagggcacagaggagacgctttcagcctctcatcagccagcctggcctgtagctgctgcacgttatgagtgtgttcctggcatgactgcttctaacagtgagttttctggcaaatcaaataaatactaataagtctgtatgcacattatactttatacaaatcctatgagtgatgttccagaaataacaagttttgaaggcaaaataagtccttaaattggcaactttgacacataattccatgtagtagttaatcttgctagaagatcccaatgttgttattctaatacaatctgataatgttcactggcattttccactgttggcatctttactatagcctacagttgtttgtttgtttatttgagatggagtcttgctctgttgcctaggctagagtgcagtggcgtgatcttggctcactgcaacctccccctcccaggttcaagcagttctcctgcctcggcctccctagaagctgggattacaggcacgtgctaccacgcccagctaatttttgtatttttggtagagacgtggtttcatcatattggccaggctggtcttgaactcctgacctcaggtgatcagcctgtctcggcctcccacacacagtgctggggttacaggtgtgagccacgattcctggctgcctacagttctttgtaaagcagacaaaatagtttcattttttaaagaaatgaacatatatgaggcaacctgtacctaacttaggagttcagaaattccctggactgcctatacattttggtttctcattcctaattcccaaagattaaaatctgtcaggaatttggaaacattgaatcacaggccaaaataggaccatgtctccattcattcattcattcaacaattatttattgagcgcatgctatttttcaggcactgtgccacatattgagaatagagtagtgagtaagacaaagtcatcactttagggagtttatattttagaggagagaaagacaaatgaaagtgtttaggctgggcatggtggctcacacctgtaatcccagcactttgggaggtcaaggcaggtggatcacctgagctcaggagttcaagaccagcctgggcaacaatcccatctctaacaaaaacataaaaaattaaccaggtgtggtagcacatgcctgtggtctcagcaacttgggaggctgaggtggaaggatctcttgagcctgggaggcagaggttgcagtgagctgaggttgtgacactggacttcaacctgagtgacagatcccatctcaaaaacaaccctgggccgggtgtggtggctcacacctgtaatcccagcactttgggaggccgaggcaggaagatcttgaggtcaggagattgagaccatcctggctaacatggtgaaaccccgtctctactaaaaatacaaaaaattagctgggcatggtggcggttgcctatagtcccaactactcgggaggctgaggctggagaattgcttgaacccgggaggcagaagtagcagtgagccgagattgcaccgctgcactccagcctgggcaacagagtgagactccatctc

SEQ ID NO: 2088 - protein, 106 aa, Homosapiens; identical to SEQ ID NO: 2084

SEQ ID NO: 2089 - DNA, 899 bp, Homosapiens
ctgaacccagtgggacaagcgtccttattaagaagagggaaatctggacacacacagagcagagaccgccgtgtgaagatggaggcagagatcggagagatgctgccacacgccacaaatgcctggggctcccagaaactacacggagcctcccccagcggcttcagcaggagcatggctcggccaacactttgatcttggtcttccagcctccagaacggtgagcacattttccatggatggtgaacagagggaggagccttttgatcacaaccaggtcaccccacttctaagccactgtgcctccagccccacaagactaaggagagagagcgcagcgtggtggagagtgagctgtgctgggaccattgtttccgtaacctcgttttctgtgtccagctgacacaccttcaaagtggcatcaggtcctaaactgtagcttgcaatgtgcctgtttccagaaaccaaggtgaaagtgcttttagacagtgttcccatgcaagagtcccttcccagcttttttctggaaatgcatgtttctctgaactctgagtcccaagaaaaatcacttgagacaccaagaaaatgggggaagtgctaaaattgtgtgggaattcaagcttaacaataaacatcaagacatttttgataaaaatgaatccactgacatcggggaggagcaagagaacagcacgctgacactgggtcagaggctaagaccgacatttctgggaaccactcccggaagggcacagaggagacgctttcagcctctcatcagccagcctggcctgtagctgctgcacgttatgagtgtgttcctggcatgactgcttctaacagtgagttttctggcaaatcaaataaatactaataagtctgtatgcacattatacttt

SEQ ID NO: 2090 - protein, 94 aa, Homosapiens
MPGAPRNYTEPPPAASAGAWLGQHFDLGLPASRTVSTFSMDGEQREEPFDHNQVTPLLSHCASSPTRLRRESAAWWRVSCAGTIVSVTSFSVSS

SEQ ID NO: 2091 - DNA, 3072 bp, Homosapiens
ggggaaggaagtaaagagagagaattgatagggataaagaagaggcatcaagagacttggggtatctgctactgaagacatcagctctctatgacaaaacagcacagcatgtttggagtaagagaaagctgaagtctcaacaaacaaatagattcttaatgttctataccaccggacaaactgcagcccttttatacatatggagtactttctgggccagtcctgtggcccctttcaaatgtatggtgttgaaacgtagtaagtttatgtttttaaggtctgcccctcccttcttgcattatatcataaactcttctctttttttttttttttgagacggagtcccgctctgtcacgcaggctgccaggctggcgtacagtggcgcaatctcagctcgctgcaacctccacctcctgggttcaagcgattttcttgcctctgcctcctgagtagctgggattactggcacacaccaccatgcacagttgcaggaatttagccaattcagaggtcttgttctccataatttggaattttccttcggatttgatcaagttggatagagttggtcaaacccaatgggaaaaagatgaaaacaacaagaaacagaaacaaacagcaacaacaacaacaacaaaaacagttaagtgaaacaaacaaacaatcacacaatttatgtggtcactgagtgctctaatagtaaggagaaattaagaccagctggctgttagtcttaactctagccaagacaaaactccaattcagctacttacctagtaatgagtctcaggctgaagtctgctctctcccatcctagaagcaggaaaaaactgaaactcatcttccctgctggaaacgagctcaaactccagaaaggagttacctgccttccatcatcatggacgcaggaaaatttgccttccttgttggaagcaagtaaaactccaaaaaaggagttgcacagcaaaataaacttcagatctcaacaaatttggggagatcagggattctctgggggtggggtggctcccaggcctcagccaattgtcctattggtttcagccataaagacagctcaggctgctaccacgcactgataggagatttgtcaaagatcgaggcatcttcactcagaatccctctgtgattaccaattgtgaacacaaaatatctgatatgggtctcagtcaatttagaaagtttattttgccaaggttaaggacacatccatgacatagcctcaggaggttctgttgacgtgtgcaaggtggttggggcacagcttggttttacacattttagggagacatgagatatcaatcaatatatgttaagacatatatcaggtggtccaaaaaggtgggatgactggaaacagggagggggcttccaggtgataggtagataagagaaaaacagttgcattcttttgagtttctaataagcctttcactgaatacacaatttacaggactaatcacttaagccttagcctggctcagtgaaacaacagggcaaaggaagcaatcagctatgcatttgtctcacgtgagcagagggatgactttgagttctgtctagctatcttgtttaggaatataatgagaggcaggtttgcgtgcagtttccagattgacttttccctttggcttagtgactttgaggtcccaagatttattttcctttaacatttacaaggagaagtgaagaaataagtaaattagagagctagaaggatggaagtttacagttagagagagtgggatgttgaaggtaatactggttgcatatttcttatccaaaatgcttgggaccagaagtgtttcagatttcagatgttttcagattttggaatatttgcattatacaggttcagcacccctaatctgaaaacgtgaaatccaaaattctccaatgattgtttcctttgagcatcacaatggtgctcaaaaggttttggattttagagcatttcaaatttcagattttcagattagggataataaacctatatctcagaaacggtacatttctgaataatgacaaattgtcattatttgccatgagaattgtcattaatgtgggtggagatggggatgattgtaggtcaagagactgaagcaatagggtaggcttgggtgttagtacggcccttcatgggaatgtgttgatgtcatccagggtcacgggaggcttctgagtgggaaggaagctgagagcctatgattacggtcttcactgatgaaggcagacagtaggaggttggcagatggtgggcactgactagactggaagtgccaagaacttcagtggagcaaggttttacccaagacacagaggttgtggtctagagcagcccagggatgaaggatcacccattggagaggactgtggggaaagcagagtcctgggagatgaaccaagcatcagttgaggctggaacagttaaaatgtatacatcaaattctctccaaggacactgtacccttggctgaaaattccctccttagtctacttcccatcccaaattctacccatccacactgtggcatcctaggtctctctagcagctgaacaggcaggcctctgtaacaactgtttcagcgctgactgagtggttaagttaaatattaaaagttgaaagagccagtaaccttatacaaaggctggaatagaacaaaagcccaccacaagtttttgcctaagtctttcctgtgccttgaaccatgacaagaggaggaaggaattcttaaccagacccatttaggattaagtaagtttttattggctgggtacggtggctcacacctataatctcagcactttgggaggctgaggcaggcagatcacctgaggtcaggagtttgagaccagcctcctggccaacatggtgaaactctgtctctactaaaagtaccaaaatgagccaagcatggtggcgggagcctgtagtcccaactactcaggaggctggggcaggagaatcgcttgaacccagaaagcggaggttgcagtgacctgggatcacaccactgcacttcagcctgggcaacagagtgagactccatctc

SEQ ID NO: 2092 - protein, 57 aa, Homosapiens
MHSCRNLANSEVLFSIIWNFPSDLIKLDRVGQTQWEKDENNKKQKQTATTTTTKTVK

SEQ ID NO: 2093 - DNA, 1909 bp, Homosapiens
ttaattgctttcttccaaatggattgaatcacttcttttaaagtgttttaattaatttttatctatagaacaaaataacaaataagtattttttttttataccataatggtcacccacagcctgtgtatactaagaccatgcatactgataatcagctttattttacaaaagagtttcgctttacccctctggtaattaatggattctgggtatttattaaaaactttaacacaaagactgttaaataccaccagtccagctttggcaaggcactgttggctttgtttatctccatcatcatccaaacagactaccaatcctgatcccagcccaatcttgggcccttgaaaaaataacttaacatcctaactacaagggagaaactcctttcaaattaatgaacctggctgacttatatagccttaaaattatggaaatgacaagggttacaatgtcagaatgagcagtaaaccttccccagtcctatcagagcaaactttctggggttgcatcccctcagaaacccatttggggcccaatctcaatgcacatatcagtgcgcaaagcactaaaattccaggcaacactttgtattgagagaagccaaaattttggtcccgccctgggacatctaaagtcaccaatgtaactacaccatacagattaaaccctcacatgatcatgtaagctatgcagttacccaagctgcatcatttagaaaacctgtacagtttttatggaaaccatccctagtcaaggacactttaaatatatagtctaaataccgttaaggtaggcccactagctgtgttcacattttcccttggccaccttaccagggactttaataacttgggaaagtgaaaacaacaagctaacccacatgttcaccatagaaaacaattttgtcttgaaaaacaaggactctttttcccgtgtgggaccagttcctacttatgttttaccagccaattggactggaacctatacagttgtttatttagcccccgaaattaatatagctcccaacaaccaatccttcattatacttttaactgcaaccaccagacacaaatgagccatccaactgataccactttcggtagagctaggaataacagcaggagtaggaatgagagttagcagccttgcagtttccctatcctattaccaatgcttgtccaaggattttatggaaagcttaggtgacattgcccaaaagtatcatcaccttacaaaatcagatagagtctttggcagtggtggctttgtaaaatagaaggggactggatctcctaaatgctgaagaaggtggcttatgtctttttcctagaggaagaatgctgtttttatgtcaaccaaacaggattagtaagggatgccacccaaaaactagccgattggtaccataagatatgacaacagctgtctgagtcatggggcgcctagtcaaaatgctaatttggggctcacatctccttcctctggccagtccactattaattattatacttgccttggcttttggatcatgtttgttaaatcttttaaccagatttatttcttcttgcctagagaccattgcaggaatttagccaattcagaggtcttgttctccataatttggaattttccttcggatttgatcaagttggatagagttggtcaaacccaatgggaaaaagatgaaaacaacaagaaacagaaacaaacagcaacaacaacaacaacaaaaacaaagcaggaaaaaactgaaactcatcttccctgctggaaacgagctcaaactccagaaaggagttacctgccttccatcatcatggacgcaggaaaatttgccttccttgttggaagcaagtaaaactccaaaaaaggagttgcacagcaaaataaacttcagatctcaac

SEQ ID NO: 2094 - protein, 109 aa, Homosapiens
MFVKSFNQIYFFLPRDHCRNLANSEVLFSIIWNFPSDLIKLDRVGQTQWEKDENNKKQKQTATTTTTKTKQEKTETHLPCWKRAQTPERSYLPSIIMDAGKFAFLVGSK

SEQ ID NO: 2095 - DNA, 1155 bp, Homosapiens
ggggaaggaagtaaagagagagaattgatagggataaagaagaggcatcaagagacttggggtatctgctactgaagacatcagctctctatgacaaaacagcacagcatgtttggagtaagagaaagctgaagtctcaacaaacaaatagattcttaatgttctataccaccggacaaactgcagcccttttatacatatggagtactttctgggccagtcctgtggcccctttcaaatgtatggtgttgaaacgtagtaagtttatgtttttaaggtctgcccctcccttcttgcattatatcataaactcttctctttttttttttttttgagacggagtcccgctctgtcacgcaggctgccaggctggcgtacagtggcgcaatctcagctcgctgcaacctccacctcctgggttcaagcgattttcttgcctctgcctcctgagtagctgggattactggcacacaccaccatgcacagttccttgttcaaaatgccaagaacctggatgactcatagtcaagaccctccaccagtaacatatattggcgagccagccaggagcatgtggaaatggtccagcctgcaataactgaagcccccagacctggaacctgaagatcccatcagccactaaacctgtgaacctgtagaagacctgaagtacctgtttaaaaggcagccaaaagataagtaaattcctatcaactttccttggtgtccttcttgtatatttactgtaagctggatataatagtagccatttttatatttttacaatttaattgctttcttccaaatggattgaatcacttcttttaaagtgttttaattaatttttatctatagaacaaaataacaaataagtattttttttttataccataatggtcacccacagcctgtgtatactaagaccatgcatactgataatcagctttattttacaaaagagtttcgctttacccctctggtaattaatggattctgggtatttattaaaaactttaacacaaagactgttaaataccaccagtccagctttggcaaggcactgttggctttgtttatctccatcatcatccaaacagactaccaatcctgatcccagcccaatcttgggcccttgaaaaaataacttaacatcct

SEQ ID NO: 2096 - protein, 39 aa, Homosapiens
MHSSLFKMPRTWMTHSQDPPPVTYIGEPARSMWKWSSLQ

SEQ ID NO: 2097 - DNA, 511 bp, Homosapiens
caaactgccaccggaactgctttaaaaatgtttggttcacagccttcactggattacctattggagcaaacaaagtgtaaccatgtaaaacctgtgagcttgtattgatatctcatggctagagttccaagcgaatgggtctcatgagatctgatggttttgaaaatgggagttgccctgcacaagctctccttttgcctgctgccatccacataagatgtgatttgctcttccttgccttccaccatgattgtgaggccttcccagcatgtggaaatggtccagcctgcaataactgaagcccccagacctggaacctgaagatcccatcagccactaaacctgtgaacctgtagaagacctgaagtacctgtttaaaaggcagccaaaagataagtaaattcctatcaactttccttggtgtccttcttgtatatttactgtaagctggatataatagtagccatttttatatttttacaatttaattgctttcttccaaatggattga

SEQ ID NO: 2098 - protein, 54 aa, Homosapiens
MGLMRSDGFENGSCPAQALLLPAAIHIRCDLLFLAFHHDCEAFPACGNGPACNN

SEQ ID NO: 2099 - DNA, 755 bp, Homosapiens
cattcaccaccgcgtgacgcggcgccgggtcgccgccgcagattcgacacaaaacccggaaggaccccgccgaaggttttctccggttcgggagagagacggagtcccgctctgtcacgcaggctgccaggctggcgtacagtggcgcaatctcagctcgctgcaacctccacctcctgggttcaagcgattttcttgcctctgcctcctgagtagctgggattactggcacacaccaccatgcacagggagatatgagacatcaatcaatatatgtaagatgtacatcagtttcgtctggaaagatgggacaacatgaagcagggagggggctccctggtgacagttccttgttcaaaatgccaagaacctggatgactcatagtcaagaccctccaccagtaacatatattggcgagccagccaggagcgaatgggtctcatgagatctgatggttttgaaaatgggagttgccctgcacaagctctccttttgcctgctgccatccacataagatgtgatttgctcttccttgccttccaccatgattgtgaggccttcccagcatgtggaaatggtccagcctgcaataactgaagcccccagacctggaacctgaagatcccatcagccactaaacctgtgaacctgtagaagacctgaagtacctgtttaaaaggcagccaaaagataagtaaattcctatcaactttccttggtgtccttcttgtatatttactgtaagctggatata

SEQ ID NO: 2100 - protein, 63 aa, Homosapiens
MRHQSIYVRCTSVSSGKMGQHEAGRGLPGDSSLFKMPRTWMTHSQDPPPVTYIGEPARSEWVS

SEQ ID NO: 2101 - DNA, 1394 bp, Homosapiens
gagggcccatgccagaacctgaccatgctggcactctgattttggatttctagtctctagaactgtgaataagtacgtttctattgcgtaagccacccagtctatggtattttattatggcagcctgagctgactaatataggcttctagattggaaggggaaggaagtaaagagagagaattgatagggataaagaagaggcatcaagagacttggggtatctgctactgaagacatcagctctctatgacaaaacagcacagcatgtttggagtaagagaaagctgaagtctcaacaaacaaatagattcttaatgttctataccaccggacaaactgcagcccttttatacatatggagtactttctgggccagtcctgtggcccctttcaaatgtatggtgttgaaacgtagtaagtttatgtttttaaggtctgcccctcccttcttgcattatatcataaactcttctctttttttttttttttgagacggagtcccgctctgtcacgcaggctgccaggctggcgtacagtggcgcaatctcagctcgctgcaacctccacctcctgggttcaagcgattttcttgcctctgcctcctgagtagctgggattactggcacacaccaccatgcacagggagatatgagacatcaatcaatatatgtaagatgtacatcagtttcgtctggaaagatgggacaacatgaagcagggagggggctccctggtgacagttccttgttcaaaatgccaagaacctggatgactcatagtcaagaccctccaccagtaacatatattggcgagccagccaggagaccactacaggaaacactccatttattccacctgacttcccacttggctgcatcctcaaccattgaaatgaatttgaccctgataatctaaggaggaaacatttgatattcttttgcaataatacttggccccagtattgtttggaatctggagtttgctgttgaatgggaaagcaggatgacgttgcatgtatccaggctttggtgctgctgtcctaagaagggtcaggcctagtcagcatatggtgctctcctttggtgctatttggctccagtgtctttggagtctgaggaggtttggcctttaaaaatcaaactgccaccggaactgctttaaaaatgtttggttcacagccttcactggattacctattggagcaaacaaagtgtaaccatgtaaaacctgtgagcttgtattgatatctcatggctagagttccaaggtaaaagctattggatcttcgtttgtgtgtgtgtatacatgtctagatgtgtttatttgtatgtacacttattgttatatgttgtgtcaaccaaatcagcttataaataaaaaagcactcataaat

SEQ ID NO: 2102 - protein, 88 aa, Homosapiens
MRHQSIYVRCTSVSSGKMGQHEAGRGLPGDSSLFKMPRTWMTHSQDPPPVTYIGEPARRPLQETLHLFHLTSHLAASSTIEMNLTLII

SEQ ID NO: 2103 - DNA, 2750 bp, Homosapiens
gtcactcgtataaaaacctatgctttgaaggttctcgtgtgtctcggcctgcaggtctcgctcagagctgtgtccctgaacatccaccctgctggggtggcttgacgcacttctgtgcaaatctgttcgctcgcaaccctacctacctctctcccgaaccggagaaaaccttcggcggggtccttccgggttttgtgtcgaatctgcggcggcgacccggcgccgcgtcacgcggtggtgaatgtgcggcagcacgcgcgccgcgtcgtttacgcggcgatttcatcatgctccgagccgggcggcgcgcgccgcttccgtcgccaccctctctggacagcccagggccgcaggctcatgccctctccgcgtccagtgctgcttagaggtgctcgcgccgctctgctgctgctgctgccgccccggctcttagcccgaccctcgctcctgctccgccggtccctcagcgcggcctcctgccccccgatctccttgcccgccgccgcctcccggagcagcatggacggcgcgggggctgaggaggtgctggcacctctgaggctagcagtgcgccagcagggagatcttgtgcgaaaactcaaagaagataaagcaccccaagtagacgtagacaaagcagtggctgagctcaaagcccgcaagagggttctggaagcaaaggagctggcgttacagcccaaagatgatattgtagaccgagcaaaaatggaagataccctgaagaggaggtttttctatgatcaagcttttgctatttatggaggtgttagtggtctgtatgactttgggccagttggctgtgctttgaagaacaatattattcagacctggaggcagcactttatccaagaggaacagatcctggagatcgattgcaccatgctcacccctgagccagttttaaagacctctggccatgtagacaaatttgctgacttcatggtgaaagacgtaaaaaatggagaatgttttcgtgctgaccatctattaaaagctcatttacagaaattgatgtctgataagaagtgttctgtcgaaaagaaatcagaaatggaaagtgttttggcccagcttgataactatggacagcaagaacttgcggatctttttgtgaactataatgtaaaatctcccattactggaaatgatctatcccctccagtgtcttttaacttaatgttcaagactttcattgggcctggaggaaacatgcctgggtacttgagaccagaaactgcacaggggattttcttgaatttcaaacgacttttggagttcaaccaaggaaagttgccttttgctgctgcccagattggaaattcttttagaaatgagatctcccctcgatctggactgatcagagtcagagaattcacaatggcagaaattgagcactttgtagatcccagtgagaaagaccaccccaagttccagaatgtggcagaccttcacctttatttgtattcagcaaaagcccaggtcagcggacagtccgctcggaaaatgcgcctgggagatgctgttgaacagggtgtgattaataacacagtattaggctatttcattggccgcatctacctctacctcacgaaggttggaatatctccagataaactccgcttccggcagcacatggagaatgagatggcccattatgcctgtgactgttgggatgcagaatccaaaacatcctacggttggattgagattgttggatgtgctgatcgttcctgttatgacctctcctgtcatgcacgagccaccaaagtcccacttgtagctgagaaacctctgaaagaacccataacagtcaatgttgttcagtttgaacccagtaagggagcaattggtaaggcatataagaaggatgcaaaactggtgatggagtatcttgccatttgtgatgagtgctacattacagaaatggagatgctgctgaatgagaaaggggaattcacaattgaaactgaagggaaaacatttcagttaacaaaagacatgatcaatgtgaagagattccagaaaacactatatgtggaagaagttgttccgaatgtaattgaaccttccttcggcctgggtaggatcatgtatacggtatttgaacatacattccatgtacgagaaggagatgaacagagaacattcttcagtttccctgctgtagttgctccattcaaatgttccgtcctcccactgagccaaaaccaggagttcatgccatttgtcaaggaattatcggaagccctgaccaggcatggagtatctcacaaagtagacgattcctctgggtcaatcggaaggcgctatgccaggactgatgagattggcgtggcttttggtgtcaccattgactttgacacagtgaacaagaccccccacactgcaactctgagggaccgtgactcaatgcggcagataagagcagagatctctgagctgcccagcatagtccaagacctagccaatggcaacatcacatgggctgatgtggaggccaggtatcctctgtttgaagggcaagagactggtaaaaaagagacaatcgaggaatgaggacaattttgacaacttttgaccacttgcgctaataaaaaaaaaaaaaaactactcttatgtccactttacaaaagaaaacagcattgtgattactcccagggaccgtattttatcttcagtggctgcctgattttacccccacaattaaagttgaaggaatcctgaacaaa

SEQ ID NO: 2104 - protein, 739 aa, Homosapiens
MPSPRPVLLRGARAALLLLLPPRLLARPSLLLRRSLSAASCPPISLPAAASRSSMDGAGAEEVLAPLRLAVRQQGDLVRKLKEDKAPQVDVDKAVAELKARKRVLEAKELALQPKDDIVDRAKMEDTLKRRFFYDQAFAIYGGVSGLYDFGPVGCALKNNIIQTWRQHFIQEEQILEIDCTMLTPEPVLKTSGHVDKFADFMVKDVKNGECFRADHLLKAHLQKLMSDKKCSVEKKSEMESVLAQLDNYGQQELADLFVNYNVKSPITGNDLSPPVSFNLMFKTFIGPGGNMPGYLRPETAQGIFLNFKRLLEFNQGKLPFAAAQIGNSFRNEISPRSGLIRVREFTMAEIEHFVDPSEKDHPKFQNVADLHLYLYSAKAQVSGQSARKMRLGDAVEQGVINNTVLGYFIGRIYLYLTKVGISPDKLRFRQHMENEMAHYACDCWDAESKTSYGWIEIVGCADRSCYDLSCHARATKVPLVAEKPLKEPITVNVVQFEPSKGAIGKAYKKDAKLVMEYLAICDECYITEMEMLLNEKGEFTIETEGKTFQLTKDMINVKRFQKTLYVEEVVPNVIEPSFGLGRIMYTVFEHTFHVREGDEQRTFFSFPAVVAPFKCSVLPLSQNQEFMPFVKELSEALTRHGVSHKVDDSSGSIGRRYARTDEIGVAFGVTIDFDTVNKTPHTATLRDRDSMRQIRAEISELPSIVQDLANGNITWADVEARYPLFEGQETGKKETIEE

SEQ ID NO: 2105 - DNA, 762 bp, Homosapiens
catcatgctccgagccgggcggcgcgcgccgcttccgtcgccaccctctctggacagcccagggccgcaggctcatgccctctccgcgtccagtgctgcttagaggtgctcgcgccgctctgctgctgctgctgccgccccggctcttagcccgaccctcgctcctgctccgccggtccctcagcgcggcctcctgccccccgatctccttgcccgccgccgcctcccggagcagcatggacggcgcgggggctgaggaggtgctggcacctctgaggctagcagtgcgccagcagggagatcttgtgcgaaaactcaaagaagataaagcaccccaagtagacgtagacaaagcagtggctgagctcaaagcccgcaagagggttctggaagcaaaggagctggcgttacagcccaaagatgatattgtagaccgaactcaatgcggcagataagagcagagatctctgagctgcccagcatagtccaagacctagccaatggcaacatcacatgggctgatgtggaggccaggtatcctctgtttgaagggcaagagactggtaaaaaagagacaatcgaggaatgaggacaattttgacaacttttgaccacttgcgctaataaaaaaaaaaaaaaactactcttatgtccactttacaaaagaaaacagcattgtgattactcccagggaccgtattttatcttcagtggctgcctgattttacccccacaattaaagttgaaggaatcctgaacaaa

SEQ ID NO: 2106 - protein, 126 aa, Homosapiens
MPSPRPVLLRGARAALLLLLPPRLLARPSLLLRRSLSAASCPPISLPAAASRSSMDGAGAEEVLAPLRLAVRQQGDLVRKLKEDKAPQVDVDKAVAELKARKRVLEAKELALQPKDDIVDRTQCGR

SEQ ID NO: 2107 - DNA, 644 bp, Homosapiens
cttaacatctactctttgagcggatttcagagaattcacaatggcagaaattgagcactttgtagatcccagtgagaaagaccaccccaagttccagaatgtggcagaccttcacctttatttgtattcagcaaaagcccaggtcagcggacagtccgctcggaaaatgcgcctgggagatgctgttgaacagggtgtgattaataacacagtattaggctatttcattggccgcatctacctctacctcacgaaggttggaatatctccagataaactccgcttccggcagcacatggagaatgagatggcccattatgcctgtgactgttgggatgcagaatccaaaacatcctacggttggattgagattgttggatgtgctgatcgttcctgttatgacctctcctgtcatgcacgagccaccaaagtcccacttgtagctgagaaacctctgaaagaacccatatcctttctggtcactccaaaaactcaggattcacatgtgaacatcttgctaatgaataagtccaagtctttaccttgttctatggataaatggagatgttttagacactgtagtaacgcttgtttaaacctattattttacctatccctttgttcctttcctattctctgtactt

SEQ ID NO: 2108 - protein, 200 aa, Homosapiens
MAEIEHFVDPSEKDHPKFQNVADLHLYLYSAKAQVSGQSARKMRLGDAVEQGVINNTVLGYFIGRIYLYLTKVGISPDKLRFRQHMENEMAHYACDCWDAESKTSYGWIEIVGCADRSCYDLSCHARATKVPLVAEKPLKEPISFLVTPKTQDSHVNILLMNKSKSLPCSMDKWRCFRHCSNACLNLLFYLSLCSFPILC

SEQ ID NO: 2109 - DNA, 1518 bp, Homosapiens
cgcctttttttttttttttttttggtctcgctttgttgctcagctggagtgcagtggcacaatctcagctgactacagcctcaaacttctgggctcaagcaatcctcctgcttcagcctcccaagtagctgggaccacaggtgcgcctcacaatgcccagctaattttttagtttttgtagagatggggtcttgccatgttgccctggctggtcttgaattcctggggtcaagcaattcttctgcctcagcctcccaaagtgctgggattacaggcatgagccactgtgtccagccttatttttgctttctttgatttctgagttactcagaaactatttcagggcagtttaagaaggctgtactttttagtgtaggtatatggaacatctttttttgttttgtactatttcttttggacatatgtttgtgagctaattaaacttttctgtttcacttggtcactgaggttcataggtttttctcttaaaagacagaatgggctttggtttgggtcactgccacttgtttgaatatttaggtagtctccacagaaagtcttttatgtggaaccaaaaaattaccgtcttttatatacagtagctttcagaatgctttcacatcatttgacttttttagtaacgggcttgtgaagcaagcagagcaggtggtagagacctgctttttaggtggagaaactaaggttcagaaagagttcatgacttggcctaaattcggagctgaaaccaggtgtttctgatgctggttctgcttctcttttgccatactgcttttcatgtcatgttttctggcattttggtaatgacgttatgcttgaacacttgctgaatattaacctcttttggtttgggatattagcatttagatatttacaaattaacatatttggatttttttctttttaaatcatccagttcttcagtttccctgctgtagttgctccattcaaatgttccgtcctcccactgagccaaaaccaggagttcatgccatttgtcaaggaattatcggaagccctgaccaggcatggagtatctcacaaagtagacgattcctctgggtcaatcggaaggcgctatgccaggactgatgagattggcgtggcttttggtgtcaccattgactttgacacagtgaacaagaccccccacactgcaactctgagggaccgtgactcaatgcggcagataagagcagagatctctgagctgcccagcatagtccaagacctagccaatggcaacatcacatgggctgatgtggaggccaggtatcctctgtttgaagggcaagagactggtaaaaaagagacaatcgaggaatgaggacaattttgacaacttttgaccacttgcgctaataaaaaaaaaaaaaaactactcttatgtccactttacaaaagaaaacagcattgtgattactcccagggaccgtattttatcttcagtggctgcctgattttacccccacaattaaagttgaaggaatcctgaacaaa

SEQ ID NO: 2110 - protein, 112 aa, Homosapiens [sequence omitted]

SEQ ID NO: 2111 - DNA, 1285 bp, Homosapiens
tcagtttccctgctgtagttgctccattcaaatgttccgtcctcccactgagccaaaaccaggagttcatgccatttgtcaaggaattatgtaagcaaattcaattgggtaaactccatgggaacaccatcaaggagactgaattttaggaaatgtatcatttatttcaataaaaatatagactgaataaagaatataaatgattttataaagagtacatgattttagcctgtactcttatttctaagcgagaggatatgcttgctcagatgttttattctggcatttgagtgaggcaaggtaggacccaagagtcagatttaaaaattatttacttctcatactgaccttggtgccaagttcatcgagggaacctgagtggagtgtagcaaccataatggatctacagccacagaatccacagccctgaaaggaatcctggtggtcatctggcacatccacttatttcagagctgggaaatggggagagtccattgacctgcttagagccataaaaatagaggtggtggagtcaggactcaccttctggccttggctcttggtcccatatttgttccccctatagctgtatcagatggaggtatgagtgaagatttggattcccgcaagggatttattaaactttagggatatttctttctcttgcaactcaacttgttgctttcttgtcttggtcccatttataagtctcctgagcttgtaagacagtagttagataacactgggcttaactccattgttttatttttaatttactttgtttattttggatagcggaagccctgaccaggcatggagtatctcacaaagtagacgattcctctgggtcaatcggaaggcgctatgccaggactgatgagattggcgtggcttttggtgtcaccattgactttgacacagtgaacaagaccccccacactgcaactctgagggaccgtgactcaatgcggcagataagagcagagatctctgagctgcccagcatagtccaagacctagccaatggcaacatcacatgggctgatgtggaggccaggtatcctctgtttgaagggcaagagactggtaaaaaagagacaatcgaggaatgaggacaattttgacaacttttgaccacttgcgctaataaaaaaaaaaaaaaactactcttatgtccactttacaaaagaaaacagcattgtgattactcccagggaccgtattttatcttcagtggctgcctgattttacccccacaattaaagttgaaggaatcctgaacaaa

SEQ ID NO: 2112 - protein, 48 aa, Homosapiens [sequence omitted]

SEQ ID NO: 2113 - DNA, 2274 bp, Homosapiens
ggcgaccggaggtggcgcccaaaggctgcccgggagatcggggctgggctggcgggggccaggaccccgcgccctctcggccgctcactctcgcgtccactccctcgcagtcacgccgggcgcgcactcccactccctctccgcacgcggctgcgggacgcgatggacgcggcactgctccacagcctgctggaggccaactgcagcctggcgctggctgaagagctgctcttggacggctgggggccacccctggaccccgagggtccctactcctactgcaacacgaccttggaccagatcggaacgtgctggccccgcagcgctgccggagccctcgtggagaggccgtgccccgagtacttcaacggcgtcaagtacaacacgacccggaatgcctatcgagaatgcttggagaatgggacgtgggcctcaaagatcaactactcacagtgtgagcccattttggatgacaagcagaggaagtatgacctgcactaccgcatcgcccttgtcgtcaactacctgggccactgcgtatctgtggcagccctggtggccgccttcctgcttttcctggccctgcggagcattcgctgtctgcggaatgtgattcactggaacctcatcaccacctttatcctgcgaaatgtcatgtggttcctgctgcagctcgttgaccatgaagtgcacgagagcaatgaggtctggtgccgctgcatcaccaccatcttcaactacttcgtggtgaccaacttcttctggatgtttgtggaaggctgctacctgcacacggccattgtcatgacctactccactgagcgcctgcgcaagtgcctcttcctcttcatcggatggtgcatccccttccccatcatcgtcgcctgggccatcggcaagctctactatgagaatgaacagtgctggtttggcaaggagcctggcgacctggtggactacatctaccaaggccccatcattctcgtgctcctgatcaatttcgtatttctgttcaacatcgtcaggatcctaatgacaaagttacgcgcgtccaccacatccgagacaatccagtacaggaaggcagtgaaggccaccctggtgctcctgcccctcctgggcatcacctacatgctcttcttcgtcaatcccggggaggacgacctgtcacagatcatgttcatctatttcaactccttcctgcagtcgttccagggtttcttcgtgtctgtcttctactgcttcttcaatggagaggtgcgctcagccgtgaggaagaggtggcaccgctggcaggaccatcactcccttcgagtccccatggcccgggccatgtccatccctacatcacccacacggatcagcttccacagcatcaagcagacggccgctgtgtgacccctcggtcgcccacctgcacagctcccctgtcctcctccaccttcttcctctgggttctctgtgctgggcaggctctcgtggggcaggagatgggaggggagagaccagctctccagcctggcaggaaagagggggtgcggcagccaagggggactgcaagggacagggatgagtgggggccaccaggctcagcgcaagaggaagcagagggaattcacaggaccccctgagaagagccagtcagatgtctgcaggcatttgcccatcccagcctctctggccagggccttactgggcccagagcagagaaggacctgtccaacacacacagctatttatagtagcagacacagggctcccctgccctactcatggagccagcagccaggcaatggtgtggccctgcactggcccttggcctccacactcagtggtgcccctgcagttgggtggggtacgccagcaaaggatcagtttggctgccttatcccaggggctgtcacctagagaggctcacttgtaccccacccttgttcctgtgtcccctccccagccatcctcccgccttgggggctccatgaaggatgcaggcttccaggcctggcttcctctcttgggagaccccttctctgcctagtccacagattaggcaatcaaggaagacgccatcagggaagccacatccttagtcaaccagttgcatcgtgcggggcaaaatgaggagcagaggcatggaggagggaggcgtgggatgggaatagcagaaaccaaccatgtcttcagtgattgaaactcataccccattgccctttgccctccagtctccccttcagaaacatctctgctctctgtgaaataaaccatgcctcttgg

SEQ ID NO: 2114 - protein, 411 aa, Homosapiens; identical to SEQ ID NO: 224

SEQ ID NO: 2115 - DNA, 1600 bp, Homosapiens
ggggctggccagggtgtgaccaccgtgctgggcagcaggctccagtccctaacccccagccactactggcatgaggggtccctcagggcccccaggcctcctctacgtcccacacctcctcctctgcctgctctgcctcctcccaccgccgctccaatacgcagccgggcagagccagatgcccaaagaccagcccctgtgggcacttctggagcagtactgccacaccatcatgaccctcaccaacctctcaggtccctactcctactgcaacacgaccttggaccagatcggaacgtgctggccccgcagcgctgccggagccctcgtggagaggccgtgccccgagtacttcaacggcgtcaagtacaacacgacccggaatgcctatcgagaatgcttggagaatgggacgtgggcctcaaagatcaactactcacagtgtgagcccattttggatgacaagcagaggaagtatgacctgcactaccgcatcgcccttgtcgtcaactacctgggccactgcgtatctgtggcagccctggtggccgccttcctgcttttcctggccctgcggagcattcgctgtctgcggaatgtgattcactggaacctcatcaccacctttatcctgcgaaatgtcatgtggttcctgctgcagctcgttgaccatgaagtgcacgagagcaatgaggtctggtgccgctgcatcaccaccatcttcaactacttcgtggtgaccaacttcttctggatgtttgtggaaggctgctacctgcacacggccattgtcatgacctactccactgagcgcctgcgcaagtgcctcttcctcttcatcggatggtgcatccccttccccatcatcgtcgcctgggccatcggcaagctctactatgagaatgaacagtgctggtttggcaaggagcctggcgacctggtggactacatctaccaaggccccatcattctcgtgctcctgatcaatttcgtatttctgttcaacatcgtcaggatcctaatgacaaagttacgcgcgtccaccacatccgagacaatccagtacaggaaggcagtgaaggccaccctggtgctcctgcccctcctgggcatcacctacatgctcttcttcgtcaatcccggggaggacgacctgtcacagatcatgttcatctatttcaactccttcctgcagtcgttccagggtttcttcgtgtctgtcttctactgcttcttcaatggagaggtgcgctcagccgtgaggaagaggtggcaccgctggcaggaccatcactcccttcgagtccccatggcccgggccatgtccatccctacatcacccacacggatcagcttccacagcatcaagcagacggccgctgtgtgacccctcggtcgcccacctgcacagctcccctgtcctcctccaccttcttcctctgggttctctgtgctgggcaggctctcgtggggcaggagatgggaggggagagaccagctctccagcctggcaggaaagagggggtgcggcagccaagggggactgcaagggacagggatgagtgggggccaccaggctcagcgcaagaggaagcagagg

SEQ ID NO: 2116 - protein, 438 aa, Homosapiens
MRGPSGPPGLLYVPHLLLCLLCLLPPPLQYAAGQSQMPKDQPLWALLEQYCHTIMTLTNLSGPYSYCNTTLDQIGTCWPRSAAGALVERPCPEYFNGVKYNTTRNAYRECLENGTWASKINYSQCEPILDDKQRKYDLHYRIALVVNYLGHCVSVAALVAAFLLFLALRSIRCLRNVIHWNLITTFILRNVMWFLLQLVDHEVHESNEVWCRCITTIFNYFVVTNFFWMFVEGCYLHTAIVMTYSTERLRKCLFLFIGWCIPFPIIVAWAIGKLYYENEQCWFGKEPGDLVDYIYQGPIILVLLINFVFLFNIVRILMTKLRASTTSETIQYRKAVKATLVLLPLLGITYMLFFVNPGEDDLSQIMFIYFNSFLQSFQGFFVSVFYCFFNGEVRSAVRKRWHRWQDHHSLRVPMARAMSIPTSPTRISFHSIKQTAAV

SEQ ID NO: 2117 - DNA, 536 bp, Homosapiens
gccactactggcatgaggggtccctcagggcccccaggcctcctctacgtcccacacctcctcctctgcctgctctgcctcctcccaccgccgctccaatacgcagccgggcagagccagatgcccaaagaccagcccctgtgggcacttctggagcagtactgccacaccatcatgaccctcaccaacctctcaggctggtcttgaattcctgtgctcaagcaatctgcctaccttggcttccccaagtgctgagattatgggtgtgagccactgcacctggccaagaatccgaatggattcaaagataccttgaaataattcctcaatgcaacacacacacatatgccagggttggtcaaatgggaagagagccttggcctgaagacagggacctgggctttcctcagctcttctgccaagtcacgccgggcgcgcactcccactccctctccgcacgcggctgcgggacgcgatggacgcggcactgctccacagcctgctggaggccaactgcagcctggcgctggctgaag

SEQ ID NO: 2118 - protein, 64 aa, Homosapiens
MRGPSGPPGLLYVPHLLLCLLCLLPPPLQYAAGQSQMPKDQPLWALLEQYCHTIMTLTNLSGWS

SEQ ID NO: 2119 - DNA, 718 bp, Homosapiens
gggctctcctgggctgccttccctcccgactgcctgctccaggtctcatcgtctcaggacccgggaaaaagtcccattgccatgaaggccccgtgagaggaaggctgggctttggcgtcagaaaggccgaggtttaagtgctctccagctgcttacatgctgagtggctgtggatgctcttgctgcctcttcccattccctcagcatgctggctgaacttcccacagccagcacctgtgagtcttcactcgaggcttctctcttgggctgcactgtccaaatacaggttgccctccaactggctgaggacccctcggtgccttcccactcttcagtcatggtaggtacacccctgcccttccagcctttcccaccaggagtttcacagcctcctggaaccagcgcctgcctctcagggaggtgctcagattcctcacagatgaagccagagacacagtgtgagcttttctggctggagtttatctgcttgatacattaccaaaatcataagaacgcaacaggatcaccagggccaggtctcacgggttcctgcttcgacatggtgttttgagtgtaggggctgctggaggcagggagggagagacttacacagagggacacagacacagaatgagagagacagacaggcaaagagacaaacggagacaaagacagaggcaaagagagatcaagggtctgcaatatttcaaggatgttt

SEQ ID NO: 2120 - protein, 121 aa, Homosapiens
MLAELPTASTCESSLEASLLGCTVQIQVALQLAEDPSVPSHSSVMVGTPLPFQPFPPGVSQPPGTSACLSGRCSDSSQMKPETQCELFWLEFICLIHYQNHKNATGSPGPGLTGSCFDMVF

SEQ ID NO: 2121 - DNA, 2559 bp, Homosapiens
acatttcagggacaccatgaagggtggcttcactgggggtgatgagtaccagaagcacttcctgcccagggactacttggctacttactacagcttcgatggcagcccctcacccgaggccgagatgctgaagtttaacttggaatgtctccacaagaccttcggccctggaggcctccaaggggacacgctgattgacattggctcaggtcctaccatctaccaagttcttgctgcctgtgattccttccaagacatcactctctccgactttaccgaccgcaaccgggaggagctggaaaagtggctgaagaaggagccgggggcctatgactggaccccagcggtgaaattcgcctgtgagctggaaggaaacagcggccgatgggaggagaaggaggagaagctgcgggcagcggtgaagcgggtgctcaagtgcgatgtccacctgggcaacccgctggccccggctgtgttgcctctcgccgactgtgtgctcaccctgctggccatggagtgtgcctgctgtagccttgatgcctaccgcgctgccctgtgcaaccttgcctcactgctcaagccgggtggccacctggtgaccactgtcacgcttcggctcccgtcctacatggtggggaagcgtgaattttcctgcgtggccctggagaaagaggaggtggagcaggctgtcctggatgctggctttgacattgaacagctcctacacagtccccagagctactctgtcaccaatgctgccaacaatggggtctgcttcattgtggctcgcaagaagcctgggccctgagccaggagggccagccagaggtctggtcaggctgtgaggccttggccatctgtatgctagagaggggtgaggaatggatactgtctaacagtctctgatttcaacactaacattccatcttctgaaattctgagattctaacatccttgttttagaattctaagtttccaacattcctcattctaggatcctaggagtggaattttccattttctaatatactaagccttacagctatcttagatgcgatctgactcctgtgtgactgtggagcacccagggacgtggttttagagtctacctaatatgttaaggacaaggaaacctctgagtctacctaatatgttaaggacaaggaaacctctggacagtggtatattggggaattttttttttttttttgagacggagtctggctctgtcacccaggctagagtgcaatggcacgatctcggctcactgcaagctctgcgtcctgggttgacgccattctcctgcctcagcctcccgagtagctgggactacaggagctcgccaccacacccagctaatttttttttttttttttttatttgagacggagtttcgctctgtcgcccaggctggagtgcagtggcgcgatctcgactcactgcaagctccgcctcccgggttcacgccattctcctgcctcagcctcccgtgtagctgggactacaggcacgcgccaccatgcccggctaatttttgtatttttagtagagatggggtttcaccgtgttagccaggatggtctcgatctcctgacctggtgatccacccaccttggcctcccaaagtgctgggattacaggcgtgagccaccgcacccagccagggggaatgttctataaccagctctgtaaaggaaaagcactgatgtgtggtagtcaccaatttctgtggtgtaaatactcccaccatggttgatttcaagccaccagtggtttaataaccagctcataaatctcctaaatattttacagttgactctcatgagctgattggagtcagctggaacataccactgcctctagactaaggtcagcagatttagcaaatacagactgccccagttcattgaattttagataaatgaaataaatctataaggttaagtatgtccccagaactgcatggaacatgcttaatctaaacaatgatttgttgttcacctgaaattcaaatttagctgggtgtcctgtatttcatctggcaaccctacttcagacccaggtgtaaggtacatggatgtgctttggtcaaggaataggccaaggcagagatccatgcctgcatgactcagtgggtttggtgcacaggcacacacctccacttgttatataacctgtttgtgtaagttcatacttggtctgagccactgttgtctgtaaaaggtaattgtcctgctaatgctgtacaggggctcttggggttcggctcagctcaacatggcttgacatggtgggcacactggcgcccagtaagagagagagagagccaaagctgtccgttttgcagatggacaggaaggagccaggacacagctcagcttgctcacgcccagagagagaaaaagttaagctgctgaccctgaaggcaagggagagcaggctgcacagctgtgtgtggaagccacgggctcaagcagccaaggcagggcggacagtgtgagagagctagtgtaagctgttgatgagagctgttgctgaataaaaccatattcacctgcc

SEQ ID NO: 2122 - protein, 263 aa, Homosapiens; identical to SEQ ID NO: 226

SEQ ID NO: 2123 - DNA, 1430 bp, Homosapiens
atactgcgccggacagacccagttgcctggtgctgcggcccggcgtgggcctcgtgggcagagccagagccagagccatggacagcctcttcgtggaggaggtggccgcctccttggtcagggagttcctcagcagaaagggcttaaagaagacatgtgtgaccatggaccaggaacgcccacgctctgacctcagcataaacaacagaaatgatcttcgaaaggttttgcatcttgaatttctctataaggagaacaaggcaaaggaaaatcctctaaaaacaagccttgaactcatcaccagatactttctggatcactttggaaatacggctaacaatttcactcaagataccccaatccctgcactctcagttccaaagaaaaataacaaagtgccatcaagatgctcagagactacactggtaaatatatatgacctttcagatgaagatgcaggatggagaacatcattgtcagaaacaagcaaagccagacatgacaatcttgatggagatgtacttggtaattttgtatcatctaaaaggcccccgcacaaaagtaagcccatgcagacggtcccgggtgaaactcctgtgttgacttctgcatgggagaagatagacaagcttcactcggagccttccttggatgtgaagaggatgggagagaattccaggccaaagtctggtctgattgtgcgaggcatgatgtctgggcccatcgccagctccccacaggattcttttcacagacactatctgagacggtcctcaccgtcaagcagctccacccaaccccaagaagagagccggaaggtccctgagctctttgtctgcacccaacaggacattctggcttcgagcaacagctccccctccaggacctccctgggtcagcttagtgaactgaccgtagaaaggcagaaaaccactgccagcagccctccccatctgcccagcaaacggctgcccccatgggacagggccaggccgagggatccctccgaggacaccccagcagtggacggcagcacagacacggacaggatgcccttgaagctctacttgcctggtggtaattccaggatgacccaggagaggctggaaagagcgttcaaacggcagggcagccagcccgcacctgtcaggaaaaatcagttgctgccgtctgacaaggtggatggtgagctgggtgccctgcggctcgaggatgtggaggatgagttgataagggaagaggtcatcctgtcgccagtcccatcagtgctcaagttgcagacagcatcaaaaccaattgacctctcagtagcaaaggaaataaagacccttctgtttggttccagcttttgctgtttcaatgaagaatggaaacttcagagtttttcctttagtaacacagcctcattaaaatacggcatagtgcagaac

SEQ ID NO: 2124 - protein, 450 aa, Homosapiens
MDSLFVEEVAASLVREFLSRKGLKKTCVTMDQERPRSDLSINNRNDLRKVLHLEFLYKENKAKENPLKTSLELITRYFLDHFGNTANNFTQDTPIPALSVPKKNNKVPSRCSETTLVNIYDLSDEDAGWRTSLSETSKARHDNLDGDVLGNFVSSKRPPHKSKPMQTVPGETPVLTSAWEKIDKLHSEPSLDVKRMGENSRPKSGLIVRGMMSGPIASSPQDSFHRHYLRRSSPSSSSTQPQEESRKVPELFVCTQQDILASSNSSPSRTSLGQLSELTVERQKTTASSPPHLPSKRLPPWDRARPRDPSEDTPAVDGSTDTDRMPLKLYLPGGNSRMTQERLERAFKRQGSQPAPVRKNQLLPSDKVDGELGALRLEDVEDELIREEVILSPVPSVLKLQTASKPIDLSVAKEIKTLLFGSSFCCFNEEWKLQSFSFSNTASLKYGIVQ

SEQ ID NO: 2125 - DNA, 2728 bp, Homosapiens
tgcgccggacagacccagttgcctggtgctgcggcccggcgtgggcctcgtgggcagagccagagccagagccatggacagcctcttcgtggaggaggtggccgcctccttggtcagggagttcctcagcagaaagggcttaaagaagacatgtgtgaccatggaccaggaacgcccacgctctgacctcagcataaacaacagaaatgatcttcgaaaggttttgcatcttgaatttctctataaggagaacaaggcaaaggaaaatcctctaaaaacaagccttgaactcatcaccagatactttctggatcactttggaaatacggctaacaatttcactcaagataccccaatccctgcactctcagttccaaagaaaaataacaaagtgccatcaagatgctcagagactacactggtaaatatatatgacctttcagatgaagatgcaggatggagaacatcattgtcagaaacaagcaaagccagacatgacaatcttgatggagatgtacttggtaattttgtatcatctaaaaggcccccgcacaaaagtaagcccatgcagacggtcccgggtgaaactcctgtgttgacttctgcatgggagaagatagacaagcttcactcggagccttccttggatgtgaagaggatgggagagaattccaggccaaagtctggtctgattgtgcgaggcatgatgtctgggcccatcgccagctccccacaggattcttttcacagacactatctgagacggtcctcaccgtcaagcagctccacccaaccccaagaagagagccggaaggtccctgagctctttgtctgcacccaacaggacattctggcttcgagcaacagctccccctccaggacctccctgggtcagcttagtgaactgaccgtagaaaggcagaaaaccactgccagcagccctccccatctgcccagcaaacggctgcccccatgggacagggccaggccgagggatccctccgaggacaccccagcagtggacggcagcacagacacggacaggatgcccttgaagctctacttgcctggtggtaattccaggatgacccaggagaggctggaaagagcgttcaaacggcagggcagccagcccgcacctgtcaggaaaaatcagttgctgccgtctgacaaggtggatggtgagctgggtgccctgcggctcgaggatgtggaggatgagttgataagggaagaggtcatcctgtcgccagtcccatcagtgctcaagttgcagacagcatcaaaaccaattgacctctcagtagcaaaggaaataaagacccttctgtttggttccagcttttgctgtttcaatgaagaatggaaacttcagagtttttcctttagtaacacagcctcattaaaatacggcatagtgcagaacaagggtggtccttgcggagtcctggcagctgtccaaggctgtgtcctacagaaactcctgtttgaaggagatagcaaagccgactgtgctcagggactgcagccttcagatgcccaccggacccgctgcctcgtcctggccctcgcagacattgtgtggcgggcagggggccgagagagagccgttgttgcactggcttcgagaacacagcagttcagtccaacagggaaatacaaagcagatggagtcttagaaacacttacgcttcacagtttgacctgctatgaggacctggtgacttttcttcaacaaagcattcatcagtttgaagtgggcccctatggctgcatcctgctcaccctttctgccatcctgtccaggtctacagagctcatccgccaggactttgatgtccccaccagccacctgattggagcacatggctactgtacacaggaacttgtcaatctgctcctgactgggaaagctgtgtccaacgttttcaacgatgtggttgagctggattctggggatgggaacatcacacttctcagaggcattgctgcacgcagtgatattggcttcttatctctctttgagcattacaacatgtgccaggttggctgcttcctgaagaccccgaggttccccatctgggtggtttgcagtgagagccacttcagcatcctctttagcctgcagccggggctcctgcgtgactggaggactgagaggctctttgacttgtactactacgatggcctggccaaccagcaggagcagatccggctgaccattgacaccacccaaaccatctctgaggacacagacaacgaccttgtcccacccctcgagctctgcatcagaaccaagtggaagggggcatcagtgaactggaacggctcagaccccatcctgtgaccgttggatgtgggtaaaccctgtggtccaccactcatcacctcatcaccgaggatgacagctgaaccccaagcctctggggcaggtctcatgtaccccaacctgggtcagcatgactgcagaagcatccagagcctccctgccccttccatgaagggcccacccaagactgtgctggggacccagtgtgttgctgggtcccctcccagctgagctgtgactgctgagtactggaaggaggttgccagggtctctgctacctttgtctgcatccctcccttgctccctgctgggtggtccctcacccaggcctccaatgtggttggccctggggactcattacttctggtagctggctttctataaaaatgggtcaaaccc

SEQ ID NO: 2126 - protein, 757 aa, Homosapiens
MDSLFVEEVAASLVREFLSRKGLKKTCVTMDQERPRSDLSINNRNDLRKVLHLEFLYKENKAKENPLKTSLELITRYFLDHFGNTANNFTQDTPIPALSVPKKNNKVPSRCSETTLVNIYDLSDEDAGWRTSLSETSKARHDNLDGDVLGNFVSSKRPPHKSKPMQTVPGETPVLTSAWEKIDKLHSEPSLDVKRMGENSRPKSGLIVRGMMSGPIASSPQDSFHRHYLRRSSPSSSSTQPQEESRKVPELFVCTQQDILASSNSSPSRTSLGQLSELTVERQKTTASSPPHLPSKRLPPWDRARPRDPSEDTPAVDGSTDTDRMPLKLYLPGGNSRMTQERLERAFKRQGSQPAPVRKNQLLPSDKVDGELGALRLEDVEDELIREEVILSPVPSVLKLQTASKPIDLSVAKEIKTLLFGSSFCCFNEEWKLQSFSFSNTASLKYGIVQNKGGPCGVLAAVQGCVLQKLLFEGDSKADCAQGLQPSDAHRTRCLVLALADIVWRAGGRERAVVALASRTQQFSPTGKYKADGVLETLTLHSLTCYEDLVTFLQQSIHQFEVGPYGCILLTLSAILSRSTELIRQDFDVPTSHLIGAHGYCTQELVNLLLTGKAVSNVFNDVVELDSGDGNITLLRGIAARSDIGFLSLFEHYNMCQVGCFLKTPRFPIWVVCSESHFSILFSLQPGLLRDWRTERLFDLYYYDGLANQQEQIRLTIDTTQTISEDTDNDLVPPLELCIRTKWKGASVNWNGSDPIL

SEQ ID NO: 2127 - DNA, 3586 bp, Homosapiens
agtccaatatgcaaagcaaagaagggaaaatgccctatttgaagtggggaaaaggaggtcttgctttatcgtctagcctctcagcgtccagctttaaaccactgatcaattcccttctctcaggagggggagctgtgagccagagagagttggctatccaaggtctcacagtcggttaccaggtagggatgaggctagaaccaggtgttttgattcccaattctattgtaggagtgatgatcaagcatattttaactgtaatccttttttcaaatgagacttcagcagattggattcgtatggtggtaggaccaaggctattttttaagacacccagaagatccactgaaccacttgaaaactacgcaagtacatgtcataggccagggaggaacctatgccaggcatctctcaataaagtaaaggatggaatttcaggcaaacatataaactaaaaacaactggcacctacaggagcactcaggttgccagaaattctcttgctcccctttgaggagaagtaggcaatggcagccccgtgaagtctatcagaggctcagtgaagacatcaaatagaaggcctttgtcctctgggtcctggggtgacatgcaggcacctctgtctcctgtcctgtagcaagtactttctaagtcctgtggaaagactggtgacccaggcagcagatgctctgcaatcctccgtctgctgtattctaaggcaggagagtggactgtacactttaggagaattttgcgcagagagtgagacaactacccagaaaattcagttaaccattctggttacattgggcttttaacgtaaatgtaccttacctaatttcccaaaagtgtctttgacattcaagctatttttattccctcattgtaatatagtctccctaaagtagttgttatcttaagatacttaagatattttcatgagatactgataagtgccctgatttatacagcagttattagctgttatacaatgaatcggagtgtatattttacaggaaaattactcattaatatctactacataataattttgacattcattcagcacaaagctcgcctgattccaggaaagccctgcaatttaatgttaatatttctagtaacttgttctaacctcttaggtataggatagataaaaatgcctatgtaaattgagattttgaaaaacaatatctagattcatataaaggctgtgtctgttgtgagccaagtgatgtgaaaaagcataagggatagtcaggcaattcaggggcttaagtctctcttactgagagaaaaagcaagaaggctacaataaatataggatctttcccctaactctctttattgtaagcttcatttaatcttagacaaaatagtttttgtttttaatctcttactgaaaagaatagtaaaactgtcccgggttttgtctgatgaatctgttgagtttggttgtagtccatgggctgtgggtcttagtcctggagtcctgctgcatggatgagaggagtaggaagggggaggacttggcatgccctgagggcctgctctgccagactccttgtcaggtgcctggctagtctgcaaaatcacagagtgccccatgtccagccacggctcggcaagactgggtgtcactgggcgagtgggttggggactgacacatggctgggtccctgaggccagcctgcatattgctgcatgcatagctgtgtttatccaaattacttaggggaatttaaatccttgctgttgtggtgtagtaagtgtcagtaaggtgagagaatctgtatttttaaaaaacatccaaagggaatatttgatataggcaaggatggaaaatactggtatcgtttaattccaaaacctactactgaagactttcatttgccttttgtttttaaggttggggtgtaaagtgagtcagtcctgactgcctctctgtgctcttcacattgacctgcttcagttgtctctatcatcgctggtgtcagtgttagatgcagagcttacaagctaaaaaaatattcaggctgcaaatacttatgaatctgtagggttagtgttccctacagactccgttttttaaatgaagggatatatattttataaagttattccttggagcaaaaaatgaagaggaaatttgcttaggcatgcctctattcctatcacattttattctagttgtttattgaatcacctgcctcatgcgttggatgctagttcttttagggtagagattttgtttttgtctctgtgtccgtacccaacatagtacctgacatatataatatgtggccagtaaatgttggctgaaagcttgtatgaatgagtgagaagttgataaacttagtcaaagaagtggaatagttgtcttttccactcttccctgaagctgtatataaattaatgatttttttttctctcccaatgataggcaaaggaaaatcctctaaaaacaagccttgaactcatcaccagatactttctggatcactttggaaatacggctaacaatttcactcaagataccccaatccctgcactctcagttccaaagaaaaataacaaagtgccatcaagatgctcagagactacactggtaaatatatatgacctttcagatgaagatgcaggatggagaacatcattgtcagaaacaagcaaagccagacatgacaatcttgatggagatgtacttggtaattttgtatcatctaaaaggcccccgcacaaaagtaagcccatgcagacggtcccgggtgaaactcctgtgttgacttctgcatgggagaagatagacaagcttcactcggagccttccttggatgtgaagaggatgggagagaattccaggccaaagtctggtctgattgtgcgaggcatgatgtctgggcccatcgccagctccccacaggtggggctgttgctctttctgttgttatgggactggaggctgagaactgggctgggcttaaggcacgcctgggtttatttggggtaccccacagggcagtccgagaagagggtctgtgtgtggggtgggaagaacagtgcctctgttttctccctggctctactgtcaatgacacgtggggccttgagcaggcctcctttcctgcccttagcttacccattttgtttgtgaggtggatgccatggttttctgttcctctgctgggtaagaatacctactcagctttgtctttgcagttcaggagtggagaacctatccaggttcagagagcatctttaggctgagtgtggtggcttacacctgtaatcccaatgctttgggaggccaaggtggaagaattgcttgagcctaggaatttgagaccagcctgggcaacataaggagacacttgtcccaccgccccatctctacaaaaaatcaaaaagttaggcaggtggggtgatgtgcatctgtagtcctagctactcaggaggctgagtggggaggattgcttgaacctgggaggttgaggctacagtgagctgtgatcatgtgactgtactctggcctgggcaagactgagaccctgtctcaaaaagaaaaaaaaaaaaaaaaaggaaaaaa

SEQ ID NO: 2128 - protein, 55 aa, Homosapiens
MTFQMKMQDGEHHCQKQAKPDMTILMEMYLVILYHLKGPRTKVSPCRRSRVKLLC

SEQ ID NO: 2129 - DNA, 547 bp, Homosapiens
tcttctatgaacttcttaagttaaggaaagacctcatacttcattctccccttccaaattccaagcaaagtcaagaatccatctcaattcttatttattggaataattctgagcaaaactcaaaaaggtagggacacagacaagtcacccctatactcaggcagctgacagtccagcaggaggaacaaagtagcctgtcaactctctccagcgtgacatgtgccatgagaggtctgagaaacagatcatgtccaagtataggtacagtgaagagatcaggaaaggcttcttgaagaaggcaacattccagacgacttaaagatggggcatcacagttgggacaggtatgactccaggaattcagagtctgaaatcaagtctacccaaaaccaaaggatctgtaacatgaagagcaagacatcatatgttggttagtgacatctgtgatggaggctttaagtgaatacaggaggagcatgcctatttaaaaagaaagctttaaacattaactacaagggaaaacagagtttatgaaaataactttgct

SEQ ID NO: 2130 - protein, 37 aa, Homosapiens
MGHHSWDRYDSRNSESEIKSTQNQRICNMKSKTSYVG

SEQ ID NO: 2131 - DNA, 857 bp, Homosapiens
ccctgccttatccacctccctgccagccgcctctctgatatcagtgactcgcccatggggtgcagccctcccctgttggggccacacaggatgctggaattctggggtctcaggcccagagctgccgtagggccacctgaaccctgacgactccagcggtaccggccagcctttcactcacatacagcttacgcttcacagtttgacctgctatgaggacctggtgacttttcttcaacaaagcattcatcagtttgaagtgggcccctatggctgcatcctgctcaccctttctgccatcctgtccaggtctacagagctcatccgccaggactttgatgtccccaccagccacctgattggagcacatggctactgtacacaggtcagggggcgctgtggggcccaggtggtccttccccctcctctgtccctcagagagggagaggtcctcctccctcctcttgccccagaaaaagacaagtctttcttgcctctgccaacactcttcaagcagctttcacgtgcccacctctgctgggtttcactgtcatgtcatggagacccagaaagagagctcagtttagcttctgtttctggacagctttatgtgcactgatgtatgtgctcagagctgcagaggatgcaaaagaggctgaactcagaccaaagtgctacacagcccggagcccaggacacagggagtgatgtctcaggcatgggccaggggaccctgggtccagctggggagatgatggccctggcctcttctatgtttgcacaaggtattgtctttatagccacccttccctttgcatctttacagaggggccctcaatggacctcacaggggcaaa

SEQ ID NO: 2132 - protein, 77 aa, Homosapiens
MCSELQRMQKRLNSDQSATQPGAQDTGSDVSGMGQGTLGPAGEMMALASSMFAQGIVFIATLPFASLQRGPQWTSQG

SEQ ID NO: 2133 - DNA, 3016 bp, Homosapiens
tgtctcaagaatgtgcaccataagccaaggaaataggccaggtgggtcttcattattcttattttgcaaagaggaaactgagggcagcataaatgaagtggctggcctgagatcacagaatgaagacgaggttgatttaacattgttgttgattcattcattccattcctacttccaaaaaaagactggaagttgctttgaaaagtaaatgatgtcctcagggctctgctgtgcccccgcatagtcagcttgccctctcttgcctgtggacctttgcacgtgcttctccttttggagcgacgttcacttttctgattccttactgtcccttaggtttctgttcagacatcgctttctccaaaaacccttccttgatactccctccccgaacttgaagtctgtgttgaaggcccttcctgtgtgtttttgaaggagcctgcatttctgtcatggcagaaccccttctcccagccttttcaaggtgcttattgttttttcttccctaagttatttccccaagaggagagatccatatccaccttttaacaagtacagccttagccaggagcatcctcttggcacagaaatttcaccaatacaatctttttaaaaagactaattgaccaagtgaattcctggatgacaataaagagtatattttgaggaaaagaaaaggtaattttatcagaagcttgagctgcaatagttaccatagtagagcaccatatttggctctgagcttcctggcagccaaggcaaaaatgtaaacatggtaagttttataattttcattgtctgttccaggagaaacaagttgggattttttttttctaattttaagtccaaaatgtgattacacataaggaacactgactattataacaggcggtgtcttcagtcacagttcatggtttccaaagtggaatgagtgaggccttcacactgacttgaaggtggggatggtgtttctccggggagcagaagtgacatggccgatcccagtaggctgtggcccactgggcttactggacagatgggcagggcagagccagctttgttttaacagctaacacaggtgccaggccctgtttgaaatgctttataaggattaactcacgtaattttcacaacttgataagggtaggtgctgtgattattaccctctttttacagatgagaagactgaggatagaggagtccaggagtgtttccatggtcacatagcaaggagtggcagagcgaggatttaaattaggcggtcaggccccgggacaccagctccaaaccagagttgggaggaggactcactttggatgcaaaatctaagggggtgccaaaaatctcagaaattagcaaaacctatcttttttaaaaatcagagtttatcagaaaaatccacaatgaacaaaataccaaaatgttgatgttttaaaaatatatatatatatatataaatttaagacatgcatctacatggctgcctccttcgcctcaccagatcctgactctgctccaaacctgctctctgctgctcttagcacagcacagttcttctgagtaagggatctggaattagagatccctggagtcccagtgtgctgctgacaagctgtgtggccttgaactggtcactcagtttctgagcctcagttccacatatgctagagggcagtaatcatagtactgtcccccaggactgttagagtgttcggggtgataatgcccattagatgcttgcaccataatggagctggccatgactgttgctgtcttgtgagttttgaggactctgaggtcactgatgctctctttggtggcccctgcatcaccctcgctctgctgtcattgtcattcaggttgttgcaatgtcccatcctttaggaggtcagccttcgggccacccagcaaccccagggctgggctggaggcagttggctcagggcaggctgctccctggggtgtggctcccacagaggtgtggggctgggaagagggaggtgcaaatgggatggagctcatttttctctccccctcccagtttgaagtgggcccctatggctgcatcctgctcaccctttctgccatcctgtccaggtctacagagctcatccgccaggactttgatgtccccaccagccacctgattggagcacatggctactgtacacaggaacttgtcaatctgctcctgactgggaaagctgtgtccaacgttttcaacgatgtggttgagctggattctggggatgggaacatcacacttctcagaggcattgctgcacgcagtgatattggcttcttatctctctttgagcattacaacatgtgccaggttggctgcttcctgaagaccccgaggttccccatctgggtggtttgcagtgagagccacttcagcatcctctttagcctgcagccggggctcctgcgtgactggaggactgagaggctctttgacttgtactactacgatggcctggccaaccagcaggagcagatccggctgaccattgacaccacccaaaccatctctgaggacacagacaacgaccttgtcccacccctcgagctctgcatcagaaccaagtggaagggggcatcagtgaactggaacggctcagaccccatcctgtgaccgttggatgtgggtaaaccctgtggtccaccactcatcacctcatcaccgaggatgacagctgaaccccaagcctctggggcaggtctcatgtaccccaacctgggtcagcatgactgcagaagcatccagagcctccctgccccttccatgaagggcccacccaagactgtgctggggacccagtgtgttgctgggtcccctcccagctgagctgtgactgctgagtactggaaggaggttgccagggtctctgctacctttgtctgcatccctcccttgctccctgctgggtggtccctcacccaggcctccaatgtggttggccctggggactcattacttctggtagctggctttctataaaaatgggtcaaaccc

SEQ ID NO: 2134 - protein, 277 aa, Homosapiens
MLSLVAPASPSLCCHCHSGCCNVPSFRRSAFGPPSNPRAGLEAVGSGQAAPWGVAPTEVWGWEEGGANGMELIFLSPSQFEVGPYGCILLTLSAILSRSTELIRQDFDVPTSHLIGAHGYCTQELVNLLLTGKAVSNVFNDVVELDSGDGNITLLRGIAARSDIGFLSLFEHYNMCQVGCFLKTPRFPIWVVCSESHFSILFSLQPGLLRDWRTERLFDLYYYDGLANQQEQIRLTIDTTQTISEDTDNDLVPPLELCIRTKWKGASVNWNGSDPIL

SEQ ID NO: 2135 - DNA, 3422 bp, Homosapiens
tgtctcaagaatgtgcaccataagccaaggaaataggccaggtgggtcttcattattcttattttgcaaagaggaaactgagggcagcataaatgaagtggctggcctgagatcacagaatgaagacgaggttgatttaacattgttgttgattcattcattccattcctacttccaaaaaaagactggaagttgctttgaaaagtaaatgatgtcctcagggctctgctgtgcccccgcatagtcagcttgccctctcttgcctgtggacctttgcacgtgcttctccttttggagcgacgttcacttttctgattccttactgtcccttaggtttctgttcagacatcgctttctccaaaaacccttccttgatactccctccccgaacttgaagtctgtgttgaaggcccttcctgtgtgtttttgaaggagcctgcatttctgtcatggcagaaccccttctcccagccttttcaaggtgcttattgttttttcttccctaagttatttccccaagaggagagatccatatccaccttttaacaagtacagccttagccaggagcatcctcttggcacagaaatttcaccaatacaatctttttaaaaagactaattgaccaagtgaattcctggatgacaataaagagtatattttgaggaaaagaaaaggtaattttatcagaagcttgagctgcaatagttaccatagtagagcaccatatttggctctgagcttcctggcagccaaggcaaaaatgtaaacatggtaagttttataattttcattgtctgttccaggagaaacaagttgggattttttttttctaattttaagtccaaaatgtgattacacataaggaacactgactattataacaggcggtgtcttcagtcacagttcatggtttccaaagtggaatgagtgaggccttcacactgacttgaaggtggggatggtgtttctccggggagcagaagtgacatggccgatcccagtaggctgtggcccactgggcttactggacagatgggcagggcagagccagctttgttttaacagctaacacaggtgccaggccctgtttgaaatgctttataaggattaactcacgtaattttcacaacttgataagggtaggtgctgtgattattaccctctttttacagatgagaagactgaggatagaggagtccaggagtgtttccatggtcacatagcaaggagtggcagagcgaggatttaaattaggcggtcaggccccgggacaccagctccaaaccagagttgggaggaggactcactttggatgcaaaatctaagggggtgccaaaaatctcagaaattagcaaaacctatcttttttaaaaatcagagtttatcagaaaaatccacaatgaacaaaataccaaaatgttgatgttttaaaaatatatatatatatatataaatttaagacatgcatctacatggctgcctccttcgcctcaccagatcctgactctgctccaaacctgctctctgctgctcttagcacagcacagttcttctgagtaagggatctggaattagagatccctggagtcccagtgtgctgctgacaagctgtgtggccttgaactggtcactcagtttctgagcctcagttccacatatgctagagggcagtaatcatagtactgtcccccaggactgttagagtgttcggggtgataatgcccattagatgcttgcaccataatggagctggccatgactgttgctgtcttgtgagttttgaggactctgaggtcactgatgctctctttggtggcccctgcatcaccctcgctctgctgtcattgtcattcaggttgttgcaatgtcccatcctttaggaggtcagccttcgggccacccagcaaccccagggctgggctggaggcagttggctcagggcaggctgctccctggggtgtggctcccacagaggtgtggggctgggaagagggaggtgcaaatgggatggagctcatttttctctccccctcccagtttgaagtgggcccctatggctgcatcctgctcaccctttctgccatcctgtccaggtctacagagctcatccgccaggactttgatgtccccaccagccacctgattggagcacatggctactgtacacaggaacttgtcaatctgctcctgactgggaaagctgtgtccaacgttttcaacgatgtggttgagctggattctggggatgggaacatcacacttctcagaggcattgctgcacgcagtgatattggcttcttatctctctttgagcattacaacatgtgccaggttggctgcttcctgaagaccccgaggttccccatctgggtggtttgcagtgagagccacttcagcatcctctttagcctgcagccggggctcctgcgtgactggaggactgagaggctctttgacttgtactactacgatggcctggccaaccagcaggagcagatccggctgaccattgacaccacccaaaccatctctgaggacacagacaacgaccttgtcccacccctcgagctctgcatcagaaccaagtggaagggggcatcagtgaactggaacggctcagaccccatcctgtgaccgttggatgtgggtaaaccctgtggtccaccactcatcacctcatcaccgaggatgacagctgaaccccaagcctctggggcaggtctcatgtaccccaacctgggtcagcatgactgcagaagcatccagagcctccctgccccttccatgaagggcccacccaagactgtgctggggacccagtgtgttgctgggtcccctcccagctgagctgtgactgctgagtactggaaggaggttgccagggtctctgctacctttgtctgcatccctcccttgctccctgctgggtggtccctcacccaggcctccaatgtggttggccctggggactcattacttctggtagctggctttctataaaaatgggtcaaacccatgtcaagggcccaggctcatttgttctacagctgcaaagagcgtgatgtgcactgtctgtgctgatcatggctggtatggagaatgtggtagggtgattcgccccagagcccttgtgaggccccaggagaatggaggtggacctggagggtaagctggacctggccaagtagatgtgggaaaagagccttccaaggaggagggacctcttggccatggggggacaataggacagggataaacagagggactggggactaggtgaggtccttggtacctgtaggggagcatgtggggagagggctgtctgaaaatctggatgggcagagcctgtggagccctcacattccagaacaaagatggcaaagttgaaataggaaaagtgcaataatcactcatgaagggg

SEQ ID NO: 2136 - protein, 277 aa, Homosapiens; identical to SEQ ID NO: 2134

SEQ ID NO: 2137 - DNA, 1683 bp, Homosapiens
agctctcagagggaattgagcacccggcagcggtctcaggccaagccccctgccagcatggccagcgagttcaagaagaagctcttctggagggcagtggtggccgagttcctggccacgaccctctttgtcttcatcagcatcggttctgccctgggcttcaaatacccggtggggaacaaccagacggcggtccaggacaacgtgaaggtgtcgctggccttcgggctgagcatcgccacgctggcgcagagtgtgggccacatcagcggcgcccacctcaacccggctgtcacactggggctgctgctcagctgccagatcagcatcttccgtgccctcatgtacatcatcgcccagtgcgtgggggccatcgtcgccaccgccatcctctcaggcatcacctcctccctgactgggaactcgcttggccgcaatgacctggctgatggtgtgaactcgggccagggcctgggcatcgagatcatcgggaccctccagctggtgctatgcgtgctggctactaccgaccggaggcgccgtgaccttggtggctcagccccccttgccatcggcctctctgtagcccttggacacctcctggctattgactacactggctgtgggattaaccctgctcggtcctttggctccgcggtgatcacacacaacttcagcaaccactggattttctgggtggggccattcatcgggggagccctggctgtactcatctacgacttcatcctggccccacgcagcagtgacctcacagaccgcgtgaaggtgtggaccagcggccaggtggaggagtatgacctggatgccgacgacatcaactccagggtggagatgaagcccaaatagaaggggtctggcccgggcatccacgtagggggcaggggcaggggcgggcggagggaggggaggggtgaaatccatactgtagacactctgacaagctggccaaagtcacttccccaagatctgccagacctgcatggtcaagcctcttatgggggtgtttctatctctttctttctctttctgtttcctggcctcagagcttcctggggaccaagatttaccaattcacccactcccttgaagttgtggaggaggtgaaagaaagggacccacctgctagtcgcccctcagagcatgatgggaggtgtgccagaaagtcccccctcgccccaaagttgctcaccgactcacctgcgcaagtgcctgggattctaccgtaattgctttgtgcctttgggcacggccctccttcttttcctaacatgcaccttgctcccaatggtgcttggagggggaagagatcccaggaggtgcagtggagggggcaagctttgctccttcagttctgcttgctcccaagcccctgacccgctcggacttactgcctgaccttggaatcgtccctatatcagggcctgagtgacctccttctgcaaagtggcagggaccggcagagctctacaggcctgcagcccctaagtgcaaacacagcatgggtccagaagacgtggtctagaccagggctgctctttccacttgccctgtgttctttccccaggggcatgactgtcgccacacgccttctgcatatatgtctctttggagttggaatttcattatatgttaagaaaataaaggaaaatgacttgtaaggtc

SEQ ID NO: 2138 - protein, 269 aa, Homosapiens; identical to SEQ ID NO: 230

SEQ ID NO: 2139 - DNA, 1927 bp, Homosapiens
agctctcagagggaattgagcacccggcagcggtctcaggccaagccccctgccagcatggccagcgagttcaagaagaagctcttctggagggcagtggtggccgagttcctggccacgaccctctttgtcttcatcagcatcggttctgccctgggcttcaaatacccggtggggaacaaccagacggcggtccaggacaacgtgaaggtgtcgctggccttcgggctgagcatcgccacgctggcgcagagtgtgggccacatcagcggcgcccacctcaacccggctgtcacactggggctgctgctcagctgccagatcagcatcttccgtgccctcatgtacatcatcgcccagtgcgtgggggccatcgtcgccaccgccatcctctcaggcatcacctcctccctgactgggaactcgcttggccgcaatgacctggctgatggtgtgaactcgggccagggcctgggcatcgagatcatcgggaccctccagctggtgctatgcgtgctggctactaccgaccggaggcgccgtgaccttggtggctcagccccccttgccatcggcctctctgtagcccttggaatcgtccctatatcagggcctgagtgacctccttctgcaaagtggcagggaccggcagagctctacaggcctgcagcccctaagtgcaaacacagcatgggtccagaagacgtggtctagaccagggctgctctttccacttgccctgtgttctttccccaggggcatgactgtcgccacacgcctctgtgtacatgtgtgcagagcagacaggctacaaagcagagatcgacagacagccaggtagttggaactttctgttccctatggagaggcttccctacacagggcctgctattgcagaatgaagccatttagagggtgaaggagaaatacccatgttacttctctgagttttagttggtctttccatctatcactgcattatcttgctcattcttcagttctctactccctcttgtcagtgtagacacaggtcaccattatgctggtgtatgtttatcaaagagcacttgagctgtctgaagcccaaagcctgaggacagaaagaccctgatgcaggtcagcccatggaggcagatgcccttgctgggcctgggggttttccaagccctcagctggtcctgaccaggatggagcaagctcttcccttgctcatgagctcctgatcagaggcatttgagcagctgaataacctgcacaggcttgctgtatgacccctggccacagccttccctctgcattgacctggaggggagaggtcagccttgacctaatgaggtagctatagttgcagcccaaggacagttcagagatcaggatcagctttgaaggctggattctatctacataagtcctttcaattccaccagggccagagcagctccaccactgtgcacttagccatgatggcaacagaaaccaagagacacaattacgcaggtatttagaagcagagggacaaccagaaggcccttaactatcaccagtgcatcacatctgcacactctcttctccattccctagcaggaacttctagctcatttaacagataaagaaactgaggcccacggtttcagctagacaatgatttggccaggcctagtaaccaaggccctgtctctggctactccctggaccacgaggctgattcctctcatttccagcttctcagtttctgcctgggcaatggccaggggccaggagtggggagagttgtgatggaggggagaggggtcacacccaccccctgcctggttctaggctgctgcacaccaaggccctgcatctgtctgctctgcatatatgtctctttggagttggaatttcattatatgttaagaaaataaaggaaaatgacttgtaaggtcct

SEQ ID NO: 2140 - protein, 187 aa, Homosapiens
MASEFKKKLFWRAVVAEFLATTLFVFISIGSALGFKYPVGNNQTAVQDNVKVSLAFGLSIATLAQSVGHISGAHLNPAVTLGLLLSCQISIFRALMYIIAQCVGAIVATAILSGITSSLTGNSLGRNDLADGVNSGQGLGIEIIGTLQLVLCVLATTDRRRRDLGGSAPLAIGLSVALGIVPISGPE

SEQ ID NO: 2141 - DNA, 2756 bp, Homosapiens
agctctcagagggaattgagcacccggcagcggtctcaggccaagccccctgccagcatggccagcgagttcaagaagaagctcttctggagggcagtggtggccgagttcctggccacgaccctctttgtcttcatcagcatcggttctgccctgggcttcaaatacccggtggggaacaaccagacggcggtccaggacaacgtgaaggtgtcgctggccttcgggctgagcatcgccacgctggcgcagagtgtgggccacatcagcggcgcccacctcaacccggctgtcacactggggctgctgctcagctgccagatcagcatcttccgtgccctcatgtacatcatcgcccagtgcgtgggggccatcgtcgccaccgccatcctctcaggcatcacctcctccctgactgggaactcgcttggccgcaatgacctggctgatggtgtgaactcgggccagggcctgggcatcgagatcatcgggaccctccagctggtgctatgcgtgctggctactaccgaccggaggcgccgtgaccttggtggctcagccccccttgccatcggcctctctgtagcccttggacacctcctggctattgactacactggctgtgggattaaccctgctcggtcctttggctccgcggtgatcacacacaacttcagcaaccactggattttctgggtggggccattcatcgggggagccctggctgtactcatctacgacttcatcctggccccacgcagcagtgacctcacagaccgcgtgaaggtgtggaccagcggccaggtggaggagtatgacctggatgccgacgacatcaactccagggtggagatgaagcccaaatagaaggggtctggcccgggcatccacgtagggggcaggggcaggggcgggcggagggaggggaggggtgaaatccatactgtagacactctgacaagctggccaaagtcacttccccaagatctgccagacctgcatggtcaagcctcttatgggggtgtttctatctctttctttctctttctgtttcctggcctcagagcttcctggggaccaagatttaccaattcacccactcccttgaagttgtggaggaggtgaaagaaagggacccacctgctagtcgcccctcagagcatgatgggaggtgtgccagaaagtcccccctcgccccaaagttgctcaccgactcacctgcgcaagtgcctgggattctaccgtaattgctttgtgcctttgggcacggccctccttcttttcctaacatgcaccttgctcccaatggtgcttggagggggaagagatcccaggaggtgcagtggagggggcaagctttgctccttcagttctgcttgctcccaagcccctgacccgctcggacttactgcctgaccttggaatcgtccctatatcagggcctgagtgacctccttctgcaaagtggcagggaccggcagagctctacaggcctgcagcccctaagtgcaaacacagcatgggtccagaagacgtggtctagaccagggctgctctttccacttgccctgtgttctttccccaggggcatgactgtcgccacacgcctctgtgtacatgtgtgcagagcagacaggctacaaagcagagatcgacagacagccaggtagttggaactttctgttccctatggagaggcttccctacacagggcctgctattgcagaatgaagccatttagagggtgaaggagaaatacccatgttacttctctgagttttagttggtctttccatctatcactgcattatcttgctcattcttcagttctctactccctcttgtcagtgtagacacaggtcaccattatgctggtgtatgtttatcaaagagcacttgagctgtctgaagcccaaagcctgaggacagaaagaccctgatgcaggtcagcccatggaggcagatgcccttgctgggcctgggggttttccaagccctcagctggtcctgaccaggatggagcaagctcttcccttgctcatgagctcctgatcagaggcatttgagcagctgaataacctgcacaggcttgctgtatgacccctggccacagccttccctctgcattgacctggaggggagaggtcagccttgacctaatgaggtagctatagttgcagcccaaggacagttcagagatcaggatcagctttgaaggctggattctatctacataagtcctttcaattccaccagggccagagcagctccaccactgtgcacttagccatgatggcaacagaaaccaagagacacaattacgcaggtatttagaagcagagggacaaccagaaggcccttaactatcaccagtgcatcacatctgcacactctcttctccattccctagcaggaacttctagctcatttaacagataaagaaactgaggcccacggtttcagctagacaatgatttggccaggcctagtaaccaaggccctgtctctggctactccctggaccacgaggctgattcctctcatttccagcttctcagtttctgcctgggcaatggccaggggccaggagtggggagagttgtgatggaggggagaggggtcacacccaccccctgcctggttctaggctgctgcacaccaaggccctgcatctgtctgctctgcatatatgtctctttggagttggaatttcattatatgttaagaaaataaaggaaaatgacttgtaaggtcct

SEQ ID NO: 2142 - protein, 269 aa, Homosapiens; identical to SEQ ID NO: 230

SEQ ID NO: 2143 - DNA, 1602 bp, Homosapiens
agccaaggcttactgaggctggtggagggagccactgctgggctcaccatggaccgccggatgtggggggcccacgtcttctgcgtgttgagcccgttaccgaccgtattgggccacatgcacccagaatgtgacttcatcacccagctgagagaggatgagagtgcctgtctacaagcagcagaggagatgcccaacaccaccctgggctgccctgcgacctgggatgggctgctgtgctggccaacggcaggctctggcgagtgggtcaccctcccctgcccggatttcttctctcacttcagctcagagtcaggggctgtgaaacgggattgtactatcactggctggtctgagccctttccaccttaccctgtggcctgccctgtgcctctggagctgctggctgaggaggaatcttacttctccacagtgaagattatctacaccgtgggccatagcatctctattgtagccctcttcgtggccatcaccatcctggttgctctcaggaggctccactgcccccggaactacgtccacacccagctgttcaccacttttatcctcaaggcgggagctgtgttcctgaaggatgctgcccttttccacagcgacgacactgaccactgcagcttctccactgttctatgcaaggtctctgtggccgcctcccatttcgccaccatgaccaacttcagctggctgttggcagaagccgtctacctgaactgcctcctggcctccacctcccccagctcaaggagagccttctggtggctggttctcgctggctgggggctgcccgtgctcttcactggcacgtgggtgagctgcaaactggccttcgaggacatcgcgtgctgggacctggacgacacctccccctactggtggatcatcaaagggcccattgtcctctcggtcggggtgaactttgggctttttctcaatattatccgcatcctggtgaggaaactggagccagctcagggcagcctccatacccagtctcagtattggcgtctctccaagtcgacacttttcctgatcccactctttggaattcactacatcatcttcaacttcctgccagacaatgctggcctgggcatccgcctccccctggagctgggactgggttccttccagggcttcattgttgccatcctctactgcttcctcaaccaagaggtgaggactgagatctcacggaagtggcatggccatgaccctgagcttctgccagcctggaggacccgtgctaagtggaccacgccttcccgctcggcggcaaaggtgctgacatctatgtgctaggctgcctcatcacgccactggagtccacacttgaatttgggcagctaccacgggtctgccatgctctggaggagcaagggggccacatccccaccccagctgttacccagcccggggcaggtgcagcccttcctccctgtctctgcatctgactctcttttgaggtccctgtatgtctacctctgacttctgtggtccctctgtgtctgctctcatccattcctcttactggggcctggggctctagcccaaggctcagaggagccaataaacctgtaaatg

SEQ ID NO: 2144 - protein, 423 aa, Homosapiens; identical to SEQ ID NO: 232

SEQ ID NO: 2145 - DNA, 1228 bp, Homosapiens
tcacttccctggcctaggtgctgggacagtgagggcctcttttctccctactgcccttaggatgctggcagcccagctcaccactcctcacccctcaggggaataatcctctttgtgaagagatggcacctttgaagccagagaaggaaggccccatagtgtgtccctgggcaggctagacctgggccccaggcctctggagccaccctctctgttgctcagaggagctgtccatgcaaaccctgccagggtcacttgatggtccctggcacccccagccccctcctggggagagggaaggagttgtggctagagagtcttgcttgcctcccaggggctgtgaaacgggattgtactatcactggctggtctgagccctttccaccttaccctgtggcctgccctgtgcctctggagctgctggctgaggagggctgcccgtgctcttcactggcacgtgggtgagctgcaaactggccttcgaggacatcgcgtgctgggacctggacgacacctccccctactggtggatcatcaaagggcccattgtcctctcggtcggggtgaactttgggctttttctcaatattatccgcatcctggtgaggaaactggagccagctcagggcagcctccatacccagtctcagtattggcgtctctccaagtcgacacttttcctgatcccactctttggaattcactacatcatcttcaacttcctgccagacaatgctggcctgggcatccgcctccccctggagctgggactgggttccttccagggcttcattgttgccatcctctactgcttcctcaaccaagaggtgaggactgagatctcacggaagtggcatggccatgaccctgagcttctgccagcctggaggacccgtgctaagtggaccacgccttcccgctcggcggcaaaggtgctgacatctatgtgctaggctgcctcatcacgccactggagtccacacttgaatttgggcagctaccacgggtctgccatgctctggaggagcaagggggccacatccccaccccagctgttacccagcccggggcaggtgcagcccttcctccctgtctctgcatctgactctcttttgaggtccctgtatgtctacctctgacttctgtggtccctctgtgtctgctctcatccattcctcttactggggcctggggctctagcccaaggctcagaggagccaataaacct

SEQ ID NO: 2146 - protein, 68 aa, Homosapiens
MVPGTPSPLLGRGKELWLESLACLPGAVKRDCTITGWSEPFPPYPVACPVPLELLAEEGCPCSSLARG

SEQ ID NO: 2147 - DNA, 1613 bp, Homosapiens
tcacttccctggcctaggtgctgggacagtgagggcctcttttctccctactgcccttaggatgctggcagcccagctcaccactcctcacccctcaggggaataatcctctttgtgaagagatggcacctttgaagccagagaaggaaggccccatagtgtgtccctgggcaggctagacctgggccccaggcctctggagccaccctctctgttgctcagaggagctgtccatgcaaaccctgccagggtcacttgatggtccctggcacccccagccccctcctggggagagggaaggagttgtggctagagagtcttgcttgcctcccaggggctgtgaaacgggattgtactatcactggctggtctgagccctttccaccttaccctgtggcctgccctgtgcctctggagctgctggctgaggaggaatcttacttctccacagtgaagattatctacaccgtgggccatagcatctctattgtagccctcttcgtggccatcaccatcctggttgctctcaggaggctccactgcccccggaactacgtccacacccagctgttcaccacttttatcctcaaggcgggagctgtgttcctgaaggatgctgcccttttccacagcgacgacactgaccactgcagcttctccactgttctatgcaaggtctctgtggccgcctcccatttcgccaccatgaccaacttcagctggctgttggcagaagccgtctacctgaactgcctcctggcctccacctcccccagctcaaggagagccttctggtggctggttctcgctggctgggggctgcccgtgctcttcactggcacgtgggtgagctgcaaactggccttcgaggacatcgcgtgctgggacctggacgacacctccccctactggtggatcatcaaagggcccattgtcctctcggtcggggtgaactttgggctttttctcaatattatccgcatcctggtgaggaaactggagccagctcagggcagcctccatacccagtctcagtattggcgtctctccaagtcgacacttttcctgatcccactctttggaattcactacatcatcttcaacttcctgccagacaatgctggcctgggcatccgcctccccctggagctgggactgggttccttccagggcttcattgttgccatcctctactgcttcctcaaccaagaggtgaggactgagatctcacggaagtggcatggccatgaccctgagcttctgccagcctggaggacccgtgctaagtggaccacgccttcccgctcggcggcaaaggtgctgacatctatgtgctaggctgcctcatcacgccactggagtccacacttgaatttgggcagctaccacgggtctgccatgctctggaggagcaagggggccacatccccaccccagctgttacccagcccggggcaggtgcagcccttcctccctgtctctgcatctgactctcttttgaggtccctgtatgtctacctctgacttctgtggtccctctgtgtctgctctcatccattcctcttactggggcctggggctctagcccaaggctcagaggagccaataaacct

SEQ ID NO: 2148 - protein, 359 aa, Homosapiens
MVPGTPSPLLGRGKELWLESLACLPGAVKRDCTITGWSEPFPPYPVACPVPLELLAEEESYFSTVKIIYTVGHSISIVALFVAITILVALRRLHCPRNYVHTQLFTTFILKAGAVFLKDAALFHSDDTDHCSFSTVLCKVSVAASHFATMTNFSWLLAEAVYLNCLLASTSPSSRRAFWWLVLAGWGLPVLFTGTWVSCKLAFEDIACWDLDDTSPYWWIIKGPIVLSVGVNFGLFLNIIRILVRKLEPAQGSLHTQSQYWRLSKSTLFLIPLFGIHYIIFNFLPDNAGLGIRLPLELGLGSFQGFIVAILYCFLNQEVRTEISRKWHGHDPELLPAWRTRAKWTTPSRSAAKVLTSMC

SEQ ID NO: 2149 - DNA, 1459 bp, Homosapiens
tcacttccctggcctaggtgctgggacagtgagggcctcttttctccctactgcccttaggatgctggcagcccagctcaccactcctcacccctcaggggaataatcctctttgtgaagagatggcacctttgaagccagagaaggaaggccccatagtgtgtccctgggcaggctagacctgggccccaggcctctggagccaccctctctgttgctcagaggagctgtccatgcaaaccctgccagggtcacttgatggtccctggcacccccagccccctcctggggagagggaaggagttgtggctagagagtcttgcttgcctcccaggggctgtgaaacgggattgtactatcactggctggtctgagccctttccaccttaccctgtggcctgccctgtgcctctggagctgctggctgaggaggaatcttacttctccacagtgaagattatctacaccgtgggccatagcatctctattgtagccctcttcgtggccatcaccatcctggttgctctcaggaggctccactgcccccggaactacgtccacacccagctgttcaccacttttatcctcaaggcgggagctgtgttcctgaaggatgctgcccttttccacagcgacgacactgaccactgcagcttctccactggctgcccgtgctcttcactggcacgtgggtgagctgcaaactggccttcgaggacatcgcgtgctgggacctggacgacacctccccctactggtggatcatcaaagggcccattgtcctctcggtcggggtgaactttgggctttttctcaatattatccgcatcctggtgaggaaactggagccagctcagggcagcctccatacccagtctcagtattggcgtctctccaagtcgacacttttcctgatcccactctttggaattcactacatcatcttcaacttcctgccagacaatgctggcctgggcatccgcctccccctggagctgggactgggttccttccagggcttcattgttgccatcctctactgcttcctcaaccaagaggtgaggactgagatctcacggaagtggcatggccatgaccctgagcttctgccagcctggaggacccgtgctaagtggaccacgccttcccgctcggcggcaaaggtgctgacatctatgtgctaggctgcctcatcacgccactggagtccacacttgaatttgggcagctaccacgggtctgccatgctctggaggagcaagggggccacatccccaccccagctgttacccagcccggggcaggtgcagcccttcctccctgtctctgcatctgactctcttttgaggtccctgtatgtctacctctgacttctgtggtccctctgtgtctgctctcatccattcctcttactggggcctggggctctagcccaaggctcagaggagccaataaacct

SEQ ID NO: 2150 - protein, 151 aa, Homosapiens
MLPFSTATTLTTAASPLAARALHWHVGELQTGLRGHRVLGPGRHLPLLVDHQRAHCPLGRGELWAFSQYYPHPGEETGASSGQPPYPVSVLASLQVDTFPDPTLWNSLHHLQLPARQCWPGHPPPPGAGTGFLPGLHCCHPLLLPQPRGED

SEQ ID NO: 2151 - DNA, 1283 bp, Homosapiens
tcacttccctggcctaggtgctgggacagtgagggcctcttttctccctactgcccttaggatgctggcagcccagctcaccactcctcacccctcaggggaataatcctctttgtgaagagatggcacctttgaagccagagaaggaaggccccatagggctgtgaaacgggattgtactatcactggctggtctgagccctttccaccttaccctgtggcctgccctgtgcctctggagctgctggctgaggaggaatcttacttctccacagtgaagattatctacaccgtgggccatagcatctctattgtagccctcttcgtggccatcaccatcctggttgctctcaggaggctccactgcccccggaactacgtccacacccagctgttcaccacttttatcctcaaggcgggagctgtgttcctgaaggatgctgcccttttccacagcgacgacactgaccactgcagcttctccactggctgcccgtgctcttcactggcacgtgggtgagctgcaaactggccttcgaggacatcgcgtgctgggacctggacgacacctccccctactggtggatcatcaaagggcccattgtcctctcggtcggggtgaactttgggctttttctcaatattatccgcatcctggtgaggaaactggagccagctcagggcagcctccatacccagtctcagtattggcgtctctccaagtcgacacttttcctgatcccactctttggaattcactacatcatcttcaacttcctgccagacaatgctggcctgggcatccgcctccccctggagctgggactgggttccttccagggcttcattgttgccatcctctactgcttcctcaaccaagaggtgaggactgagatctcacggaagtggcatggccatgaccctgagcttctgccagcctggaggacccgtgctaagtggaccacgccttcccgctcggcggcaaaggtgctgacatctatgtgctaggctgcctcatcacgccactggagtccacacttgaatttgggcagctaccacgggtctgccatgctctggaggagcaagggggccacatccccaccccagctgttacccagcccggggcaggtgcagcccttcctccctgtctctgcatctgactctcttttgaggtccctgtatgtctacctctgacttctgtggtccctctgtgtctgctctcatccattcctcttactggggcctggggctctagcccaaggctcagaggagccaataaacct

SEQ ID NO: 2152 - protein, 151 aa, Homosapiens; identical to SEQ ID NO: 2150

SEQ ID NO: 2153 - DNA, 1054 bp, Homosapiens
ccactgcccccggaactacgtccacacccagctgttcaccacttttatcctcaaggcgggagctgtgttcctgaaggatgctgcccttttccacagcgacgacactgaccactgcagcttctccactgtaatggccatgggtgaaggggctgggcaggtgggggagagaggaggttctatgcaaggtctctgtggccgcctcccatttcgccaccatgaccaacttcagctggctgttggcagaagccgtctacctgaactgcctcctggcctccacctcccccagctcaaggagagccttctggtggctggttctcgctggctgggggctgcccgtgctcttcactggcacgtgggtgagctgcaaactggccttcgaggacatcgcgtgctgggacctggacgacacctccccctactggtggatcatcaaagggcccattgtcctctcggtcggggtgaactttgggctttttctcaatattatccgcatcctggtgaggaaactggagccagctcagggcagcctccatacccagtctcagtattggcgtctctccaagtcgacacttttcctgatcccactctttggaattcactacatcatcttcaacttcctgccagacaatgctggcctgggcatccgcctccccctggagctgggactgggttccttccagggattcgcagactgggcctacgatgcagattcctgggcagatcctttgactgccagcctccccgcgggtcctgagaggagagtttcctaaagagaaggaagaaactcggacttccctcctgttatgttcgggctcctctgtgagaaagaggaggagagaggaaaatgaagggcccattctctgtccccagagagcccccaggaatgttgggaagatctgcaaggatgagcctgaacctagaggatcctggttcttaggccttcgaatataccacccgccctctggggtctctggcttgcagagggcagattgacttctcagcctccataattgcatgagtcaataccatacaataaagctctttctacactgtg

SEQ ID NO: 2154 - protein, 207 aa, Homosapiens
MAMGEGAGQVGERGGSMQGLCGRLPFRHHDQLQLAVGRSRLPELPPGLHLPQLKESLLVAGSRWLGAARALHWHVGELQTGLRGHRVLGPGRHLPLLVDHQRAHCPLGRGELWAFSQYYPHPGEETGASSGQPPYPVSVLASLQVDTFPDPTLWNSLHHLQLPARQCWPGHPPPPGAGTGFLPGIRRLGLRCRFLGRSFDCQPPRGS

SEQ ID NO: 2155 - DNA, 534 bp, Homosapiens
agctgtgttcctgaaggatgctgcccttttccacagcgacgacactgaccactgcagcttctccactgttctatgcaaggtctctgtggccgcctcccatttcgccaccatgaccaacttcagctggctgttggcagaagccgtctacctgaactgcctcctggcctccacctcccccagctcaaggagagccttctggtggctggttctcgctggctgggggctgcccgtgctcttcactggcacgtgggtgagctgcaaactggccttcgaggacatcgcgtgctgggacctggacgacacctccccctactggtggatcatcaaagggcccattgtcctctcggtcggggtgaactttgggctttttctcaatattatccgcatcctggtgaggaaactggagccagctcagggcagcctccatacccagtctcagtattggtactgtgtgtttgtgtctggggatactgggaaagggtaactggagggggattcaatgtgtctgtctcatccaataagcactcatgacct

SEQ ID NO: 2156 - protein, 152 aa, Homosapiens
MQGLCGRLPFRHHDQLQLAVGRSRLPELPPGLHLPQLKESLLVAGSRWLGAARALHWHVGELQTGLRGHRVLGPGRHLPLLVDHQRAHCPLGRGELWAFSQYYPHPGEETGASSGQPPYPVSVLVLCVCVWGYWERVTGGGFNVSVSSNKHS

SEQ ID NO: 2157 - DNA, 2244 bp, Homosapiens
cagccggccacacaggcgcggagacccggctcggcgcgcgctcctcggcgcacacgctccccatccccgcgccgcgcgggccgcggacttgcaggctgcgcgtcctttgcggagtctgccccggccccacggacaggccccgcagtgagcagcccagagacacattggggctgacctgccgctgctgtcagtgggaggccagtggtgctggccaagaagtgtcatggctggtgtcgtgcacgtttccctggctgctctcctcctgctgcctatggcccctgccatgcattctgactgcatcttcaagaaggagcaagccatgtgcctggagaagatccagagggccaatgagctgatgggcttcaatgattcctctccaggctgtcctgggatgtgggacaacatcacgtgttggaagcccgcccatgtgggtgagatggtcctggtcagctgccctgagctcttccgaatcttcaacccagaccaagtctgggagaccgaaaccattggagagtctgattttggtgacagtaactccttagatctctcagacatgggagtggtgagccggaactgcacggaggatggctggtcggaacccttccctcattactttgatgcctgtgggtttgatgaatatgaatctgagactggggaccaggattattactacctgtcagtgaaggccctctacacggttggctacagcacatccctcgtcaccctcaccactgccatggtcatcctttgtcgcttccggaagctgcactgcacacgcaacttcatccacatgaacctgtttgtgtcgttcatgctgagggcgatctccgtcttcatcaaagactggattctgtatgcggagcaggacagcaaccactgcttcatctccactgtggaatgtaaggccgtcatggttttcttccactactgtgttgtgtccaactacttctggctgttcatcgagggcctgtacctcttcactctgctggtggagaccttcttccctgaaaggagatacttctactggtacaccatcattggctgggggaccccaactgtgtgtgtgacagtgtgggctacgctgagactctactttgatgacacaggctgctgggatatgaatgacagcacagctctgtggtgggtgatcaaaggccctgtggttggctctatcatggttaactttgtgctttttattggcattatcgtcatccttgtgcagaaacttcagtctccagacatgggaggcaatgagtccagcatctacttgcgactggcccggtccaccctgctgctcatcccactattcggaatccactacacagtatttgccttctccccagagaatgtcagcaaaagggaaagactcgtgtttgagctggggctgggctccttccagggctttgtggtggctgttctctactgttttctgaatggtgaggtacaagcggagatcaagcgaaaatggcgaagctggaaggtgaaccgttacttcgctgtggacttcaagcaccgacacccgtctctggccagcagtggggtgaatgggggcacccagctctccatcctgagcaagagcagctcccaaatccgcatgtctggcctccctgctgacaatctggccacctgagccatgctcccctcctcctcctctcctccatccacaggctgggaccgcaggcaggtgccagcccacgcatgtttgcgcctcttccctccccttgggcaggccctgggctggaagcttggctcctgaggggggagaaggaggcagggcacagactggaattgtcccctccttgttttggtactggtcccacccactgtggtcccctgggccctgaccccagacatgtaaatactcctcaaatttggaaaagttgtcccatcccttccccctttgccccagtgtccctgctcacttccagtcaggtctcagctccaccccactgtttcttggtcagcctcagtgatggcctgaccccagctgtgaggccttgtgagctaaggctgaagagaccttgcctgtgggagctggggtggtacctgccccaacagccccccatcatctgattttgggtgtgacccctcgagtgtgcatgccaccctggggctcttctcagtcctgggcccaagtccctgaagcctagcagagggccagctcgggtggccagaacaccccttggtgcaggcctcctggcactcgcctggcatcttggtgtccgggtgctcagctcctgggtc

SEQ ID NO: 2158 - protein, 468 aa, Homosapiens; identical to SEQ ID NO: 236

SEQ ID NO: 2159 - DNA, 2389 bp, Homosapiens
ccccattcattcatcatgactcccaacagttttcattgtggaagaagaaactttggcattatagagacatcatcacaaaacagtaaaaacaaaatcaaccctgaaccccatgcactgtgctgcttcctgagcctggccctgcatcctcatagaggtgccgggttcctattggttagttggttgtttttccgtctgagtgaatttttgccagtcttgtgagcagatgtacctgatgtattctcaatgttccaagaggttctggccttcagggtcacaggcagtagggggacagcataaggtctatgtaaaacccttccctctctgaccctctgttttcaaatctgtaaaatgggcaataagactagatgatttgtatatagcccaatgcatctctggaactctgtctaaacaccagccatctacttggaatgggccccaggactgtggtatttgcctgggccaggaaaggataagaaatcctgtcatgtgaagacagcttgagaggcttgagaaaagtggggctggggagaagcaggcttgtcagactccacccctgttgatgatcattcctgggaaggggtttctcgttctatgcaatcctaaaggacgaaactcacccatgggaggccgaattctccttgggatgaagaaatttctctttccctgtcatgagtgtccagccagggagcagggaggcagtgtcagggagggactctcatcctggaggaaatgggattccaagtcaaggatgctgaggctgtcagggagccagagaggggggtccaagtgcgggatgtgggtggctctgtggttcatgtgtagctctgtcaccctgcttgacacatccagtggcctacagcgactcttctctaaccccaccccctccaagctgggttctttgtggaagaaggacagggagctagagccaagccctaggcttgagagacacctgcatctataatccccgccaaggatgcccactcacctctctcatctgatcctcactctttgtggaagggaaagctcaaagggactctctctctctctctctttttttttttttttgagtagtacccttgccctcttcatggccacttcaaagtgaagccagcaaagtgataatactttatcatttagtattatcataaagtattaatactttgtcataaagtcctccttgagcccagggaccatggaagtcagctagaagagccctgagcaaggagcaaggacttgggcttctccacgctttgctcctggcttgtttgaccttgactcattccccatatgtctttgaggaggctcacaaaatactaaagctgggaggaaacttggagatctataggtcaaacctccccattgggctgatgagaaaatacacgcaggcctagcatggtgcctgccaccatggtgggatccagtatgttttataaatctgaatgagtaaatggctcaccaatttatgcatagccctgcacatgagcagaatgtgacactcaaagcatccatgcagtacgcatgtaaccttgcacaggagtggggctctggtgaccgaaggttgtccaggactcttgcaggagaagcaatggagtcagtgtggtgtggggagacctactttttaacctgggcttagccacctgctctgtgatccagggcttaccttctttgggcctcggcctcctaatctgggtaatggggaggacttcattggcattgttagtcccacaggccaaggataaggttgaaatgagacggcttgtgtgtgaaaagattttggaaattacacagatgtgggcttgttattgggatgaagactgctggaagggactccttgctgtttatctactgctttgagccctcctaagttaacctgtgcctcatttgtaaaaccaccagcatcaggagtaagggggaggccagagggctcagatggacacagaattctagctttacctgcatccgctgattcagttttctgttgggatcagagtgaggatacttccatatgggtgatagcagccatgcccctgggagtcaacttcaaggatctgggacattttggtgtgcccattccttcttttcctgaactcacagtcttggggtgtttctgcacttggctatgtgtgtcttgtctgatgtctgtcttctgtagctttgcctctatcagggctggagtggtgcagcccctggcatctcagacatggttcctgcctcacttgtgggagctggaccagcctgggtttcatctcccacagtaaagctaagtaagccccacagaccttactgctactgctgctgccattaatgctgtgctcactatcttgtccaggattttaaggatgtcagactgctgtagatgactcaataaatgttttgccatttttcctgg

SEQ ID NO: 2160 - protein, 133 aa, Homosapiens
MIIPGKGFLVLCNPKGRNSPMGGRILLGMKKFLFPCHECPAREQGGSVREGLSSWRKWDSKSRMLRLSGSQRGGSKCGMWVALWFMCSSVTLLDTSSGLQRLFSNPTPSKLGSLWKKDRELEPSPRLERHLHL

SEQ ID NO: 2161 - DNA, 2625 bp, Homosapiens
ccccattcattcatcatgactcccaacagttttcattgtggaagaagaaactttggcattatagagacatcatcacaaaacagtaaaaacaaaatcaaccctgaaccccatgcactgtgctgcttcctgagcctggccctgcatcctcatagaggtgccgggttcctattggttagttggttgtttttccgtctgagtgaatttttgccagtcttgtgagcagatgtacctgatgtattctcaatgttccaagaggttctggccttcagggtcacaggcagtagggggacagcataaggtctatgtaaaacccttccctctctgaccctctgttttcaaatctgtaaaatgggcaataagactagatgatttgtatatagcccaatgcatctctggaactctgtctaaacaccagccatctacttggaatgggccccaggactgtggtatttgcctgggccaggaaaggataagaaatcctgtcatgtgaagacagcttgagaggcttgagaaaagtggggctggggagaagcaggcttgtcagactccacccctgttgatgatcattcctgggaaggggtttctcgttctatgcaatcctaaaggacgaaactcacccatgggaggccgaattctccttgggatgaagaaatttctctttccctgtcatgagtgtccagccagggagcagggaggcagtgtcagggagggactctcatcctggaggaaatgggattccaagtcaaggatgctgaggctgtcagggagccagagaggggggtccaagtgcgggatgtgggtggctctgtggttcatgtgtagctctgtcaccctgcttgacacatccagtggcctacagcgactcttctctaaccccaccccctccaagctgggttctttgtggaagaaggacagggagctagagccaagccctaggcttgagagacacctgcatctataatccccgccaaggatgcccactcacctctctcatctgatcctcactctttgtggaagggaaagctcaaagggactctctctctctctctctttttttttttttttgagtagtacccttgccctcttcatggccacttcaaagtgaagccagcaaagtgataatactttatcatttagtattatcataaagtattaatactttgtcataaagtcctccttgagcccagggaccatggaagtcagctagaagagccctgagcaaggagcaaggacttgggcttctccacgctttgctcctggcttgtttgaccttgactcattccccatatgtctttgaggaggctcacaaaatactaaagctgggaggaaacttggagatctataggtcaaacctccccattgggctgatgagaaaatacacgcaggcctagcatggtgcctgccaccatggtgggatccagtatgttttataaatctgaatgagtaaatggctcaccaatttatgcatagccctgcacatgagcagaatgtgacactcaaagcatccatgcagtacgcatgtaaccttgcacaggagtggggctctggtgaccgaaggttgtccaggactcttgcaggagaagcaatggagtcagtgtggtgtggggagacctactttttaacctgggcttagccacctgctctgtgatccagggcttaccttctttgggcctcggcctcctaatctgggtaatggggaggacttcattggcattgttagtcccacaggccaaggataaggttgaaatgagacggcttgtgtgtgaaaagattttggaaattacacagatgtgggcttgttattgggatgaagactgctggaagggactccttgctgtttatctactgctttgagccctcctaagttaacctgtgcctcatttgtaaaaccaccagcatcaggagtaagggggaggccagagggctcagatggacacagaattctagctttacctgcatccgctgattcagttttctgttgggatcagagtgaggatacttccatatgggtgatagcagccatgcccctgggagtcaacttcaaggatctgggacattttggtgtgcccattccttcttttcctgaactcacagtcttggggtgtttctgcacttggctatgtgtgtcttgtctgatgtctgtcttctgtagctttgcctctatcagggctggagtggtgcagcccctggcatctcagacatggttcctgcctcacttgtgggagctggaccagcctgggtttcatctcccacagtaaagctaagtaagccccacagaccttactgctactgctgctgccattaatgctgtgctcactatcttgtccaggattttaaggatgtcagactgctgtagatgactcaataaatgttttgccatttttcctggtggctgtaacttggcataagtggagggaagggaggagaggagggggaaggggagaggactacccccaaaatttgatcatccaagagtaatccagtgtatacaaggcccagtggactttaagattccaaaggagaaatatgagagtgggcctgagtgagcctaggatggaactcgaaaagtaaattagaagtcttggccttaaaggatctccagggatcatggaaactgagtggaat

SEQ ID NO: 2162 - protein, 133 aa, Homosapiens; identical to SEQ ID NO: 2160

SEQ ID NO: 2163 - DNA, 2084 bp, Homosapiens
ggccgtggccctgggggcggcgggagctgctttgcctccaccgatctccctgtgcggccctcatgtgctgtgctcgctgacacccgaagtccgcggctttccgcacacggtggggtcgtcagacccgctgcccttggcggtcgaagtcgtcgtgcgggcccgcggcggccgcccatggagaaggccaggagaggcggggatggcgtcccccgggggcccgtactgcacatcgtggtggtcggatttcaccacaagaagggctgccaggttgaattctcttacccgcccctgattccaggagatggacatgacagccacactttacctgaagaatggaagtatttgcccttccttgccttaccagatggcgcacacaactaccaggaagatactgtgttttttcacttgccacccagaaatggaaatggagccacagtatttggtatctcttgctatcgacaaattgaagccaaggcactgaaagtaaggcaagcagatatcaccagagagactgttcagaaaagtgtctgtgttctaagcaagctgcctctgtatggtttacttcaagcaaaacttcaactcattacacatgcatattttgaagagaaggatttttcccaaatttctattctaaaggagctttatgaacatatgaatagttccttgggaggtgcttcattagaaggatcccaagtatatcttggtctgtcacctcgagatcttgtccttcattttcgacacaaggtcttaatcctatttaagctaattcttcttgaaaaaaaggttcttttttatatttctccagtgaataaattggtgggtgcactgatgactgtgttatccctttttccaggcatgattgaacatggtctcagtgactgttctcagtatagaccccggaaaagtatgtctgaagatggtgggcttcaggaaagtaacccatgtgcagatgattttgtttctgcatccactgctgatgtttcacataccaacttgggaactatcaggaaagtcatggcaggaaaccatggagaagatgctgccatgaagactgaggagcctttgttccaagtggaagacagcagcaaagggcaggaacccaatgataccaatcaatatttgaaacctccatctcgcccatctccagattcttcagaaagtgactgggaaactttggatcctagtgtcttagaggaccccaacttgaaagaaagggaacagctgggatcagaccagacaaatttgtttccaaaggactctgtcccctcagagagtcttccaattactgtacaacctcaagctaatacgggacaggtagtcctgataccagggctcatttcgggtttggaagaggatcagtatggcatgcccctggccatcttcacaaagtgtacccaagatgtcttacctcaggcaaatcacagcttcaagtttttgataacggataggagaatcacaccaagaccacttcgaagaaggctggtttctgctacactaacaaatatgcttcaagagaagagttgctggaaaaaacacatcaagtgtagaagacgtgttcaaaaatagaaaatactgcccttgatctacgaactctcttcaaaggaagttttaacattttaagtcttcagagtctttaaatgtgaactggaaaatgtggaaactggaaaataattactttgtgtgctttttgtatgagattaaggtctctactatagcagagttctttacaaggaatatgtaggacaagtctaaagactgaagcaagaggtaagaacttcacttaacacaaacttgataactgaaaactttagttatcacagtatttcattctgatgatagtttacaagtcaattaatgaaaattgattggtatgtctacatgaaaaaaaattacctgatttaaagcaagtcttaaagtacctgaatgcaaactgattacttttaaaggtctacttgactctgtcttacaggaaagtgaaaaagattaaattcatgaatatagctttaaaaactgtgactgctttaattgtgatactcgcagaaacatgtaaactacattgataaggtaataaaattgtgaatgct

SEQ ID NO: 2164 - protein, 463 aa, Homosapiens
MEKARRGGDGVPRGPVLHIVVVGFHHKKGCQVEFSYPPLIPGDGHDSHTLPEEWKYLPFLALPDGAHNYQEDTVFFHLPPRNGNGATVFGISCYRQIEAKALKVRQADITRETVQKSVCVLSKLPLYGLLQAKLQLITHAYFEEKDFSQISILKELYEHMNSSLGGASLEGSQVYLGLSPRDLVLHFRHKVLILFKLILLEKKVLFYISPVNKLVGALMTVLSLFPGMIEHGLSDCSQYRPRKSMSEDGGLQESNPCADDFVSASTADVSHTNLGTIRKVMAGNHGEDAAMKTEEPLFQVEDSSKGQEPNDTNQYLKPPSRPSPDSSESDWETLDPSVLEDPNLKEREQLGSDQTNLFPKDSVPSESLPITVQPQANTGQVVLIPGLISGLEEDQYGMPLAIFTKCTQDVLPQANHSFKFLITDRRITPRPLRRRLVSATLTNMLQEKSCWKKHIKCRRRVQK

SEQ ID NO: 2165 - DNA, 4222 bp, Homosapiens
ggtcgggccctgaggagcgtgcggcggcgcccgcagaggacgctgctttccgcgctggacggaccaagcgagggagggtgcgaggggaaaccggaaggaagaggcggcggcgccagccttcctcggccggaggcggaggcgagaccccaggcgaggccgcggcgggagggccacgcccccgccgccgcgccggaggggcccagtgtggacggggccaccggctggagcggatcccacacctccggaccgagggacgcggttactccacaggatccgctgaacataggatgttgccacaaaatctacctcgtgtatttttctctttcactcatgagctgcacaattgcagatttgagcacaatgtctgcagactgtgttgaaaaactctgaagaacctaattaacacaggatgacctaggagtgattctaagtctgtgtaacaagatattactcattagtgaatgtgtcagtcttggtactgaatgctgcagataacagcaagtaggttctcctttatttctgaagtattcacttgaccttccatcagtaagacggacttttctaatctgttcctggagatattaatggaatacagtcatgtccactcaagacgagaggcagatcaatactgaatatgctgtgtcattgttggaacagttgaaactgttttatgaacagcagttgtttactgacatagtgttaattgttgagggcactgaattcccttgtcataagatggttcttgcaacatgtagctcttatttcagggccatgtttatgagtggactaagtgaaagcaaacaaacccatgtacacctgaggaatgtcgatgctgccaccttacagataataataacttatgcatacacgggtaacttggcaatgaatgacagcactgtagaacagctttatgaaacagcttgcttcctacaggtagaagatgtgttacaacgttgtcgagaatatttaattaaaaaaataaatgcagagaattgtgtacgattgttgagttttgctgatctcttcagttgtgaggaattaaaacagagtgctaaaagaatggtggagcacaagttcactgctgtgtatcatcaggacgcgttcatgcagctgtcacatgacctactgatagatattctcagtagtgacaatttaaatgtagaaaaggaagaaaccgttcgagaagctgctatgctgtggctagagtataacacagaatcacgatcccagtatttgtcttctgttcttagccaaatcagaattgatgcactttcagaagtaacacagagagcttggtttcaaggtctgccacccaatgataagtcagtggtggttcaaggtctgtataagtccatgcccaagtttttcaaaccaagacttgggatgactaaagaggaaatgatgattttcattgaagcatcttcagaaaatccttgtagtctttactcttctgtctgttacagcccccaagcagaaaaagtttacaagttatgtagcccaccagctgatttgcataaggttgggaccgttgtaactcctgataatgatatctacatagcagggggtcaagttcctctgaaaaacacaaaaacaaatcacagtaaaacaagcaaacttcagactgccttcagaactgtgaattgcttttattggtttgatgcacagcaaaatacctggtttccaaagaccccaatgctttttgtccgcataaagccatctttggtttgctgtgaaggctatatctatgcaattggaggagatagcgtaggtggagaacttaatcggaggaccgtagaaagatacgacactgagaaagatgagtggacgatggtaagccctttaccttgtgcttggcaatggagtgcagcagttgtggttcatgactgcatttatgtgatgacactgaacctcatgtactgttattttccaaggtctgactcatgggtagaaatggccatgagacagactagtaggtcctttgcttcagctgcagcttttggtgataaaattttctatattggagggttgcatattgctaccaattccggcataagactcccctctggcactgtagatgggtcttcagtaactgtggaaatttatgatgtgaataaaaatgagtggaaaatggcagccaacatccctgctaagaggtactctgacccctgtgttagagctgttgtgatctcaaattctctatgtgtgtttatgcgagaaacccacttaaatgagcgagctaaatacgtcacctaccaatatgacctggaacttgaccggtggtctctgcggcagcatatatctgaacgtgtactgtgggacttggggagagattttcgatgcactgtggggaaactctatccatcctgccttgaagagtctccatggaaaccaccaacttatcttttttcaacggatgggacagaagagtttgaactggatggagaaatggttgcactaccacctgtatagtggggaagttcagggagtgcacgcctgagttatgtgctttgtcattttctttgctaaacaaaagaggctatgaaagaactaaatatgagtacataaaattctatctttgataaattttatttttatgccctacttaatatttgcatcagtataatatatatcagtgagtcttacagaaagatatgcttccataatatgaaatagattattcaataattgagaaactttatgtgtaatcatgagagtataagaatctggattatctaacattgttagccctgtgtatgtacagttcaaaaagttcatttataaaagtagtttcctgttcctagtgtgatgtatcacaaattgtgctgaggttattttagtatgtgtgtttcattcccgtgcttctgttctgaagtcctggaatacagttttcagtgtaattaattcaactgcacttaacactaatgtccgtgttggtatagaaatgtctaaatcctatactctagttgaggaagatcttccataattttatggtattacacagggaaagctatgactgcaggatcagtctaactatactattaggtgcatgtattctcttttcactaacttatacttgtctatctagaatacaggtcttccagtcagctggtcatttaccaggtgtggacttaagttgctaggcttgcagtaagaattgccagccactcattgtgcgggtctgcgtggagctttaatcagaaaaagcctccactttctgtattatgttaacattggctcatgcatataactatctgctgctgatgtagttctccatcttcaagatttagagtgggttaaccaggtcattacatcttaatttaataacaagcattactgtagagtgattgtgtatagatctgttagctgtcagggtgtgttttttttaacctgttgtgtgcgtgtgggggttaggattagtaaggtgaactgttcaggaattctctgcactagctgtgcagaagagcagataactagcgctgctctggcattaatcccaggaaccactagcagtagtggggcgccgccaatctaacatgagcacaggtgcttcatgacaaacattactagcatgttcaactgcaccatgttctggcactgtattttgaatgacattaatttattaaataaattgtatatattcaatatctatttttcttttgttatgggaatggtctgctttttaaattttgattttgctaggtcaaacttagctagtaataggtggtttcttccaaattttgtttgatgaagattgagagatatgcataggctttccttaggctagtgtctttctaccctgctggcatgttagaatcatctgattctgatcatcatctttagaagcttgagatgatgcctgaacctcaccccaaacaaaatggtttctttttagagcacatcattgatcatgtttatagacttgaactgcccctccactgcctactgaatgaagtccagattccttaccacatttaaggctctctctaatttggctttaaattacctttacagccctaccttgcattgtttttccataagccttatcttctgattaggctttcgctatgctttatgcttttttatgctattcatgctactcagaatggtttcttcatcccaactttacttgcagctgtctcaagagctatttaaggcagtttttaaagaatgtttcctgataaccatgtcttaccatgaggtgaaaagtatcctttctcacatt

SEQ ID NO: 2166 - protein, 623 aa, Homosapiens
MSTQDERQINTEYAVSLLEQLKLFYEQQLFTDIVLIVEGTEFPCHKMVLATCSSYFRAMFMSGLSESKQTHVHLRNVDAATLQIIITYAYTGNLAMNDSTVEQLYETACFLQVEDVLQRCREYLIKKINAENCVRLLSFADLFSCEELKQSAKRMVEHKFTAVYHQDAFMQLSHDLLIDILSSDNLNVEKEETVREAAMLWLEYNTESRSQYLSSVLSQIRIDALSEVTQRAWFQGLPPNDKSVVVQGLYKSMPKFFKPRLGMTKEEMMIFIEASSENPCSLYSSVCYSPQAEKVYKLCSPPADLHKVGTVVTPDNDIYIAGGQVPLKNTKTNHSKTSKLQTAFRTVNCFYWFDAQQNTWFPKTPMLFVRIKPSLVCCEGYIYAIGGDSVGGELNRRTVERYDTEKDEWTMVSPLPCAWQWSAAVVVHDCIYVMTLNLMYCYFPRSDSWVEMAMRQTSRSFASAAAFGDKIFYIGGLHIATNSGIRLPSGTVDGSSVTVEIYDVNKNEWKMAANIPAKRYSDPCVRAVVISNSLCVFMRETHLNERAKYVTYQYDLELDRWSLRQHISERVLWDLGRDFRCTVGKLYPSCLEESPWKPPTYLFSTDGTEEFELDGEMVALPPV

SEQ ID NO: 2167 - DNA, 3651 bp, Homosapiens
ggtcgggccctgaggagcgtgcggcggcgcccgcagaggacgctgctttccgcgctggacggaccaagcgagggagggtgcgaggggaaaccggaaggaagaggcggcggcgccagccttcctcggccggaggcggaggcgagaccccaggcgaggccgcggcgggagggccacgcccccgccgccgcgccggaggggcccagtgtggacggggccaccggctggagcggatcccacacctccggaccgagggacgcggttactccacaggatccgctgaacataggatgttgccacaaaatctacctcgtgtatttttctctttcactcatgagctgcacaattgcagatttgagcacaatgtctgcagactgtgttgaaaaactctgaagaacctaattaacacaggatgacctaggagtgattctaagtctgtgtaacaagatattactcattagtgaatgtgtcagtcttggtactgaatgctgcagataacagcaagtaggttctcctttatttctgaagtattcacttgaccttccatcagtaagacggacttttctaatctgttcctggagatattaatggaatacagtcatgtccactcaagacgagaggcagatcaatactgaatatgctgtgtcattgttggaacagttgaaactgttttatgaacagcagttgtttactgacatagtgttaattgttgagggcactgaattcccttgtcataagatggttcttgcaacatgtagctcttatttcagggccatgtttatgagtggactaagtgaaagcaaacaaacccatgtacacctgaggaatgtcgatgctgccaccttacagataataataacttatgcatacacgggtaacttggcaatgaatgacagcactgtagaacagctttatgaaacagcttgcttcctacaggtagaagatgtgttacaacgttgtcgagaatatttaattaaaaaaataaatgcagagaattgtgtacgattgttgagttttgctgatctcttcagttgtgaggaattaaaacagagtgctaaaagaatggtggagcacaagttcactgctgtgtatcatcaggacgcgttcatgcagctgtcacatgacctactgatagatattctcagtagtgacaatttaaatgtagaaaaggaagaaaccgttcgagaagctgctatgctgtggctagagtataacacagaatcacgatcccagtatttgtcttctgttcttagccaaatcagaattgatgcactttcagaagtaacacagagagcttggtttcaaggtctgccacccaatgataagtcagtggtggttcaaggtctgtataagtccatgcccaagtttttcaaaccaagacttgggatgactaaagaggaaatgatgattttcattgaagcatcttcagaaaatccttgtagtctttactcttctgtctgttacagcccccaagcagaaaaagtttacaagttatgtagcccaccagctgatttgcataaggttgggaccgttgtaactcctgataatgatatctacatagcagggggtcaagttcctctgaaaaacacaaaaacaaatcacagtaaaacaagcaaacttcagactgccttcagaactgtgaattgcttttattggtttgatgcacagcaaaatacctggtttccaaagaccccaatgctttttgtccgcataaagccatctttggtttgctgtgaaggctatatctatgcaattggaggagatagcgtaggtggagaacttaatcggaggaccgtagaaagatacgacactgagaaagatgagtggacgatggtaagccctttaccttgtgcttggcaatggagtgcagcagttgtggttcatgactgcatttatgtgatgacactgaacctcatgtactgttattttccaaggtctgactcatgggtagaaatggccatgagacagactagtaggtcctttgcttcagctgcagcttttggtgataaaattttctatattggagggttgcatattgctaccaattccggcataagactcccctctggcactgtagatgggtcttcagtaactgtggaaatttatgatgtgaataaaaatgagtggaaaatggcagccaacatccctgctaagaggtactctgacccctgtgttagagctgttgtgatctcaaattctctatgtgtgtttatgcgagaaacccacttaaatgagcgagctaaatacgtcacctaccaatatgacctggaacttgaccggtggtctctgcggcagcatatatctgaacgtgtactgtgggacttggggagagattttcgatgcactgtggggaaactctatccatcctgccttgaagagtctccatggaaaccaccaacttatcttttttcaacggatgggacagaagagtttgaactggatggagaaatggttgcactaccacctgtatagtggggaagttcagggagtgcacgcctgagttatgtgctttgtcattttctttgctaaacaaaagaggctatgaaagaactaaatatgagtacataaaattctatctttgataaattttatttttatgccctacttaatatttgcatcagtataatatatatcagtgagtcttacagaaagatatgcttccataatatgaaatagattattcaataattgagaaactttatgtgtaatcatgagagtataagaatctggattatctaacattgttagccctgtgtatgtacagttcaaaaagttcatttataaaagtagtttcctgttcctagtgtgatgtatcacaaattgtgctgaggttattttagtatgtgtgtttcattcccgtgcttctgttctgaagtcctggaatacagttttcagtgtaattaattcaactgcacttaacactaatgtccgtgttggtatagaaatgtctaaatcctatactctagttgaggaagatcttccataattttatggtattacacagggaaagctatgactgcaggatcagtctaactatactattaggtgcatgtattctcttttcactaacttatacttgtctatctagaatacaggtcttccagtcagctggtcatttaccaggtgtggacttaagttgctaggcttgcagtaagaattgccagccactcattgtgcgggtctgcgtggagctttaatcagaaaaagcctccactttctgtattatgttaacattggctcatgcatataactatctgctgctgatgtagttctccatcttcaagatttagagtgggttaaccaggtcattacatcttaatttaataacaagcattactgtagagtgattgtgtatagatctgttagctgtcagggtgtgttttttttaacctgttgtgtgcgtgtgggggttaggattagtaaggtgaactgttcaggaattctctgcactagctgtgcagaagagcagataactagcgctgctctggcattaatcccaggaaccactagcagtagtggggcgccgccaatctaacatgagcacaggtgcttcatgacaaacattactagcatgttcaactgcaccatgttctggcactgtattttgaatgacattaatttattaaataaattgtatatattcaatatctattt

SEQ ID NO: 2168 - protein, 623 aa, Homosapiens; identical to SEQ ID NO: 2166

SEQ ID NO: 2169 - DNA, 2814 bp, Homosapiens
ggtcgggccctgaggagcgtgcggcggcgcccgcagaggacgctgctttccgcgctggacggaccaagcgagggagggtgcgaggggaaaccggaaggaagaggcggcggcgccagccttcctcggccggaggcggaggcgagaccccaggcgaggccgcggcgggagggccacgcccccgccgccgcgccggaggggcccagtgtggacggggccaccggctggagcggatcccacacctccggaccgagggacgcggttactccacaggatccgctgaacataggatgttgccacaaaatctacctcgtgtatttttctctttcactcatgagctgcacaattgcagatttgagcacaatgtctgcagactgtgttgaaaaactctgaagaacctaattaacacaggatgacctaggagtgattctaagtctgtgtaacaagatattactcattagtgaatgtgtcagtcttggtactgaatgctgcagataacagcaagtaggttctcctttatttctgaagtattcacttgaccttccatcagtaagacggacttttctaatctgttcctggagatattaatggaatacagtcatgtccactcaagacgagaggcagatcaatactgaatatgctgtgtcattgttggaacagttgaaactgttttatgaacagcagttgtttactgacatagtgttaattgttgagggcactgaattcccttgtcataagatggttcttgcaacatgtagctcttatttcagggccatgtttatgagtggactaagtgaaagcaaacaaacccatgtacacctgaggaatgtcgatgctgccaccttacagataataataacttatgcatacacgggtaacttggcaatgaatgacagcactgtagaacagctttatgaaacagcttgcttcctacaggtagaagatgtgttacaacgttgtcgagaatatttaattaaaaaaataaatgcagagaattgtgtacgattgttgagttttgctgatctcttcagttgtgaggaattaaaacagagtgctaaaagaatggtggagcacaagttcactgctgtgtatcatcaggacgcgttcatgcagctgtcacatgacctactgatagatattctcagtagtgacaatttaaatgtagaaaaggaagaaaccgttcgagaagctgctatgctgtggctagagtataacacagaatcacgatcccagtatttgtcttctgttcttagccaaatcagaattgatgcactttcagaagtaacacagagagcttggtttcaaggtctgccacccaatgataagtcagtggtggttcaaggtctgtataagtccatgcccaagtttttcaaaccaagacttgggatgactaaagaggaaatgatgattttcattgaagcatcttcagaaaatccttgtagtctttactcttctgtctgttacagcccccaagcagaaaaagtttacaagttatgtagcccaccagctgatttgcataaggttgggaccgttgtaactcctgataatgatatctacatagcagggggtcaagttcctctgaaaaacacaaaaacaaatcacagtaaaacaagcaaacttcagactgccttcagaactgtgaattgcttttattggtttgatgcacagcaaaatacctggtttccaaagaccccaatgctttttgtccgcataaagccatctttggtttgctgtgaaggctatatctatgcaattggaggagatagcgtaggtggagaacttaatcggaggaccgtagaaagatacgacactgagaaagatgagtggacgatggtaagccctttaccttgtgcttggcaatggagtgcagcagttgtggttcatgactgcatttatgtgatgacactgaacctcatgtactgttattttccaaggtctgactcatgggtagaaatggccatgagacagactagtaggtcctttgcttcagctgcagcttttggtgataaaattttctatattggagggttgcatattgctaccaattccggcataagactcccctctggcactgtagatgggtcttcagtaactgtggaaatttatgatgtgaataaaaatgagtggaaaatggcagccaacatccctgctaagaggtactctgacccctgtgttagagctgttgtgatctcaaattctctatgtgtgtttatgcgagaaacccacttaaatgagcgagctaaatacgtcacctaccaatatgacctggaacttgaccggtggtctctgcggcagcatatatctgaacgtgtactgtgggacttggggagagattttcgatgcactgtggggaaactctatccatcctgccttgaagagtctccatggaaaccaccaacttatcttttttcaacggatgggacagaagagtttgaactggatggagaaatggttgcactaccacctgtatagtggggaagttcagggagtgcacgcctgagttatgtgctttgtcattttctttgctaaacaaaagaggctatgaaagaactaaatatgagtacataaaattctatctttgataaattttatttttatgccctacttaatatttgcatcagtataatatatatcagtgagtcttacagaaagatatgcttccataatatgaaatagattattcaataattgagaaactttatgtgtaatcatgagagtataagaatctggattatctaacattgttagccctgtgtatgtacagttcaaaaagttcatttataaaagtagtttcctgttcctagtgtgatgtatcac

SEQ ID NO: 2170 - protein, 623 aa, Homosapiens; identical to SEQ ID NO: 2166

SEQ ID NO: 2171 - DNA, 694 bp, Homosapiens
aaaacttgatttcaaagtgaaattagacatctatcccccctcattgcctccccccaaaaaccaccactcctgactttaattttatttttaattgtacttgtttatttacttagtgtcatatctgaatgacttactttttctgcctattttaaggtaacttttacgtaggctgcctctccaggaagaaaatgtatcctggattacaaaagaagagtgggaaataggggaatctaataaagctgtgttaatgagtatgactttgtacttttttagaagcagacttcaattgttttaatacggtttcatggatacgataaaaaatcaaatctggcaaaacccagtcgtaaatgaggcctccccaaaatcattgcagaaaatcatattattatatggttaatgaaatgaccagagtgagcctgtaccgctagcctgcaagaaattctggggtctagcggcatgatttaagtctgtcttggccctggccaccagttgctgtcaccttgtttaaacatggatggggacaattttgagtccagctactgggattaggacttctactttattaatgcatatatttctgtaaaatatatttctagaagtaggattagtagattggtattaagcatttccagtgccaagtattattaatacttgcaattttgaaattcaaaaagctctgaaaaatcaagttgtt

SEQ ID NO: 2172 - protein, 30 aa, Homosapiens
MDTIKNQIWQNPVVNEASPKSLQKIILLYG

SEQ ID NO: 2173 - DNA, 478 bp, Homosapiens
aaaggaaaaattatcttaatattttagaacactgaattcagatttcaagtgtcaaatgtttgcaaaaaagtcccaatattctctgaaaacattggatttctcttatgtaaaataccatttagacagaatgaaaaaagagaactgtatttggagtgctgagaccttgaaattggaatcttcggacctggtgaaggtgtggaatccaggagttgggaaagtgctgcaaaagcttcaccagtgggtgggttaataaaaataatttcgaatatctgtgtagtgctgtgtgtcaggtactgaaccaagtatgaaatgtaatcctagaacaattcattgagaagagagttgtacttttaactacattttatagatgagcaaactgaggcaggagaattgcttgaacccgggtggtggaggtggcagtgagcctagatcacaccattgcactccagcctgggcgacagagcgagactctgtcttt

SEQ ID NO: 2174 - protein, 36 aa, Homosapiens
MSKLRQENCLNPGGGGGSEPRSHHCTPAWATERDSV

SEQ ID NO: 2175 - DNA, 556 bp, Homosapiens
tatcccatgtcactcacgtcttcaaactcttcctttctattgtgatcttgccccagtatttaaaaattgttttggctcatgcctgtaatctcaacactgggaggtcgaggtaggtggatcacttgaggtcaagagtttgagaccagcctggccaacatggtgaaaccccatgtctcagcctcccaagtagctgggactataggcgcccgccaccacacctggctaattttttgtatttctagtagagacggagtttcactctgttagccaggatggtctcgatctcctgacctcgtgatccgcccaccttggcctcccaaagtgctgggattacaggcgtgagccaccgcaccttgccttgagtaaatatcttaatgtatgtatgcaagtatttcaatagaatagttacctaataatggaattacatattttaagtttgacagattctaccaaattaccctccaaaagagtctaccaatttatccattctcttacagtatataaagtggcccatttccctatccagcagcatttaaacaagctcaagtctcccttt

SEQ ID NO: 2176 - protein, 36 aa, Homosapiens
MVKPHVSASQVAGTIGARHHTWLIFCISSRDGVSLC

SEQ ID NO: 2177 - DNA, 2842 bp, Homosapiens
gtttcctgatttacaccacatccagatggtgctgagaggatatgaacaggcgagagaagtaacaaggatctcatccattcttgcttcactcaccacttcctttttctcagaggtcaatgcctgatgccaggtccactcactgaaattccataaagactggaatttgttgccttggagcatgtatatacattctcttgttattctcctcccagttcctcatcaggaccttctgttgcttctaatagttaacctctttaaatagcacagtttccctcttctgaaagtaaagttgcagtagggttctgatggcattaatattttaaaagaacttgtgattttgtttacttaaaagtgagggatgtgaacagatgtcgactcaacctgagaaagaaggtatttgttctagtgactaaatttataaatgagattcagagccacttgattaatagaagatatttactttgaaaaatacagcgagacacactaaaaaaattgaccttttgcagtacttttcattggattgcttcataatttcttggtgttggaaaattaattcctaaagcacaagattaaaggatgcttgggtaagcaattagtttacctgtcttttctgggaccttacacggttcatccatgattgcattttcttttagaattggagtttaatgaataaaaactttaatataatctactgattctttatctcactaaggtgaaacactcttatcttacagaaatatttccccttttctttgcttttaggttggcattgcaaatggtatggtcaccgaacaggctacaaagaatgccctttctttatcaaagacaaccaaaagttacaacagttcagagtagcacatgaggatttcatgtatgacatcatacgagacaataaacaacatgaaaagaatgtaaggatacagcagttaaaacagttactggaggattctacctcaggtgaagataggagcagctccagttcctctgaaggtaaagagaaacacaagaaaaagaagaagaaagaaaagcataagaaaaggaagaaagaaaagaaaaagaagaaaaaacggaagcacaaatcttccaagtcaaatgagggttctgactcagagtgacaaggatgtgacttgttcaacattctcttctcaaacactgaccaaggaacagaggaagatgcagtcagagaaagtagcaggatagagacgccgagagaggagtatatgtgggtcacagcagtgagctcccacccgccttgcagtgaagatgtgaccccaggagagggagtgtctccttccaggtgctagctctggacagcagctgattttaggcaggaaagtttcttcatcgttgtcctccctgctggtcacatgagtttacgattccttagaagtgtctcccacagggtggcaggactgggagaatctctgaggcgtgtcttccaggccctcccacagcttgtgccctccacagtgtagacttgaacacttggcctcatgtgatccttccaccttggcctcccaaagcattgggattacaggcgagagccactggttggctaaaatatttatatttacctgacatgatttgttgatttgggggctagggagttcttaaaacaacaataaaaaatcttctgtggctgcattctacttcacttgctttctactgccagagtcccatgattttcacagagtgactgactcagaaaaggtttaggaatatagggggatttgtgtactaggtcaggtatccacatcccaaaatccatccctccctttcttcctcttcctgttgcctgaccacagcccacctgtgctcttgtagctgaaactaggccacagtagaggcatctcaggaggccagggtgtgtctgcagctggaggagaggaagtctatcctttgctgcgccaaagtgaagcggatcttgctcataggcaagtgtgtccctctgtggctagcactggtctcttgctgctttaggcactcagtcagggtcccagaaactcactcccattttctgccacttttcctggggtttggattccctcctttttaaggaacagccaagccaggcccagactgacccttcttcaagtctcatcagtcaatgctcctgttcttggcctcggaataccacctcaggaaaacaatcggttgagattggaatggccaggacttaactatttctgaaaactgtaaggccagtggattcagccttgccttacacttatccttgtcatgcagaacacaggccatctgtcctctgccatatgctcagcatttcttacccaggtacagccggtcctcttcttccaggaattggctactgtccctctgcaatcccattcatgataaaagcattcttatacaacacaaaagatgctgcatcaatgattctcaaacctccaagacatccaaatcaactagcatgcttaagatgcagattcctgtgctcgactcaccaacttccagaattttccattccctaggtctgaggtgaacctgggaatctgccttgctaacaaatgatgctgacactgttgatttggggaccccacttggagaacctgggctctagatctctaccctcttactgaagccttcttccacttcctgctttaactggaatccagccgtccacccctgtagcccttgcaaagtgaatcgtcccttttccctcactctgtttttttctcctctgtttctagcctagattccaaggaacatcactttggcctgtcatctcccctgatctgtgatccttttgtccagctttccccaaagaagcatcaatcaaaatcttccgctttgctcctatagacagactacaggggaaaaatcc

SEQ ID NO: 2178 - protein, 81 aa, Homosapiens [sequence omitted]

SEQ ID NO: 2179 - DNA, 2128 bp, Homosapiens
agccgctggatcaggaactgcagcgggcccgggagcagaagcggcggcggcacgacgcccagcagctgcagcagctcaagcgcctggagtccttatttccccttttctttgcttttaggttggcattgcaaatggtatggtcaccgaacaggctacaaagaatgccctttctttatcaaagacaaccaaaagttacaacagttcagagtagcacatgaggatttcatgtatgacatcatacgagacaataaacaacatgaaaagaatgtaaggatacagcagttaaaacagttactggaggattctacctcaggtgaagataggagcagctccagttcctctgaaggtaaaaacggaagcacaaatcttccaagtcaaatgagggttctgactcagagtgacaaggatgtgacttgttcaacattctcttctcaaacactgaccaaggaacagaggaagatgcagtcagagaaagtagcaggatagagacgccgagagaggagtatatgtgggtcacagcagtgagctcccacccgccttgcagtgaagatgtgaccccaggagagggagtgtctccttccaggtgctagctctggacagcagctgattttaggcaggaaagtttcttcatcgttgtcctccctgctggtcacatgagtttacgattccttagaagtgtctcccacagggtggcaggactgggagaatctctgaggcgtgtcttccaggccctcccacagcttgtgccctccacagtgtagacttgaacacttggcctcatgtgatccttccaccttggcctcccaaagcattgggattacaggcgagagccactggttggctaaaatatttatatttacctgacatgatttgttgatttgggggctagggagttcttaaaacaacaataaaaaatcttctgtggctgcattctacttcacttgctttctactgccagagtcccatgattttcacagagtgactgactcagaaaaggtttaggaatatagggggatttgtgtactaggtcaggtatccacatcccaaaatccatccctccctttcttcctcttcctgttgcctgaccacagcccacctgtgctcttgtagctgaaactaggccacagtagaggcatctcaggaggccagggtgtgtctgcagctggaggagaggaagtctatcctttgctgcgccaaagtgaagcggatcttgctcataggcaagtgtgtccctctgtggctagcactggtctcttgctgctttaggcactcagtcagggtcccagaaactcactcccattttctgccacttttcctggggtttggattccctcctttttaaggaacagccaagccaggcccagactgacccttcttcaagtctcatcagtcaatgctcctgttcttggcctcggaataccacctcaggaaaacaatcggttgagattggaatggccaggacttaactatttctgaaaactgtaaggccagtggattcagccttgccttacacttatccttgtcatgcagaacacaggccatctgtcctctgccatatgctcagcatttcttacccaggtacagccggtcctcttcttccaggaattggctactgtccctctgcaatcccattcatgataaaagcattcttatacaacacaaaagatgctgcatcaatgattctcaaacctccaagacatccaaatcaactagcatgcttaagatgcagattcctgtgctcgactcaccaacttccagaattttccattccctaggtctgaggtgaacctgggaatctgccttgctaacaaatgatgctgacactgttgatttggggaccccacttggagaacctgggctctagatctctaccctcttactgaagccttcttccacttcctgctttaactggaatccagccgtccacccctgtagcccttgcaaagtgaatcgtcccttttccctcactctgtttttttctcctctgtttctagcctagattccaaggaacatcactttggcctgtcatctcccctgatctgtgatccttttgtccagctttccccaaagaagcatcaatcaaaatcttccgctttgctcctatagacagactacaggggaaaaatcc

SEQ ID NO: 2180 - protein, 86 aa, Homosapiens
MYDIIRDNKQHEKNVRIQQLKQLLEDSTSGEDRSSSSSSEGKNGSTNLPSQMRVLTQSDKDVTCSTFSSQTLTKEQRKMQSEKVAG

SEQ ID NO: 2181 - DNA, 2094 bp, Homosapiens
gggcgcgaggatgcgagggctgggggcgcgtggtggccgcgggagccgctggatcaggaactgcagcgggcccgggagcagaagcggcggcggcacgacgcccagcagctgcagcagctcaagcgcctggagtccttatttccccttttctttgcttttaggttggcattgcaaatggtatggtcaccgaacaggctacaaagaatgccctttctttatcaaagacaaccaaaagttacaacagttcagagtagcacatgaggatttcatgtatgacatcatacgagacaataaacaacatgaaaagaatgtaaggatacagcagttaaaacagttactggaggattctacctcaggtgaagataggagcagctccagttcctctgaaggtaaagagaaacacaagaaaaagaagaagaaagaaaagcataagaaaaggaagaaagaaaagaaaaagaagaaaaaacggaagcacaaatcttccaagtcaaatgagggttctgactcagatgaagatgtgaccccaggagagggagtgtctccttccaggtgctagctctggacagcagctgattttaggcaggaaagtttcttcatcgttgtcctccctgctggtcacatgagtttacgattccttagaagtgtctcccacagggtggcaggactgggagaatctctgaggcgtgtcttccaggccctcccacagcttgtgccctccacagtgtagacttgaacacttggcctcatgtgatccttccaccttggcctcccaaagcattgggattacaggcgagagccactggttggctaaaatatttatatttacctgacatgatttgttgatttgggggctagggagttcttaaaacaacaataaaaaatcttctgtggctgcattctacttcacttgctttctactgccagagtcccatgattttcacagagtgactgactcagaaaaggtttaggaatatagggggatttgtgtactaggtcaggtatccacatcccaaaatccatccctccctttcttcctcttcctgttgcctgaccacagcccacctgtgctcttgtagctgaaactaggccacagtagaggcatctcaggaggccagggtgtgtctgcagctggaggagaggaagtctatcctttgctgcgccaaagtgaagcggatcttgctcataggcaagtgtgtccctctgtggctagcactggtctcttgctgctttaggcactcagtcagggtcccagaaactcactcccattttctgccacttttcctggggtttggattccctcctttttaaggaacagccaagccaggcccagactgacccttcttcaagtctcatcagtcaatgctcctgttcttggcctcggaataccacctcaggaaaacaatcggttgagattggaatggccaggacttaactatttctgaaaactgtaaggccagtggattcagccttgccttacacttatccttgtcatgcagaacacaggccatctgtcctctgccatatgctcagcatttcttacccaggtacagccggtcctcttcttccaggaattggctactgtccctctgcaatcccattcatgataaaagcattcttatacaacacaaaagatgctgcatcaatgattctcaaacctccaagacatccaaatcaactagcatgcttaagatgcagattcctgtgctcgactcaccaacttccagaattttccattccctaggtctgaggtgaacctgggaatctgccttgctaacaaatgatgctgacactgttgatttggggaccccacttggagaacctgggctctagatctctaccctcttactgaagccttcttccacttcctgctttaactggaatccagccgtccacccctgtagcccttgcaaagtgaatcgtcccttttccctcactctgtttttttctcctctgtttctagcctagattccaaggaacatcactttggcctgtcatctcccctgatctgtgatccttttgtccagctttccccaaagaagcatcaatcaaaatcttccgctttgctcctatagacagactacaggggaaaaatcc

SEQ ID NO: 2182 - protein, 181 aa, Homosapiens
MRGLGARGGRGSRWIRNCSGPGSRSGGGTTPSSCSSSSAWSPYFPFSLLLGWHCKWYGHRTGYKECPFFIKDNQKLQQFRVAHEDFMYDIIRDNKQHEKNVRIQQLKQLLEDSTSGEDRSSSSSSEGKEKHKKKKKKEKHKKRKKEKKKKKKRKHKSSKSNEGSDSDEDVTPGEGVSPSRC

SEQ ID NO: 2183 - DNA, 2300 bp, Homosapiens
tcttggccgcagccagagccgcgccgcaggtgccgcgatgtcgtcctggccggggcgcgaggatgcgagggctgggggcgcgtggtggccgcgggagccgctggatcaggaactgcagcgggcccgggagcagaagcggcggcggcacgacgcccagcagctgcagcagctcaagcgcctggagtccttttatgaaaaacctcctcctgggcttatcaaggttggcattgcaaatggtatggtcaccgaacaggctacaaagaatgccctttctttatcaaagacaaccaaaagttacaacagttcagagtagcacatgaggatttcatgtatgacatcatacgagacaataaacaacatgaaaagaatgtaaggatacagcagttaaaacagttactggaggattctacctcaggtgaagataggagcagctccagttcctctgaaggtaaagagaaacacaagaaaaagaagaagaaagaaaagcataagaaaaggaagaaagaaaagaaaaagaagaaaaaacggaagcacaaatcttccaagtcaaatgagggttctgactcagagtgacaaggatgtgacttgttcaacattctcttctcaaacactgaccaaggaacagaggaagatgcagtcagagaaagtagcaggatagagacgccgagagaggagtatatgtgggtcacagcagtgagctcccacccgccttgcagtgaagatgtgaccccaggagagggagtgtctccttccaggtgctagctctggacagcagctgattttaggcaggaaagtttcttcatcgttgtcctccctgctggtcacatgagtttacgattccttagaagtgtctcccacagggtggcaggactgggagaatctctgaggcgtgtcttccaggccctcccacagcttgtgccctccacagtgtagacttgaacacttggcctcatgtgatccttccaccttggcctcccaaagcattgggattacaggcgagagccactggttggctaaaatatttatatttacctgacatgatttgttgatttgggggctagggagttcttaaaacaacaataaaaaatcttctgtggctgcattctacttcacttgctttctactgccagagtcccatgattttcacagagtgactgactcagaaaaggtttaggaatatagggggatttgtgtactaggtcaggtatccacatcccaaaatccatccctccctttcttcctcttcctgttgcctgaccacagcccacctgtgctcttgtagctgaaactaggccacagtagaggcatctcaggaggccagggtgtgtctgcagctggaggagaggaagtctatcctttgctgcgccaaagtgaagcggatcttgctcataggcaagtgtgtccctctgtggctagcactggtctcttgctgctttaggcactcagtcagggtcccagaaactcactcccattttctgccacttttcctggggtttggattccctcctttttaaggaacagccaagccaggcccagactgacccttcttcaagtctcatcagtcaatgctcctgttcttggcctcggaataccacctcaggaaaacaatcggttgagattggaatggccaggacttaactatttctgaaaactgtaaggccagtggattcagccttgccttacacttatccttgtcatgcagaacacaggccatctgtcctctgccatatgctcagcatttcttacccaggtacagccggtcctcttcttccaggaattggctactgtccctctgcaatcccattcatgataaaagcattcttatacaacacaaaagatgctgcatcaatgattctcaaacctccaagacatccaaatcaactagcatgcttaagatgcagattcctgtgctcgactcaccaacttccagaattttccattccctaggtctgaggtgaacctgggaatctgccttgctaacaaatgatgctgacactgttgatttggggaccccacttggagaacctgggctctagatctctaccctcttactgaagccttcttccacttcctgctttaactggaatccagccgtccacccctgtagcccttgcaaagtgaatcgtcccttttccctcactctgtttttttctcctctgtttctagcctagattccaaggaacatcactttggcctgtcatctcccctgatctgtgatccttttgtccagctttccccaaagaagcatcaatcaaaatcttccgctttgctcctatagacagactacaggggaaaaatcc

SEQ ID NO: 2184 - protein, 91 aa, Homosapiens
MSSWPGREDARAGGAWWPREPLDQELQRAREQKRRRHDAQQLQQLKRLESFYEKPPPGLIKVGIANGMVTEQATKNALSLSKTTKSYNSSE

SEQ ID NO: 2185 - DNA, 2344 bp, Homosapiens
gccgcgggcaggcgggcatctggcggccgaggccgggacttcggggcccctcccgggcgagtcgcggggcggcggcgggaaggggcgccgcacggaggaagtgccctcttggccgcagccagagccgcgccgcaggtgccgcgatgtcgtcctggccggggcgcgaggatgcgagggctgggggcgcgtggtggccgcgggagccgctggatcaggaactgcagcgggcccgggagcagaagcggcggcggcacgacgcccagcagctgcagcagctcaagcgcctggagtccttttatgaaaaacctcctcctgggcttatcaaggttggcattgcaaatggtatggtcaccgaacaggctacaaagaatgccctttctttatcaaagacaaccaaaagttacaacagttcagagtagatacagcagttaaaacagttactggaggattctacctcaggtgaagataggagcagctccagttcctctgaaggtaaagagaaacacaagaaaaagaagaagaaagaaaagcataagaaaaggaagaaagaaaagaaaaagaagaaaaaacggaagcacaaatcttccaagtcaaatgagggttctgactcagagtgacaaggatgtgacttgttcaacattctcttctcaaacactgaccaaggaacagaggaagatgcagtcagagaaagtagcaggatagagacgccgagagaggagtatatgtgggtcacagcagtgagctcccacccgccttgcagtgaagatgtgaccccaggagagggagtgtctccttccaggtgctagctctggacagcagctgattttaggcaggaaagtttcttcatcgttgtcctccctgctggtcacatgagtttacgattccttagaagtgtctcccacagggtggcaggactgggagaatctctgaggcgtgtcttccaggccctcccacagcttgtgccctccacagtgtagacttgaacacttggcctcatgtgatccttccaccttggcctcccaaagcattgggattacaggcgagagccactggttggctaaaatatttatatttacctgacatgatttgttgatttgggggctagggagttcttaaaacaacaataaaaaatcttctgtggctgcattctacttcacttgctttctactgccagagtcccatgattttcacagagtgactgactcagaaaaggtttaggaatatagggggatttgtgtactaggtcaggtatccacatcccaaaatccatccctccctttcttcctcttcctgttgcctgaccacagcccacctgtgctcttgtagctgaaactaggccacagtagaggcatctcaggaggccagggtgtgtctgcagctggaggagaggaagtctatcctttgctgcgccaaagtgaagcggatcttgctcataggcaagtgtgtccctctgtggctagcactggtctcttgctgctttaggcactcagtcagggtcccagaaactcactcccattttctgccacttttcctggggtttggattccctcctttttaaggaacagccaagccaggcccagactgacccttcttcaagtctcatcagtcaatgctcctgttcttggcctcggaataccacctcaggaaaacaatcggttgagattggaatggccaggacttaactatttctgaaaactgtaaggccagtggattcagccttgccttacacttatccttgtcatgcagaacacaggccatctgtcctctgccatatgctcagcatttcttacccaggtacagccggtcctcttcttccaggaattggctactgtccctctgcaatcccattcatgataaaagcattcttatacaacacaaaagatgctgcatcaatgattctcaaacctccaagacatccaaatcaactagcatgcttaagatgcagattcctgtgctcgactcaccaacttccagaattttccattccctaggtctgaggtgaacctgggaatctgccttgctaacaaatgatgctgacactgttgatttggggaccccacttggagaacctgggctctagatctctaccctcttactgaagccttcttccacttcctgctttaactggaatccagccgtccacccctgtagcccttgcaaagtgaatcgtcccttttccctcactctgtttttttctcctctgtttctagcctagattccaaggaacatcactttggcctgtcatctcccctgatctgtgatccttttgtccagctttccccaaagaagcatcaatcaaaatcttccgctttgctcctatagacagactacaggggaaaaatcc

SEQ ID NO: 2186 - protein, 91 aa, Homosapiens; identical to SEQ ID NO: 2184

SEQ ID NO: 2187 - DNA, 2600 bp, Homosapiens
gccggccgcgggcaggcgggcatctggcggccgaggccgggacttcggggcccctcccgggcgagtcgcggggcggcggcgggaaggggcgccgcacggaggaagtgccctcttggccgcagccagagccgcgccgcaggtgccgcgatgtcgtcctggccggggcgcgaggatgcgagggctgggggcgcgtggtggccgcgggagccgctggatcaggaactgcagcgggcccgggagcagaagcggcggcggcacgacgcccagcagctgcagcagctcaagcgcctggagtccttaaagggtctcacctgtggccaggagcggtggctcacgcctgtaatcccagcactttgagaggccgcggtggacagatcacgagagcttcccctgtgtctgctgtttctcaaaatgatccttagccaaaaaggtgtgctttgaggtagcatattctggtctcctacagctattcaactgaggacagagtagttatgaaaaacctcctcctgggcttatcaaggttggcattgcaaatggtatggtcaccgaacaggctacaaagaatgccctttctttatcaaagacaaccaaaagttacaacagttcagagtagcacatgaggatttcatgtatgacatcatacgagacaataaacaacatgaaaagaatgtaaggatacagcagttaaaacagttactggaggattctacctcaggtgaagataggagcagctccagttcctctgaaggtaaagagaaacacaagaaaaagaagaagaaagaaaagcataagaaaaggaagaaagaaaagaaaaagaagaaaaaacggaagcacaaatcttccaagtcaaatgagggttctgactcagagtgacaaggatgtgacttgttcaacattctcttctcaaacactgaccaaggaacagaggaagatgcagtcagagaaagtagcaggatagagacgccgagagaggagtatatgtgggtcacagcagtgagctcccacccgccttgcagtgaagatgtgaccccaggagagggagtgtctccttccaggtgctagctctggacagcagctgattttaggcaggaaagtttcttcatcgttgtcctccctgctggtcacatgagtttacgattccttagaagtgtctcccacagggtggcaggactgggagaatctctgaggcgtgtcttccaggccctcccacagcttgtgccctccacagtgtagacttgaacacttggcctcatgtgatccttccaccttggcctcccaaagcattgggattacaggcgagagccactggttggctaaaatatttatatttacctgacatgatttgttgatttgggggctagggagttcttaaaacaacaataaaaaatcttctgtggctgcattctacttcacttgctttctactgccagagtcccatgattttcacagagtgactgactcagaaaaggtttaggaatatagggggatttgtgtactaggtcaggtatccacatcccaaaatccatccctccctttcttcctcttcctgttgcctgaccacagcccacctgtgctcttgtagctgaaactaggccacagtagaggcatctcaggaggccagggtgtgtctgcagctggaggagaggaagtctatcctttgctgcgccaaagtgaagcggatcttgctcataggcaagtgtgtccctctgtggctagcactggtctcttgctgctttaggcactcagtcagggtcccagaaactcactcccattttctgccacttttcctggggtttggattccctcctttttaaggaacagccaagccaggcccagactgacccttcttcaagtctcatcagtcaatgctcctgttcttggcctcggaataccacctcaggaaaacaatcggttgagattggaatggccaggacttaactatttctgaaaactgtaaggccagtggattcagccttgccttacacttatccttgtcatgcagaacacaggccatctgtcctctgccatatgctcagcatttcttacccaggtacagccggtcctcttcttccaggaattggctactgtccctctgcaatcccattcatgataaaagcattcttatacaacacaaaagatgctgcatcaatgattctcaaacctccaagacatccaaatcaactagcatgcttaagatgcagattcctgtgctcgactcaccaacttccagaattttccattccctaggtctgaggtgaacctgggaatctgccttgctaacaaatgatgctgacactgttgatttggggaccccacttggagaacctgggctctagatctctaccctcttactgaagccttcttccacttcctgctttaactggaatccagccgtccacccctgtagcccttgcaaagtgaatcgtcccttttccctcactctgtttttttctcctctgtttctagcctagattccaaggaacatcactttggcctgtcatctcccctgatctgtgatccttttgtccagctttccccaaagaagcatcaatcaaaatcttccgctttgctcctatagacagactacaggggaaaaatcc

SEQ ID NO: 2188 - protein, 81 aa, Homosapiens [sequence omitted]

SEQ ID NO: 2189 - DNA, 2501 bp, Homosapiens
gacttggggccggccgcgggcaggcgggcatctggcggccgaggccgggacttcggggcccctcccgggcgagtcgcggggcggcggcgggaaggggcgccgcacggaggaagtgccctcttggccgcagccagagccgcgccgcaggtgccgcgatgtcgtcctggccggggcgcgaggatgcgagggctgggggcgcgtggtggccgcgggagccgctggatcaggaactgcagcgggcccgggagcagaagcggcggcggcacgacgcccagcagctgcagcagctcaagcgcctggagtccttaaagggtctcacctgtggccaggagcggtggctcacgcctgtaatcccagcactttgagaggccgcggtggacagatcacgagttatgaaaaacctcctcctgggcttatcaaggttggcattgcaaatggtatggtcaccgaacaggctacaaagaatgccctttctttatcaaagacaaccaaaagttacaacagttcagagtagcacatgaggatttcatgtatgacatcatacgagacaataaacaacatgaaaagaatgtaaggatacagcagttaaaacagttactggaggattctacctcaggtgaagataggagcagctccagttcctctgaaggtaaagagaaacacaagaaaaagaagaagaaagaaaagcataagaaaaggaagaaagaaaagaaaaagaagaaaaaacggaagcacaaatcttccaagtcaaatgagggttctgactcagagtgacaaggatgtgacttgttcaacattctcttctcaaacactgaccaaggaacagaggaagatgcagtcagagaaagtagcaggatagagacgccgagagaggagtatatgtgggtcacagcagtgagctcccacccgccttgcagtgaagatgtgaccccaggagagggagtgtctccttccaggtgctagctctggacagcagctgattttaggcaggaaagtttcttcatcgttgtcctccctgctggtcacatgagtttacgattccttagaagtgtctcccacagggtggcaggactgggagaatctctgaggcgtgtcttccaggccctcccacagcttgtgccctccacagtgtagacttgaacacttggcctcatgtgatccttccaccttggcctcccaaagcattgggattacaggcgagagccactggttggctaaaatatttatatttacctgacatgatttgttgatttgggggctagggagttcttaaaacaacaataaaaaatcttctgtggctgcattctacttcacttgctttctactgccagagtcccatgattttcacagagtgactgactcagaaaaggtttaggaatatagggggatttgtgtactaggtcaggtatccacatcccaaaatccatccctccctttcttcctcttcctgttgcctgaccacagcccacctgtgctcttgtagctgaaactaggccacagtagaggcatctcaggaggccagggtgtgtctgcagctggaggagaggaagtctatcctttgctgcgccaaagtgaagcggatcttgctcataggcaagtgtgtccctctgtggctagcactggtctcttgctgctttaggcactcagtcagggtcccagaaactcactcccattttctgccacttttcctggggtttggattccctcctttttaaggaacagccaagccaggcccagactgacccttcttcaagtctcatcagtcaatgctcctgttcttggcctcggaataccacctcaggaaaacaatcggttgagattggaatggccaggacttaactatttctgaaaactgtaaggccagtggattcagccttgccttacacttatccttgtcatgcagaacacaggccatctgtcctctgccatatgctcagcatttcttacccaggtacagccggtcctcttcttccaggaattggctactgtccctctgcaatcccattcatgataaaagcattcttatacaacacaaaagatgctgcatcaatgattctcaaacctccaagacatccaaatcaactagcatgcttaagatgcagattcctgtgctcgactcaccaacttccagaattttccattccctaggtctgaggtgaacctgggaatctgccttgctaacaaatgatgctgacactgttgatttggggaccccacttggagaacctgggctctagatctctaccctcttactgaagccttcttccacttcctgctttaactggaatccagccgtccacccctgtagcccttgcaaagtgaatcgtcccttttccctcactctgtttttttctcctctgtttctagcctagattccaaggaacatcactttggcctgtcatctcccctgatctgtgatccttttgtccagctttccccaaagaagcatcaatcaaaatcttccgctttgctcctatagacagactacaggggaaaaatcc

SEQ ID NO: 2190 - protein, 81 aa, Homosapiens [sequence omitted]

SEQ ID NO: 2191 - DNA, 3028 bp, Homosapiens
tgcgcactgacttggggccggccgcgggcaggcgggcatctggcggccgaggccgggacttcggggcccctcccgggcgagtcgcggggcggcggcgggaaggggcgccgcacggaggaagtgccctcttggccgcagccagagccgcgccgcaggtgccgcgatgtcgtcctggccggggcgcgaggatgcgagggctgggggcgcgtggtggccgcgggagccgctggatcaggaactgcagcgggcccgggagcagaagcggcggcggcacgacgcccagcagctgcagcagctcaagcgcctggagtccttgtgagtctcgagcagccgtctgggccgcagtccgcgcgccgcccgttttctgggaacaggggcgcccggcgccgtgttgggcgctgggctgggtcctccaagcccccaggacccaggcaggggtgcgggcctgtgaggaacctagtgcctgcgacgggacttctagtcctcactgggtggggagcgaggcccgcccggccacggaggggccctggaggccgcggcgcgggtgggcgggggcctcggcccggggaggcggcagcggcttgcgctcctcgcccccgctttggtgtgggcgtcgcctcttttggggaagccaagagttattggcgcttgctcggcatttgtggaccgaacaggcaagttcaaccgagcacgctgcccccgcgctccacctctgagttccctgggccactgcgacatggagaaaccccgttcttttcatcctctgctacggagaagggacgaggacacgggtcctgcagtgttggtgtggcgaggcccggaagaagagagaatgggcggcggggactggccacggcgctgctagaaagggtctcacctgtggccaggagcggtggctcacgcctgtaatcccagcactttgagaggccgcggtggacagatcacgaggttggcattgcaaatggtatggtcaccgaacaggctacaaagaatgccctttctttatcaaagacaaccaaaagttacaacagttcagagtagcacatgaggatttcatgtatgacatcatacgagacaataaacaacatgaaaagaatgtaaggatacagcagttaaaacagttactggaggattctacctcaggtgaagataggagcagctccagttcctctgaaggtaaagagaaacacaagaaaaagaagaagaaagaaaagcataagaaaaggaagaaagaaaagaaaaagaagaaaaaacggaagcacaaatcttccaagtcaaatgagggttctgactcagagtgacaaggatgtgacttgttcaacattctcttctcaaacactgaccaaggaacagaggaagatgcagtcagagaaagtagcaggatagagacgccgagagaggagtatatgtgggtcacagcagtgagctcccacccgccttgcagtgaagatgtgaccccaggagagggagtgtctccttccaggtgctagctctggacagcagctgattttaggcaggaaagtttcttcatcgttgtcctccctgctggtcacatgagtttacgattccttagaagtgtctcccacagggtggcaggactgggagaatctctgaggcgtgtcttccaggccctcccacagcttgtgccctccacagtgtagacttgaacacttggcctcatgtgatccttccaccttggcctcccaaagcattgggattacaggcgagagccactggttggctaaaatatttatatttacctgacatgatttgttgatttgggggctagggagttcttaaaacaacaataaaaaatcttctgtggctgcattctacttcacttgctttctactgccagagtcccatgattttcacagagtgactgactcagaaaaggtttaggaatatagggggatttgtgtactaggtcaggtatccacatcccaaaatccatccctccctttcttcctcttcctgttgcctgaccacagcccacctgtgctcttgtagctgaaactaggccacagtagaggcatctcaggaggccagggtgtgtctgcagctggaggagaggaagtctatcctttgctgcgccaaagtgaagcggatcttgctcataggcaagtgtgtccctctgtggctagcactggtctcttgctgctttaggcactcagtcagggtcccagaaactcactcccattttctgccacttttcctggggtttggattccctcctttttaaggaacagccaagccaggcccagactgacccttcttcaagtctcatcagtcaatgctcctgttcttggcctcggaataccacctcaggaaaacaatcggttgagattggaatggccaggacttaactatttctgaaaactgtaaggccagtggattcagccttgccttacacttatccttgtcatgcagaacacaggccatctgtcctctgccatatgctcagcatttcttacccaggtacagccggtcctcttcttccaggaattggctactgtccctctgcaatcccattcatgataaaagcattcttatacaacacaaaagatgctgcatcaatgattctcaaacctccaagacatccaaatcaactagcatgcttaagatgcagattcctgtgctcgactcaccaacttccagaattttccattccctaggtctgaggtgaacctgggaatctgccttgctaacaaatgatgctgacactgttgatttggggaccccacttggagaacctgggctctagatctctaccctcttactgaagccttcttccacttcctgctttaactggaatccagccgtccacccctgtagcccttgcaaagtgaatcgtcccttttccctcactctgtttttttctcctctgtttctagcctagattccaaggaacatcactttggcctgtcatctcccctgatctgtgatccttttgtccagctttccccaaagaagcatcaatcaaaatcttccgctttgctcctatagacagactacaggggaaaaatcc

SEQ ID NO: 2192 - protein, 81 aa, Homosapiens [sequence omitted]

SEQ ID NO: 2193 - DNA, 2744 bp, Homosapiens
atggctgaatcctattgctatgtaatgagcagctcccgtgccgcgatgtcgtcctggccggggcgcgaggatgcgagggctgggggcgcgtggtggccgcgggagccgctggatcaggaactgcagcgggcccgggagcagaagcggcggcggcacgacgcccagcagctgcagcagctcaagcgcctggagtccttggttcagggtgggcattcagggagccagctgccgtttggcaccacgcggaattcgggccctgacttgggaggccttgcgctcccgtggctccagttcaaggagggtccagatgacccgggagagtgtggtgtaaagaagattcaaagttatgaaaaacctcctcctgggcttatcaagccttacttggctcagtccctcagtccatcctgtgttggtttcttgagtatcagcagctcagagagcagtcaactccgaggagacccgacagctcatccagtccagctccccggtggaggcatccttcctgcagctcctggctacggcaccagggaagatgaggctaagccagaagatagcataccagatataccaggcaatgaatacgccagagaatttctggctcatgcaccaactaaaggactttggttgccactggggaaagaagtcagagttatgcagtgtgaatgttggcattgcaaatggtatggtcaccgaacaggctacaaagaatgccctttctttatcaaagacaaccaaaagttacaacagttcagagtagcacatgaggatttcatgtatgacatcatacgagacaataaacaacatgaaaagaatgtaaggatacagcagttaaaacagttactggaggattctacctcaggtgaagataggagcagctccagttcctctgaaggtaaagagaaacacaagaaaaagaagaagaaagaaaagcataagaaaaggaagaaagaaaagaaaaagaagaaaaaacggaagcacaaatcttccaagtcaaatgagggttctgactcagagtgacaaggatgtgacttgttcaacattctcttctcaaacactgaccaaggaacagaggaagatgcagtcagagaaagtagcaggatagagacgccgagagaggagtatatgtgggtcacagcagtgagctcccacccgccttgcagtgaagatgtgaccccaggagagggagtgtctccttccaggtgctagctctggacagcagctgattttaggcaggaaagtttcttcatcgttgtcctccctgctggtcacatgagtttacgattccttagaagtgtctcccacagggtggcaggactgggagaatctctgaggcgtgtcttccaggccctcccacagcttgtgccctccacagtgtagacttgaacacttggcctcatgtgatccttccaccttggcctcccaaagcattgggattacaggcgagagccactggttggctaaaatatttatatttacctgacatgatttgttgatttgggggctagggagttcttaaaacaacaataaaaaatcttctgtggctgcattctacttcacttgctttctactgccagagtcccatgattttcacagagtgactgactcagaaaaggtttaggaatatagggggatttgtgtactaggtcaggtatccacatcccaaaatccatccctccctttcttcctcttcctgttgcctgaccacagcccacctgtgctcttgtagctgaaactaggccacagtagaggcatctcaggaggccagggtgtgtctgcagctggaggagaggaagtctatcctttgctgcgccaaagtgaagcggatcttgctcataggcaagtgtgtccctctgtggctagcactggtctcttgctgctttaggcactcagtcagggtcccagaaactcactcccattttctgccacttttcctggggtttggattccctcctttttaaggaacagccaagccaggcccagactgacccttcttcaagtctcatcagtcaatgctcctgttcttggcctcggaataccacctcaggaaaacaatcggttgagattggaatggccaggacttaactatttctgaaaactgtaaggccagtggattcagccttgccttacacttatccttgtcatgcagaacacaggccatctgtcctctgccatatgctcagcatttcttacccaggtacagccggtcctcttcttccaggaattggctactgtccctctgcaatcccattcatgataaaagcattcttatacaacacaaaagatgctgcatcaatgattctcaaacctccaagacatccaaatcaactagcatgcttaagatgcagattcctgtgctcgactcaccaacttccagaattttccattccctaggtctgaggtgaacctgggaatctgccttgctaacaaatgatgctgacactgttgatttggggaccccacttggagaacctgggctctagatctctaccctcttactgaagccttcttccacttcctgctttaactggaatccagccgtccacccctgtagcccttgcaaagtgaatcgtcccttttccctcactctgtttttttctcctctgtttctagcctagattccaaggaacatcactttggcctgtcatctcccctgatctgtgatccttttgtccagctttccccaaagaagcatcaatcaaaatcttccgctttgctcctatagacagactacaggggaaaaatcc

SEQ ID NO: 2194 - protein, 338 aa, Homosapiens
MAESYCYVMSSSRAAMSSWPGREDARAGGAWWPREPLDQELQRAREQKRRRHDAQQLQQLKRLESLVQGGHSGSQLPFGTTRNSGPDLGGLALPWLQFKEGPDDPGECGVKKIQSYEKPPPGLIKPYLAQSLSPSCVGFLSISSSESSQLRGDPTAHPVQLPGGGILPAAPGYGTREDEAKPEDSIPDIPGNEYAREFLAHAPTKGLWLPLGKEVRVMQCECWHCKWYGHRTGYKECPFFIKDNQKLQQFRVAHEDFMYDIIRDNKQHEKNVRIQQLKQLLEDSTSGEDRSSSSSSEGKEKHKKKKKKEKHKKRKKEKKKKKKRKHKSSKSNEGSDSE

SEQ ID NO: 2195 - DNA, 1648 bp, Homosapiens
gtttcctgatttacaccacatccagatggtgctgagaggatatgaacaggcgagagaagtaacaaggatctcatccattcttgcttcactcaccacttcctttttctcagaggtcaatgcctgatgccaggtccactcactgaaattccataaagactggaatttgttgccttggagcatgtatatacattctcttgttattctcctcccagttcctcatcaggaccttctgttgcttctaatagttaacctctttaaatagcacagtttccctcttctgaaagtaaagttgcagtagggttctgatggcattaatattttaaaagaacttgtgattttgtttacttaaaagtgagggatgtgaacagatgtcgactcaacctgagaaagaaggtatttgttctagtgactaaatttataaatgagattcagagccacttgattaatagaagatatttactttgaaaaatacagcgagacacactaaaaaaattgaccttttgcagtacttttcattggattgcttcataatttcttggtgttggaaaattaattcctaaagcacaagattaaaggatgcttgggtaagcaattagtttacctgtcttttctgggaccttacacggttcatccatgattgcattttcttttagaattggagtttaatgaataaaaactttaatataatctactgattctttatctcactaaggtgaaacactcttatcttacagaaatatttccccttttctttgcttttaggttggcattgcaaatggtatggtcaccgaacaggctacaaagaatgccctttctttatcaaagacaaccaaaagttacaacagttcagagtagcacatgaggatttcatgtatgacatcatacgagacaataaacaacatgaaaagaatgtaaggatacagcagttaaaacagttactggaggattctacctcaggtgaagataggagcagctccagttcctctgaaggtaaagagaaacacaagaaaaagaagaagaaagaaaagcataagaaaaggaagaaagaaaagaaaaagaagaaaaaacggaagcacaaatcttccaagtcaaatgagggttctgactcagagtgacaaggatgtgacttgttcaacattctcttctcaaacactgaccaaggaacagaggaagatgcagtcagagaaagtagcaggatagagacgccgagagaggagtatatgtgggtcacagcagtgagctcccacccgccttgcagtgaagatgtgaccccaggagagggagtgtctccttccaggtgctagctctggacagcagctgattttaggcaggaaagtttcttcatcgttgtcctccctgctggtcacatgagtttacgattccttagaagtgtctcccacagggtggcaggactgggagaatctctgaggcgtgtcttccaggccctcccacagcttgtgccctccacagtgtagacttgaacacttggcctcatgtgatccttccaccttggcctcccaaagcattgggattacaggcgagagccactggttggctaaaatatttatatttacctgacatgatttgttgatttgggggctagggagttcttaaaacaacaataaaaaatcttctgtggctgcattct

SEQ ID NO: 2196 - protein, 81 aa, Homosapiens [sequence omitted]

SEQ ID NO: 2197 - DNA, 934 bp, Homosapiens
agccgctggatcaggaactgcagcgggcccgggagcagaagcggcggcggcacgacgcccagcagctgcagcagctcaagcgcctggagtccttatttccccttttctttgcttttaggttggcattgcaaatggtatggtcaccgaacaggctacaaagaatgccctttctttatcaaagacaaccaaaagttacaacagttcagagtagcacatgaggatttcatgtatgacatcatacgagacaataaacaacatgaaaagaatgtaaggatacagcagttaaaacagttactggaggattctacctcaggtgaagataggagcagctccagttcctctgaaggtaaaaacggaagcacaaatcttccaagtcaaatgagggttctgactcagagtgacaaggatgtgacttgttcaacattctcttctcaaacactgaccaaggaacagaggaagatgcagtcagagaaagtagcaggatagagacgccgagagaggagtatatgtgggtcacagcagtgagctcccacccgccttgcagtgaagatgtgaccccaggagagggagtgtctccttccaggtgctagctctggacagcagctgattttaggcaggaaagtttcttcatcgttgtcctccctgctggtcacatgagtttacgattccttagaagtgtctcccacagggtggcaggactgggagaatctctgaggcgtgtcttccaggccctcccacagcttgtgccctccacagtgtagacttgaacacttggcctcatgtgatccttccaccttggcctcccaaagcattgggattacaggcgagagccactggttggctaaaatatttatatttacctgacatgatttgttgatttgggggctagggagttcttaaaacaacaataaaaaatcttctgtggctgcattct

SEQ ID NO: 2198 - protein, 86 aa, Homosapiens; identical to SEQ ID NO: 2180

SEQ ID NO: 2199 - DNA, 1106 bp, Homosapiens
tcttggccgcagccagagccgcgccgcaggtgccgcgatgtcgtcctggccggggcgcgaggatgcgagggctgggggcgcgtggtggccgcgggagccgctggatcaggaactgcagcgggcccgggagcagaagcggcggcggcacgacgcccagcagctgcagcagctcaagcgcctggagtccttttatgaaaaacctcctcctgggcttatcaaggttggcattgcaaatggtatggtcaccgaacaggctacaaagaatgccctttctttatcaaagacaaccaaaagttacaacagttcagagtagcacatgaggatttcatgtatgacatcatacgagacaataaacaacatgaaaagaatgtaaggatacagcagttaaaacagttactggaggattctacctcaggtgaagataggagcagctccagttcctctgaaggtaaagagaaacacaagaaaaagaagaagaaagaaaagcataagaaaaggaagaaagaaaagaaaaagaagaaaaaacggaagcacaaatcttccaagtcaaatgagggttctgactcagagtgacaaggatgtgacttgttcaacattctcttctcaaacactgaccaaggaacagaggaagatgcagtcagagaaagtagcaggatagagacgccgagagaggagtatatgtgggtcacagcagtgagctcccacccgccttgcagtgaagatgtgaccccaggagagggagtgtctccttccaggtgctagctctggacagcagctgattttaggcaggaaagtttcttcatcgttgtcctccctgctggtcacatgagtttacgattccttagaagtgtctcccacagggtggcaggactgggagaatctctgaggcgtgtcttccaggccctcccacagcttgtgccctccacagtgtagacttgaacacttggcctcatgtgatccttccaccttggcctcccaaagcattgggattacaggcgagagccactggttggctaaaatatttatatttacctgacatgatttgttgatttgggggctagggagttcttaaaacaacaataaaaaatcttctgtggctgcattct

SEQ ID NO: 2200 - protein, 91 aa, Homosapiens; identical to SEQ ID NO: 2184

SEQ ID NO: 2201 - DNA, 1150 bp, Homosapiens
gccgcgggcaggcgggcatctggcggccgaggccgggacttcggggcccctcccgggcgagtcgcggggcggcggcgggaaggggcgccgcacggaggaagtgccctcttggccgcagccagagccgcgccgcaggtgccgcgatgtcgtcctggccggggcgcgaggatgcgagggctgggggcgcgtggtggccgcgggagccgctggatcaggaactgcagcgggcccgggagcagaagcggcggcggcacgacgcccagcagctgcagcagctcaagcgcctggagtccttttatgaaaaacctcctcctgggcttatcaaggttggcattgcaaatggtatggtcaccgaacaggctacaaagaatgccctttctttatcaaagacaaccaaaagttacaacagttcagagtagatacagcagttaaaacagttactggaggattctacctcaggtgaagataggagcagctccagttcctctgaaggtaaagagaaacacaagaaaaagaagaagaaagaaaagcataagaaaaggaagaaagaaaagaaaaagaagaaaaaacggaagcacaaatcttccaagtcaaatgagggttctgactcagagtgacaaggatgtgacttgttcaacattctcttctcaaacactgaccaaggaacagaggaagatgcagtcagagaaagtagcaggatagagacgccgagagaggagtatatgtgggtcacagcagtgagctcccacccgccttgcagtgaagatgtgaccccaggagagggagtgtctccttccaggtgctagctctggacagcagctgattttaggcaggaaagtttcttcatcgttgtcctccctgctggtcacatgagtttacgattccttagaagtgtctcccacagggtggcaggactgggagaatctctgaggcgtgtcttccaggccctcccacagcttgtgccctccacagtgtagacttgaacacttggcctcatgtgatccttccaccttggcctcccaaagcattgggattacaggcgagagccactggttggctaaaatatttatatttacctgacatgatttgttgatttgggggctagggagttcttaaaacaacaataaaaaatcttctgtggctgcattct

SEQ ID NO: 2202 - protein, 91 aa, Homosapiens; identical to SEQ ID NO: 2184

SEQ ID NO: 2203 - DNA, 1406 bp, Homosapiens
gccggccgcgggcaggcgggcatctggcggccgaggccgggacttcggggcccctcccgggcgagtcgcggggcggcggcgggaaggggcgccgcacggaggaagtgccctcttggccgcagccagagccgcgccgcaggtgccgcgatgtcgtcctggccggggcgcgaggatgcgagggctgggggcgcgtggtggccgcgggagccgctggatcaggaactgcagcgggcccgggagcagaagcggcggcggcacgacgcccagcagctgcagcagctcaagcgcctggagtccttaaagggtctcacctgtggccaggagcggtggctcacgcctgtaatcccagcactttgagaggccgcggtggacagatcacgagagcttcccctgtgtctgctgtttctcaaaatgatccttagccaaaaaggtgtgctttgaggtagcatattctggtctcctacagctattcaactgaggacagagtagttatgaaaaacctcctcctgggcttatcaaggttggcattgcaaatggtatggtcaccgaacaggctacaaagaatgccctttctttatcaaagacaaccaaaagttacaacagttcagagtagcacatgaggatttcatgtatgacatcatacgagacaataaacaacatgaaaagaatgtaaggatacagcagttaaaacagttactggaggattctacctcaggtgaagataggagcagctccagttcctctgaaggtaaagagaaacacaagaaaaagaagaagaaagaaaagcataagaaaaggaagaaagaaaagaaaaagaagaaaaaacggaagcacaaatcttccaagtcaaatgagggttctgactcagagtgacaaggatgtgacttgttcaacattctcttctcaaacactgaccaaggaacagaggaagatgcagtcagagaaagtagcaggatagagacgccgagagaggagtatatgtgggtcacagcagtgagctcccacccgccttgcagtgaagatgtgaccccaggagagggagtgtctccttccaggtgctagctctggacagcagctgattttaggcaggaaagtttcttcatcgttgtcctccctgctggtcacatgagtttacgattccttagaagtgtctcccacagggtggcaggactgggagaatctctgaggcgtgtcttccaggccctcccacagcttgtgccctccacagtgtagacttgaacacttggcctcatgtgatccttccaccttggcctcccaaagcattgggattacaggcgagagccactggttggctaaaatatttatatttacctgacatgatttgttgatttgggggctagggagttcttaaaacaacaataaaaaatcttctgtggctgcattct

SEQ ID NO: 2204 - protein, 81 aa, Homosapiens [sequence omitted]

SEQ ID NO: 2205 - DNA, 1307 bp, Homosapiens
gacttggggccggccgcgggcaggcgggcatctggcggccgaggccgggacttcggggcccctcccgggcgagtcgcggggcggcggcgggaaggggcgccgcacggaggaagtgccctcttggccgcagccagagccgcgccgcaggtgccgcgatgtcgtcctggccggggcgcgaggatgcgagggctgggggcgcgtggtggccgcgggagccgctggatcaggaactgcagcgggcccgggagcagaagcggcggcggcacgacgcccagcagctgcagcagctcaagcgcctggagtccttaaagggtctcacctgtggccaggagcggtggctcacgcctgtaatcccagcactttgagaggccgcggtggacagatcacgagttatgaaaaacctcctcctgggcttatcaaggttggcattgcaaatggtatggtcaccgaacaggctacaaagaatgccctttctttatcaaagacaaccaaaagttacaacagttcagagtagcacatgaggatttcatgtatgacatcatacgagacaataaacaacatgaaaagaatgtaaggatacagcagttaaaacagttactggaggattctacctcaggtgaagataggagcagctccagttcctctgaaggtaaagagaaacacaagaaaaagaagaagaaagaaaagcataagaaaaggaagaaagaaaagaaaaagaagaaaaaacggaagcacaaatcttccaagtcaaatgagggttctgactcagagtgacaaggatgtgacttgttcaacattctcttctcaaacactgaccaaggaacagaggaagatgcagtcagagaaagtagcaggatagagacgccgagagaggagtatatgtgggtcacagcagtgagctcccacccgccttgcagtgaagatgtgaccccaggagagggagtgtctccttccaggtgctagctctggacagcagctgattttaggcaggaaagtttcttcatcgttgtcctccctgctggtcacatgagtttacgattccttagaagtgtctcccacagggtggcaggactgggagaatctctgaggcgtgtcttccaggccctcccacagcttgtgccctccacagtgtagacttgaacacttggcctcatgtgatccttccaccttggcctcccaaagcattgggattacaggcgagagccactggttggctaaaatatttatatttacctgacatgatttgttgatttgggggctagggagttcttaaaacaacaataaaaaatcttctgtggctgcattct

SEQ ID NO: 2206 - protein, 81 aa, Homosapiens [sequence omitted]

SEQ ID NO: 2207 - DNA, 1834 bp, Homosapiens
tgcgcactgacttggggccggccgcgggcaggcgggcatctggcggccgaggccgggacttcggggcccctcccgggcgagtcgcggggcggcggcgggaaggggcgccgcacggaggaagtgccctcttggccgcagccagagccgcgccgcaggtgccgcgatgtcgtcctggccggggcgcgaggatgcgagggctgggggcgcgtggtggccgcgggagccgctggatcaggaactgcagcgggcccgggagcagaagcggcggcggcacgacgcccagcagctgcagcagctcaagcgcctggagtccttgtgagtctcgagcagccgtctgggccgcagtccgcgcgccgcccgttttctgggaacaggggcgcccggcgccgtgttgggcgctgggctgggtcctccaagcccccaggacccaggcaggggtgcgggcctgtgaggaacctagtgcctgcgacgggacttctagtcctcactgggtggggagcgaggcccgcccggccacggaggggccctggaggccgcggcgcgggtgggcgggggcctcggcccggggaggcggcagcggcttgcgctcctcgcccccgctttggtgtgggcgtcgcctcttttggggaagccaagagttattggcgcttgctcggcatttgtggaccgaacaggcaagttcaaccgagcacgctgcccccgcgctccacctctgagttccctgggccactgcgacatggagaaaccccgttcttttcatcctctgctacggagaagggacgaggacacgggtcctgcagtgttggtgtggcgaggcccggaagaagagagaatgggcggcggggactggccacggcgctgctagaaagggtctcacctgtggccaggagcggtggctcacgcctgtaatcccagcactttgagaggccgcggtggacagatcacgaggttggcattgcaaatggtatggtcaccgaacaggctacaaagaatgccctttctttatcaaagacaaccaaaagttacaacagttcagagtagcacatgaggatttcatgtatgacatcatacgagacaataaacaacatgaaaagaatgtaaggatacagcagttaaaacagttactggaggattctacctcaggtgaagataggagcagctccagttcctctgaaggtaaagagaaacacaagaaaaagaagaagaaagaaaagcataagaaaaggaagaaagaaaagaaaaagaagaaaaaacggaagcacaaatcttccaagtcaaatgagggttctgactcagagtgacaaggatgtgacttgttcaacattctcttctcaaacactgaccaaggaacagaggaagatgcagtcagagaaagtagcaggatagagacgccgagagaggagtatatgtgggtcacagcagtgagctcccacccgccttgcagtgaagatgtgaccccaggagagggagtgtctccttccaggtgctagctctggacagcagctgattttaggcaggaaagtttcttcatcgttgtcctccctgctggtcacatgagtttacgattccttagaagtgtctcccacagggtggcaggactgggagaatctctgaggcgtgtcttccaggccctcccacagcttgtgccctccacagtgtagacttgaacacttggcctcatgtgatccttccaccttggcctcccaaagcattgggattacaggcgagagccactggttggctaaaatatttatatttacctgacatgatttgttgatttgggggctagggagttcttaaaacaacaataaaaaatcttctgtggctgcattct

SEQ ID NO: 2208 - protein, 81 aa, Homosapiens [sequence omitted]

SEQ ID NO: 2209 - DNA, 1550 bp, Homosapiens
atggctgaatcctattgctatgtaatgagcagctcccgtgccgcgatgtcgtcctggccggggcgcgaggatgcgagggctgggggcgcgtggtggccgcgggagccgctggatcaggaactgcagcgggcccgggagcagaagcggcggcggcacgacgcccagcagctgcagcagctcaagcgcctggagtccttggttcagggtgggcattcagggagccagctgccgtttggcaccacgcggaattcgggccctgacttgggaggccttgcgctcccgtggctccagttcaaggagggtccagatgacccgggagagtgtggtgtaaagaagattcaaagttatgaaaaacctcctcctgggcttatcaagccttacttggctcagtccctcagtccatcctgtgttggtttcttgagtatcagcagctcagagagcagtcaactccgaggagacccgacagctcatccagtccagctccccggtggaggcatccttcctgcagctcctggctacggcaccagggaagatgaggctaagccagaagatagcataccagatataccaggcaatgaatacgccagagaatttctggctcatgcaccaactaaaggactttggttgccactggggaaagaagtcagagttatgcagtgtgaatgttggcattgcaaatggtatggtcaccgaacaggctacaaagaatgccctttctttatcaaagacaaccaaaagttacaacagttcagagtagcacatgaggatttcatgtatgacatcatacgagacaataaacaacatgaaaagaatgtaaggatacagcagttaaaacagttactggaggattctacctcaggtgaagataggagcagctccagttcctctgaaggtaaagagaaacacaagaaaaagaagaagaaagaaaagcataagaaaaggaagaaagaaaagaaaaagaagaaaaaacggaagcacaaatcttccaagtcaaatgagggttctgactcagagtgacaaggatgtgacttgttcaacattctcttctcaaacactgaccaaggaacagaggaagatgcagtcagagaaagtagcaggatagagacgccgagagaggagtatatgtgggtcacagcagtgagctcccacccgccttgcagtgaagatgtgaccccaggagagggagtgtctccttccaggtgctagctctggacagcagctgattttaggcaggaaagtttcttcatcgttgtcctccctgctggtcacatgagtttacgattccttagaagtgtctcccacagggtggcaggactgggagaatctctgaggcgtgtcttccaggccctcccacagcttgtgccctccacagtgtagacttgaacacttggcctcatgtgatccttccaccttggcctcccaaagcattgggattacaggcgagagccactggttggctaaaatatttatatttacctgacatgatttgttgatttgggggctagggagttcttaaaacaacaataaaaaatcttctgtggctgcattct

SEQ ID NO: 2210 - protein, 338 aa, Homosapiens; identical to SEQ ID NO: 2194

SEQ ID NO: 2211 - DNA, 896 bp, Homosapiens
gggcgcgaggatgcgagggctgggggcgcgtggtggccgcgggagccgctggatcaggaactgcagcgggcccgggagcagaagcggcggcggcacgacgcccagcagctgcagcagctcaagcgcctggagtccttatttccccttttctttgcttttaggttggcattgcaaatggtatggtcaccgaacaggctacaaagaatgccctttctttatcaaagacaaccaaaagttacaacagttcagagtagcacatgaggatttcatgtatgacatcatacgagacaataaacaacatgaaaagaatgtaaggatacagcagttaaaacagttactggaggattctacctcaggtgaagataggagcagctccagttcctctgaaggtaaagagaaacacaagaaaaagaagaagaaagaaaagcataagaaaaggaagaaagaaaagaaaaagaagaaaaaacggaagcacaaatcttccaagtcaaatgagggttctgactcagatgaagatgtgaccccaggagagggagtgtctccttccaggtgctagctctggacagcagctgattttaggcaggaaagtttcttcatcgttgtcctccctgctggtcacatgagtttacgattccttagaagtgtctcccacagggtggcaggactgggagaatctctgaggcgtgtcttccaggccctcccacagcttgtgccctccacagtgtagacttgaacacttggcctcatgtgatccttccaccttggcctcccaaagcattgggattacaggcgagagccactggttggctaaaatatttatatttacctgacatgatttgttgatttgggggctagggagttcttaaaacaacaataaaaaatcttctgtggctgca

SEQ ID NO: 2212 - protein, 181 aa, Homosapiens; identical to SEQ ID NO: 2182

SEQ ID NO: 2213 - DNA, 4150 bp, Homosapiens
tgcgcactgacttggggccggccgcgggcaggcgggcatctggcggccgaggccgggacttcggggcccctcccgggcgagtcgcggggcggcggcgggaaggggcgccgcacggaggaagtgccctcttggccgcagccagagccgcgccgcaggtgccgcgatgtcgtcctggccggggcgcgaggatgcgagggctgggggcgcgtggtggccgcgggagccgctggatcaggaactgcagcgggcccgggagcagaagcggcggcggcacgacgcccagcagctgcagcagctcaagcgcctggagtccttgtgagtctcgagcagccgtctgggccgcagtccgcgcgccgcccgttttctgggaacaggggcgcccggcgccgtgttgggcgctgggctgggtcctccaagcccccaggacccaggcaggggtgcgggcctgtgaggaacctagtgcctgcgacgggacttctagtcctcactgggtggggagcgaggcccgcccggccacggaggggccctggaggccgcggcgcgggtgggcgggggcctcggcccggggaggcggcagcggcttgcgctcctcgcccccgctttggtgtgggcgtcgcctcttttggggaagccaagagttattggcgcttgctcggcatttgtggaccgaacaggcaagttcaaccgagcacgctgcccccgcgctccacctctgagttccctgggccactgcgacatggagaaaccccgttcttttcatcctctgctacggagaagggacgaggacacgggtcctgcagtgttggtgtggcgaggcccggaagaagagagaatgggcggcggggactggccacggcgctgctagttatgaaaaacctcctcctgggcttatcaagatggagtttcgctcttgttgcccaggctggagtacaatggcatgatcttggctcaccgcgacctccgcctcccaggttcaagcgattctcctgcctcagtcttcccaagtagctgggattacaggcatgcgccactatgcctggctaattttgtatttttagtagaggcggggtttcttcatgttggtcagtctggtctcgaacttccagcctcaggtgatccgcccgcctcggcctcccaaagtgctgggattacaggtgtaagccaccgcgatggcctgctgtgttttaattttctgacatcccctttgactcatggattggttacgcatgtgttattcagtttctacatactggattcttcaaatttccttatattgttgctttgtaatttgagtccatcctagttagagaatatactttgtatggtttaaatccttttaattatattaattcttgttttatggcctaatatagggtctctggataatgttccatattgacttcaaaaagtgtttattgttgggtggtagagtgttttataagtaactgttaggttcaattgatttatattgttgtttaagtcttgtaattcattgctgatcttctctctagttgttttatccattattgaatgaggagtattgaaatctctattattgttacaccgttctattttccccttcaattctatcagtttgtgtctcaactatctggcactcttttgctaggttacatacatatttataaatgttgtatcttcttgatggattgacctttttatcaatacaaaatatccttctttgtctctggtaacagtttttgtcttagggtgtattttgtctgaaattatcggagcagctttagttccctttgggttactgtttgcatcatatattcctttccatccttttactgccaacctaattgggtctttaaatctacagtgtgtcacttatatctagtgcttggatagcatttttcctttttttttttttttttttttttttgagacagggcctctctgctgcccagggtggagtgcagtggcacaatcacagcacactgcagcctagacctcccaggctcaagcaatcctcccacctcagccttctgagtagctggaaccacaggtgcttgccaccatgcctggctaatttttaaaaattttttgtacagacgggatctcaccttgttgcctaggctattctcaaactcctgggctcaagcagtcctcctgccttggcctcccaaagtgttaggattacaggcatgagccactgcacctggcggataacatttttatccattctataaatctctgccttttgattgaagtgtttaatccatttgcatgtaatataattactgttaaggtaattacaaacctatgcacatggttttgattttaccaattttagtattaattagaaaagtggttctcccactttgatatttctacaaataaccagtaaatcttttaaaattcaggttatatgtccatatcaggcccaacccagaaatactgaatatccagtatttgaatatccaaaatactgaatactagatattcaatatttctgggttgggtcctataccttgcttttctaacaaccttgctcatattgttgaatttgctggtccatggaccacactttgaatatctgggatcacctttccataataagaggattttgagcggaaatggtatcttctggatatctatacatcaatgcttgttccatggcatttcacatcccttcagctttgccataaaggcacatattagtttgaaagagtgtagtccttctcccccaaactttaaatggtgagggagataaggatagggatagctcacaggcaatcaatagaaatccacaaacttaggccaggcacagtggctcacacctgtaatcccaacactttggaaggctgaggtgggctgatcacgaggtcaggagttcaaaaccagcctggccaacatgacgaaaccgtctctaccaaaaatataaaaaattagctgggtttggtggcatgcatctgtaatcccagccacttgggaggctgaggcagaagaattgcttgaacccaggaggcggaggttgcagtgagccgagatcgcgccactacactccagcctgggcaacagagcgagactcgtctcaaaaaaaaaaaaaaaacccacaaacttaatttttttcagtggtttcctgcattcaatcctcaaataaaaataaaaagagaaaaactttcttgccctgtcactacgtattttctgtagttgccagcatagagcaaacttggctgaacttacctaaatccctcttcatacttcccgacctagttgcttagaattgcttaatactcaaacacagggtctcattcaccattcccatacagtttcctgatttacaccacatccagatggtgctgagaggatatgaacaggcgagagaagtaacaaggatctcatccattcttgcttcactcaccacttcctttttctcagaggtcaatgcctgatgccaggtccactcactgaaattccataaagactggaatttgttgccttggagcatgtatatacattctcttgttattctcctcccagttcctcatcaggaccttctgttgcttctaatagttaacctctttaaatagcacagtttccctcttctgaaagtaaagttgcagtagggttctgatggcattaatattttaaaagaacttgtgattttgtttacttaaaagtgagggatgtgaacagatgtcgactcaacctgagaaagaaggtatttgttctagtgactaaatttataaatgagattcagagccacttgattaatagaagatatttactttgaaaaatacagcgagacacactaaaaaaattgaccttttgcagtacttttcattggattgcttcataatttcttggtgttggaaaattaattcctaaagcacaagattaaaggatgcttgggtaagcaattagtttacctgtcttttctgggaccttacacggttcatccatgattgcattttcttttagaattggagtttaatgaataaaaactttaatataatctactgattctttatctcactaaggtgaaacactcttatcttacagaaatatttccccttttctttgcttttaggttggcattgcaaatggtatggtcaccgaacaggctacaaagaatgccctttctttatcaaagacaaccaaaagttacaacagttcagagtag

SEQ ID NO: 2214 - protein, 46 aa, Homosapiens
MKNLLLGLSRWSFALVAQAGVQWHDLGSPRPPPPRFKRFSCLSLPK

SEQ ID NO: 2215 - DNA, 3454 bp, Homosapiens
ctgcggccgggagggcgggcggccggggagacggggtggcggctgcagcccgggtagggccaggagacccggtccacgtttgcaaacgcagccgaacgcccaggccgacccgtgccgcccgagcgccgcgctgcgtccgcgccactcttctcgccgccccgatggcgttccggggctggaggcccccgccgccaccgctgctcctgctgctgctctgggtgaccgggcaggcagcgcccgtggcgggcctgggctccgacgcggagctgcagatcgagcggcgcttcgtgcccgacgagtgcccgcgcaccgtgcgcagcggcgacttcgtgcgctaccactacgtggggacgttccccgacggccagaagttcgactccagctatgacagagactccactttcaatgtgtttgtgggaaaaggacagctgatcacagggatggaccaggctcttgttgggatgtgcgtaaacgagagacgtttcgtgaagattcccccaaagcttgcctacggaaatgaaggagtttctggtgtgatcccccccaattcagtgcttcattttgatgtacttctgatggatatttggaattctgaagaccaggttcagattcacacctatttcaagcccccgagttgccctcggaccatccaggtgtctgattttgtgaggtaccactacaacgggacgttcctggacggaactctgtttgattcgagtcacaatcgcatgaaaacatatgacacgtatgtgggaattggctggctgattcctggaatggataaagggctgctggggatgtgtgtgggtgagaagcgcatcatcaccattcctccttttctggcctatggagaggatggagatgggaaagacattcccggtcaggcatctctggtgtttgatgttgcattattggacctccataaccccaaggacagcatttccattgagaacaaggtagtacctgaaaactgtgagcggataagtcaaagtggggactttctcaggtatcattacaatggcacgcttctggatggcaccctctttgattccagctactctcggaaccgcacgtttgacacgtacattgggcagggctacgtgattcctgggatggatgaaggtctacttggtgtttgcattggagaaaagcgaaggattgtggtcccgcctcacctggggtatggagaggaaggaagagggaatatccccggctcggctgtgctggtgtttgacatccatgtgatcgacttccacaacccttcggactccatcagcatcacctcccactacaaaccccctgactgctcagtgctgagtaagaagggagattacctcaaatatcactacaatgcctcacttctggatgggaccctgctggactccacgtggaatttaggcaaaacttacaatattgttctgggatctgggcaagttgtgttggggatggacatgggtctcagagagatgtgcgttggcgagaaacggacagtgatcattccgcctcacctgggctatggggaagctggcgtggatggagaagtgcccggcagtgccgtattagtgtttgacattgagctgctggagctggtggctggccttcctgaggggtacatgttcatatggaatggtgaggtgtcacccaacctctttgaagaaattgacaaggatggcaacggagaagtcctcctggaagagttctcagagtacattcacgcccaggtggcatctggcaaagggaaactcgctcctggctttgatgctgagctgattgtgaagaatatgttcaccaaccaggaccggaatggagatgggaaggtcacagccgaggaatttaaactcaaagaccaggaagccaaacacgatgaactctaaacctggcatgaaccagatggtgccagggagtacgtgacaccaagccacctgtgtggcaagacgtgcagtgagggtgcaagggtctctcagaagttgcatcattagccagtagtaggtgggtcacatagtacctggtgtacacatcggggtgggttgatatatggggtgagaagtttgggctgatcgccagtgatagtaaacaaaatctgtgcagagggccttagcatgggatgtgtccagtattgaaaaggctgcactgccaaccatgatttgtgagccttctgggaaattttgttattaaaggaatatatagtgtcagacggaagttataatcatcttggaggaaccataagaaaaggtgtccagggtatctatataaagagggttaaatttttttttaacttgctggttaaaacattttagaaatattctagagatgggcaggagagtcaaagggcttgcttgccccagcagagttcccagcagacagccatggctcttcccagcagcctgtgcaaattctgatgatggccccacccccgcacacgcacacgcacatcatgcttttccagctcatcacaccccgccccactatgggcctaccattaatagtgtataacttggaggttaaaagagccttttggacagaaaactgggccaggaaaaggcatctcagaccacaaatagagaatttgattcctcatttgccacataagtcatctgcttagcttttcctttcctttttttttttttttttttttctggaggcagagtctccctttgtcgccaggctggagtgcagtggtgccatctcggctcactgcagcactgtctcggctcactgcagcctccgcctcccgtattcaagcgattctcctgtctcagcctcctgagtagctgggactacaggtgtgcaccaccacgcccggctaatttttgtatttttagtagagacggggtttcactgtgttggccaggatggtctcaatctcgacctcgtgatccgcccaccttggcctcccaaagtgttgggattacaggcgtgactcaccatgcccagccacttagttttttcttattcccacctttctatcccatagaacactcttttttatcttccctgaaccatattgatgagataaatagggctgggggctgggccccgctggtcactcaacagagtatttcccttggccgagatggaagttttgtcccaatagatgagctgctgagcatcaacaaggtgacatttttctgctgcccatttgtgtcctggagacggtggtaccctgaaggcagaggccagctgccgcaagacagcaatgacagtccacctgccgacctgattcctgcatcatggaataaccacatggctaccttctatcctctgttcccaaatggtggtggcacttatcctgaagtcgtcaatgatttccctttgaaactactttattttactaatttaaactattttgtactgatgtagccctgaggtagttcatgaaaatgctgtgcactcattccatggaataaatgttggaaagctgatcttttctgatataaaatgttgaatgatatta

SEQ ID NO: 2216 - protein, 570 aa, Homosapiens; identical to SEQ ID NO: 242

SEQ ID NO: 2217 - DNA, 395 bp, Homosapiens
tcctcctgcctcagccttccgaatagttaggagtacagacgtgtgccaccatgcttggctagttaaaaaagtttttttagagacaactccgtctcaagaaaaaaaaaaagaaaagaaaaatttaaaccccatggttacttttaaggctttcatttttctcttaaatgaaaagatacagtaaggcacaaaagattaatattctatctcccacgcatgcgatttagggattgaccacaccttgcattccaggggctgactcagcagccggctttcagcagatttcatcattccttggatgggaaggagatgcagggtgggctttgccaaaggccagtggaaggagctcaggcttggcggcatctggtttgcttgtctgggcctactcctttgcatga

SEQ ID NO: 2218 - protein, 32 aa, Homosapiens
MGRRCRVGFAKGQWKELRLGGIWFACLGLLLC

SEQ ID NO: 2219 - DNA, 1149 bp, Homosapiens
acattcacgcccaggtggcatctggcaaagggaaactcgctcctggctttgatgctgagctgattgtgaagaatatgttcaccaaccaggaccggaatggagatgggaaggtcacagccgaggaatttaaactcaaagaccaggaagccaaacacgatgaactctaaacctggcatgaaccagatggtgccagggagtacgtgacaccaagccacctgtgtggcaagacgtgcagtgagggtgcaagggtctctcagaagttgcatcattagccagtagtaggtgggtcacatagtacctggtgtacacatcggggtgggttgatatatggggtgagaagtttgggctgatcgccagtgatagtaaacaaaatctgtgcagagggccttagcatgggatgtgtccagtattgaaaaggctgcactgccaaccatgatttgtgagccttctgggaaattttgttattaaaggaatatatagtgtcagacggaagttataatcatcttggaggaaccataagaaaaggtgtccagggtatctatataaagagggttaaatttttttttaacttgctggttaaaacattttagaaatattctagagatgggcaggagagtcaaagggcttgcttgccccagcagagttcccagcagacagccatggctcttcccagcagcctgtgcaaattctgatgatggccccacccccgcacacgcacacgcacatcatgcttttccagctcatcacaccccgccccactatgggcctaccattaatagtgtataacttggaggttaaaagagccttttggacagaaaactgggccaggaaaaggcatctcagaccacaaatagagaatttgattcctcatttgccacataagtcatctgcttagcttttcctttcctttttttttttttttttttttctggaggcagagtctccctttgtcgccaggctggagtgcagtggtgccatctcggctcactgcagcactgtctcggctcactgcagcctccgcctcccgtatttaatttaaactattttgtactgatgtagccctgaggtagttcatgaaaatgctgtgcactcattccatggaataaatgttggaaagctgatcttttctgatataaaatgttgaatgat

SEQ ID NO: 2220 - protein, 67 aa, Homosapiens
MMAPPPHTHTHIMLFQLITPRPTMGLPLIVYNLEVKRAFWTENWARKRHLRPQIENLIPHLPHKSSA

SEQ ID NO: 2221 - DNA, 218 bp, Homosapiens
gctttgatgctgagctgattgtgaagaatatttcccaaatggtggtggcacttatcctgaagtcgtcaatgatttccctttgaaactactttattttactaatttaaactattttgtactgatgtagccctgaggtagttcatgaaaatgctgtgcactcattccatggaataaatgttggaaagctgatcttttctgatataaaatgttgaatgata

SEQ ID NO: 2222 - DNA, 1116 bp, Homosapiens
ctttaataaccagtttgttatctccatcttacagagaaggatatgagaatttctttgataagctccaacaacatagcatccccgtgttcatattttcggctggaatcggcgatgtactagaggaagttattcgtcaagctggtgtttatcatcccaatgtcaaagttgtgtccaattttatggattttgatgaaactggggtgctcaaaggatttaaaggagaactaattcatgtatttaacaaacatgatggtgccttgaggaatacagaatatttcaatcaactaaaagacaatagtaacataattcttctgggagactcccaaggagacttaagaatggcagatggagtggccaatgttgagcacattctgaaaattggatatctaaatgatagagtggatgagcttttagaaaagtacatggactcttatgatattgttttagtacaagatgaatcattagaagtagccaactctattttacagaagattctataaacaagcattctccaagaagacctctctcctgtgggtgcaattgaactgttcatccgttcatcttgctgagagacttatttataatatatccttactctcgaagtgttccctttgtataactgaagtattttcagatatggtgaatgcattgactggaagctccttttctccacctctctcaacacactcctcaccgtatcttttaacccatttaaaaaaaaaaaaaagctaaaattagaaaaataactccctacttttccaaagtgaattttgtagtttaatgttatcatgcagcttttgaggagtcttttacactgggaaagtttgtagaaattttaaaataagttttatgaaatggtgaaataatatgcatgattttaagtattgccatttttgtaatttgggttattatgctgatggtatcaccatctcttgaaattgtgttaggtttggttattttgtctggggaaaaaatatttactggaaaagactagcagttagtgttggaaaaacctggtggtgtttacaatgttgctaatcattacaaaacattctatattgaagcactgataataaatatgaaatgcaaaacctttttaattctatggtcaaaact

SEQ ID NO: 2223 - protein, 106 aa, Homosapiens [sequence omitted]

SEQ ID NO: 2224 - DNA, 1564 bp, Homosapiens
cttttgctggtgtagctcgtccggttaccttcaggaagattggataaccaagaaatgactaatcaagagtctgccgtacatgtgaaaatgatgccagaattccagaaaagttcagttcgaatcaagaaccctacaagagtagaagaaattatctgtggtcttatcaaaggaggagctgccaaacttcagataataacggactttgatatgacactcagtagattttcatataaagggaaaagatgcccaacatgtcataatatcattgacaactgtaagctggttacagatgaatgtagaaaaaagttattgcaactaaaggaaaaatattacgctattgaagttgatcctgttcttactgtagaagagaagtacccttatatggtggaatggtatactaaatcacatggtttgcttgttcagcaagctttaccaaaagctaaacttaaagaaattgtggcagaatctgacgttatgctcaaagaaggatatgagaatttctttgataagctccaacaacatagcatccccgtgttcatattttcggctggaatcggcgatgtactagaggaagttattcgtcaagctggtgtttatcatcccaatgtcaaagttgtgtccaattttatggattttgatgaaactggggtgctcaaaggatttaaaggagaactaattcatgtatttaacaaacatgatggtgccttgaggaatacagaatatttcaatcaactaaaagacaatagtaacataattcttctgggagactcccaaggagacttaagaatggcagatggagtggccaatgttgagcacattctgaaaattggatatctaaatgatagagtggatgagcttttagaaaagtacatggactcttatgatattgttttagtacaagatgaatcattagaagtagccaactctattttacagaagattctataaacaagcattctccaagaagacctctctcctgtgggtgcaattgaactgttcatccgttcatcttgctgagagacttatttataatatatccttactctcgaagtgttccctttgtataactgaagtattttcagatatggtgaatgcattgactggaagctccttttctccacctctctcaacacactcctcaccgtatcttttaacccatttaaaaaaaaaaaaaagctaaaattagaaaaataactccctacttttccaaagtgaattttgtagtttaatgttatcatgcagcttttgaggagtcttttacactgggaaagtttgtagaaattttaaaataagttttatgaaatggtgaaataatatgcatgattttaagtattgccatttttgtaatttgggttattatgctgatggtatcaccatctcttgaaattgtgttaggtttggttattttgtctggggaaaaaatatttactggaaaagactagcagttagtgttggaaaaacctggtggtgtttacaatgttgctaatcattacaaaacattctatattgaagcactgataataaatatgaaatgcaaaacctttttaattctatggtcaaaact

SEQ ID NO: 2225 - protein, 297 aa, Homosapiens; identical to SEQ ID NO: 244

SEQ ID NO: 2226 - DNA, 1701 bp, Homosapiens
gatgctctgggatcccgcgcttccgagactcgcagtctacgcgagctgcctgtttttttcctgcttggacgcgcatgagggccccgtccatggaccgcgcggccgtggcgagggtgggcgcggtagcgagcgccagcgtgtgcgccctggtggcgggggtggtgctggctcagtacatattcaccttgaagaggaagacggggcggaagaccaagatcatcgagatgatgccagaattccagaaaagttcagttcgaatcaagaaccctacaagagtagaagaaattatctgtggtcttatcaaaggaggagctgccaaacttcagataataacggactttgatatgacactcagtagattttcatataaagggaaaagatgcccaacatgtcataatatcattgacaactgtaagctggttacagatgaatgtagaaaaaagttattgcaactaaaggaaaaatattacgctattgaagttgatcctgttcttactgtagaagagaagtacccttatatggtggaatggtatactaaatcacatggtttgcttgttcagcaagctttaccaaaagctaaacttaaagaaattgtggcagaatctgacgttatgctcaaagaaggatatgagaatttctttgataagctccaacaacatagcatccccgtgttcatattttcggctggaatcggcgatgtactagaggaagttattcgtcaagctggtgtttatcatcccaatgtcaaagttgtgtccaattttatggattttgatgaaactggggtgctcaaaggatttaaaggagaactaattcatgtatttaacaaacatgatggtgccttgaggaatacagaatatttcaatcaactaaaagacaatagtaacataattcttctgggagactcccaaggagacttaagaatggcagatggagtggccaatgttgagcacattctgaaaattggatatctaaatgatagagtggatgagcttttagaaaagtacatggactcttatgatattgttttagtacaagatgaatcattagaagtagccaactctattttacagaagattctataaacaagcattctccaagaagacctctctcctgtgggtgcaattgaactgttcatccgttcatcttgctgagagacttatttataatatatccttactctcgaagtgttccctttgtataactgaagtattttcagatatggtgaatgcattgactggaagctccttttctccacctctctcaacacactcctcaccgtatcttttaacccatttaaaaaaaaaaaaaagctaaaattagaaaaataactccctacttttccaaagtgaattttgtagtttaatgttatcatgcagcttttgaggagtcttttacactgggaaagtttgtagaaattttaaaataagttttatgaaatggtgaaataatatgcatgattttaagtattgccatttttgtaatttgggttattatgctgatggtatcaccatctcttgaaattgtgttaggtttggttattttgtctggggaaaaaatatttactggaaaagactagcagttagtgttggaaaaacctggtggtgtttacaatgttgctaatcattacaaaacattctatattgaagcactgataataaatatgaaatgcaaaacctttttaattctatggtcaaaact

SEQ ID NO: 2227 - protein, 336 aa, Homosapiens; identical to SEQ ID NO: 246

SEQ ID NO: 2228 - DNA, 1756 bp, Homosapiens
gatgctctgggatcccgcgcttccgagactcgcagtctacgcgagctgcctgtttttttcctgcttggacgcgcatgagggccccgtccatggaccgcgcggccgtggcgagggtgggcgcggtagcgagcgccagcgtgtgcgccctggtggcgggggtggtgctggctcagtacatattcaccttgaagaggaagacggggcggaagaccaagatcatcgagatgaagattggataaccaagaaatgactaatcaagagtctgccgtacatgtgaaaatgatgccagaattccagaaaagttcagttcgaatcaagaaccctacaagagtagaagaaattatctgtggtcttatcaaaggaggagctgccaaacttcagataataacggactttgatatgacactcagtagattttcatataaagggaaaagatgcccaacatgtcataatatcattgacaactgtaagctggttacagatgaatgtagaaaaaagttattgcaactaaaggaaaaatattacgctattgaagttgatcctgttcttactgtagaagagaagtacccttatatggtggaatggtatactaaatcacatggtttgcttgttcagcaagctttaccaaaagctaaacttaaagaaattgtggcagaatctgacgttatgctcaaagaaggatatgagaatttctttgataagctccaacaacatagcatccccgtgttcatattttcggctggaatcggcgatgtactagaggaagttattcgtcaagctggtgtttatcatcccaatgtcaaagttgtgtccaattttatggattttgatgaaactggggtgctcaaaggatttaaaggagaactaattcatgtatttaacaaacatgatggtgccttgaggaatacagaatatttcaatcaactaaaagacaatagtaacataattcttctgggagactcccaaggagacttaagaatggcagatggagtggccaatgttgagcacattctgaaaattggatatctaaatgatagagtggatgagcttttagaaaagtacatggactcttatgatattgttttagtacaagatgaatcattagaagtagccaactctattttacagaagattctataaacaagcattctccaagaagacctctctcctgtgggtgcaattgaactgttcatccgttcatcttgctgagagacttatttataatatatccttactctcgaagtgttccctttgtataactgaagtattttcagatatggtgaatgcattgactggaagctccttttctccacctctctcaacacactcctcaccgtatcttttaacccatttaaaaaaaaaaaaaagctaaaattagaaaaataactccctacttttccaaagtgaattttgtagtttaatgttatcatgcagcttttgaggagtcttttacactgggaaagtttgtagaaattttaaaataagttttatgaaatggtgaaataatatgcatgattttaagtattgccatttttgtaatttgggttattatgctgatggtatcaccatctcttgaaattgtgttaggtttggttattttgtctggggaaaaaatatttactggaaaagactagcagttagtgttggaaaaacctggtggtgtttacaatgttgctaatcattacaaaacattctatattgaagcactgataataaatatgaaatgcaaaacctttttaattctatggtcaaaact

SEQ ID NO: 2229 - protein, 297 aa, Homosapiens; identical to SEQ ID NO: 244

SEQ ID NO: 2230 - DNA, 535 bp, Homosapiens
agtttcatcaaaatccataaaattggacacaactttgacattgggatgataaacaccagcttgacgaataacttcctctagtacatcgccgattccagccgaaaatatgaacacggggatgctatgttgttggagcttatcaaagaaattctcaatccgacacagtgctttcagtgtgatctgcctggaacactgcattttgattaatgcaaccaaaggtcgatttttgggtaaccatatcacctgctggctctgagttcagactcagtttaaatcctcataccttttctttacacattaagccacgttttgttcatatacttaaaaaaaaattcttgtttttaatttgagacttaaatgcaggacttttaatttattcctactggacttcaccttaaataaacaaaacaaaaggattcctaaactgttagagagattagataattagagctcattttgttattcaatgctctaacttgcataatttattaatctgtttgtttgcaatacaggtaaaaaataagccatcagttgt

SEQ ID NO: 2231 - protein, 49 aa, Homosapiens
MNTGMLCCWSLSKKFSIRHSAFSVICLEHCILINATKGRFLGNHITCWL

SEQ ID NO: 2232 - DNA, 1181 bp, Homosapiens
aacagggggaagatggctcagagttaggctggagaggggcggtgtcccttccgccgcagccgcggggtttctgctacatcccattcgccacctccgccatccttttttctgtgtgagcagaagggcttgcagttgttctctcctgcctagtgtcttccaagggatagatgccatttcttctgctggtctctgggggtgaggaggggcgcaggggagcttcttgggggaatcgctccaactctgtggagctggtggtgctgcctggtggggctctctctgcccaggacgtggaacaactttcagccggaggactagaggaaatagttgtaggggaggaaaaattgtttccttctagccttttaggtcatttggctggtctacaaattaaattgatgtaagacagaggaacatgagaaaaacgatttgtcgaccgaaaggtgaaataacagtctggaattttgccgcttcttggttgacagaatccaagggtatattgtcacagagaagactccagcctgatgtctatgggacctgagtccacactgtggagggcacaagctgtgggagggcctggaagacacgcctcagagattctcccagtcctgccaccctgtgggagacacttcaaaggaatcgtaaactcatgtgaccagcagggaggacaacgatgaagaaactttcctgcctaaaatcagctgctgtccagagctagcacctggaaggagacactccctctcctggggtcacatcttcactgcaaggcgggtgggagctcactgctgtgacccacatatactcctctctcggcgtctctatcctgctgctttctctgactgcatcttcctctgttccttggtcagtgtttgagaagagaatgttgaacaagtcacatccttgtcactctgagtcagaaccctcatttgacttggaagatttgtgcttccgttttttcttctttttcttttctttcttccttttcttatgcttttctttcttcttctttttcttgtgtttctctttaccttcagaggaactggagctgctcctatcttcatctgaggtagaatcctccagtaactgttttaactgctgtatcctaaacattcaaaattgatcaaagaacagtgagttttagctttaacttacaacagttgcttagataaatatgtcattcaaaagca

SEQ ID NO: 2233 - protein, 41 aa, Homosapiens
MRKTICRPKGEITVWNFAASWLTESKGILSQRRLQPDVYGT

SEQ ID NO: 2234 - DNA, 1385 bp, Homosapiens
tttaaaaaataaataatgagcttttattattctcaacaacagagaagactccagcctgatgtctatgggacctgagtccacactgtggagggcacaagctgtgggagggcctggaagacacgcctcagagattctcccagtcctgccaccctgtgggagacacttcaaaggaatcgtaaactcatgtgaccagcagggaggacaacgatgaagaaactttcctgcctaaaatcagctgctgtccagagctagcacctggaaggagacactccctctcctggggtcacatcttcactgcaaggcgggtgggagctcactgctgtgacccacatatactcctctctcggcgtctctatcctgctgctttctctgactgcatcttcctctgttccttggtcagtgtttgagaagagaatgttgaacaagtcacatccttgtcactctgagtcagaaccctcatttgacttggaagatttgtgcttccgttttttcttctttttcttttctttcttccttttcttatgcttttctttcttcttctttttcttgtgtttctctttaccttcagaggaactggagctgctcctatcttcatctgaggtagaatcctccagtaactgttttaactgctgtatccttacgtccttttcatgtcgtttattgtctcgtatgatgtcatacatgggatcttcatgtgccactctgaactgctctaacttttggttgcctttgataaagaaagggcattctttgtcacccgttcggtgaccatagcgtttgcaacgccaacactgcataactttgacttctttccccagtggcatccaaagtcctttagttggtgcatgagccagaaattccctggcgtgttcattgcctggtacatctggtatgcaatcttctggcttagtctcatcttccttgataagcccaggaggaggtttttcgtaaaaggactccaggtgcttgagctgctgcagctgctgcgcgtcgtgtcgccgccgcttctgctcccgacgtcgctgcagctcctgctccggcggctcacgcggccgccgcgcgcccgcagcccccacgtcctcgcgcccaggccgggacgacatgtcagcccccgcagcgccgcccggcggccccgaagtctcagcctcggccacccgatccccgcctccccgcgtcgggccccaagtcaggggctccgggtctcgggcccagccgccaggcgggctgctgcgggtgggtggggagcgccgcctagcagtgacctttccccacacattttctggtccctgcctctgcattctctcactgattgttatcttgtttttctctccctgccatctttctctctcatttcccctctttttcttattccgataacctttcat

SEQ ID NO: 2235 - protein, 179 aa, Homosapiens
MSQKFPGVFIAWYIWYAIFWLSLIFLDKPRRRFFVKGLQVLELLQLLRVVSPPLLLPTSLQLLLRRLTRPPRARSPHVLAPRPGRHVSPRSAARRPRSLSLGHPIPASPRRAPSQGLRVSGPAARRAAAGGWGAPPSSDLSPHIFWSLPLHSLTDCYLVFLSLPSFSLISPLFLIPITF

SEQ ID NO: 2236 - DNA, 1032 bp, Homosapiens
taaaaaataaataatgagcttttattattctcaacaacagagaagactccagcctgatgtctatgggacctgagtccacactgtggagggcacaagctgtgggagggcctggaagacacgcctcagagattctcccagtcctgccaccctgtgggagacacttcaaaggaatcgtaaactcatgtgaccagcagggaggacaacgatgaagaaactttcctgcctaaaatcagctgctgtccagagctagcacctggaaggagacactccctctcctggggtcacatcttcactgcaaggcgggtgggagctcactgctgtgacccacatatactcctctctcggcgtctctatcctgctgctttctctgactgcatcttcctctgttccttggtcagtgtttgagaagagaatgttgaacaagtcacatccttgtcactctgagtcagaaccctcatttgacttggaagatttgtgcttccgttttttcttctttttcttttctttcttccttttcttatgcttttctttcttcttctttttcttgtgtttctctttaccttcagaggaactggagctgctcctatcttcatctgaggtagaatcctccagtaactgttttaactgctgtatccttacgtccttttcatgtcgtttattgtctcgtatgatgtcatacatgggatcttcatgtgccactctgaactgctctaacttttggttgcctttgataaagaaagggcattctttgtcacccgttcggtgaccatagcgtttgcaacgccaacctaaaaacgaaaagagaaatatttctgtaagataacagtttcacctactcaagataaagaatcagcagaatatattcaagtttttcttcattaaactctaattctaaaacaaaatataattatggacaagccatgtaagatcccagaaacagaggtaaactaattgcttccccaagcatcctttagtcttatacctttaggaataatattctatcaccaagtatttatgaagcaatccaatgga

SEQ ID NO: 2237 - protein, 117 aa, Homosapiens
MLNKSHPCHSESEPSFDLEDLCFRFFFFFFSFFLFLCFSFFFFFLCFSLPSEELELLLSSSEVESSSNCFNCCILTSFSCRLLSRMMSYMGSSCATLNCSNFWLPLIKKGHSLSPVR

SEQ ID NO: 2238 - DNA, 1462 bp, Homosapiens
taaaaaataaataatgagcttttattattctcaacaacagagaagactccagcctgatgtctatgggacctgagtccacactgtggagggcacaagctgtgggagggcctggaagacacgcctcagagattctcccagtcctgccaccctgtgggagacacttcaaaggaatcgtaaactcatgtgaccagcagggaggacaacgatgaagaaactttcctgcctaaaatcagctgctgtccagagctagcacctggaaggagacactccctctcctggggtcacatcttcactgcaaggcgggtgggagctcactgctgtgacccacatatactcctctctcggcgtctctatcctgctgctttctctgactgcatcttcctctgttccttggtcagtgtttgagaagagaatgttgaacaagtcacatccttgtcactctgagtcagaaccctcatttgacttggaagatttgtgcttccgttttttcttctttttcttttctttcttccttttcttatgcttttctttcttcttctttttcttgtgtttctctttaccttcagaggaactggagctgctcctatcttcatctgaggtagaatcctccagtaactgttttaactgctgtatccttacgtccttttcatgtcgtttattgtctcgtatgatgtcatacatgggatcttcatgtgccactctgaactgctctaacttttggttgcctttgataaagaaagggcattctttgtcacccgttcggtgaccatagcgtttgcaacgccaacactgcataactttgacttctttccccagtggcatccaaagtcctttagttggtgcatgagccagaaattccctggcgtgttcattgcctggtacatctggtatgcaatcttctggcttagtctcatcttcctaaaaaagggaacaggtataaacagcatggcaagagcgctgggattctctcctgctccccttggagccacccttgcctggctttttcctgggcttccggtgccaacatcatcttagttacccctcaaaactagaaaaaaagacaagttacacctgattgaaaaaacaggaaacaaatgtaccagaagaactataccaaaaacaatgtagctgttcttagagaaaagttactggtgaagcagaaaaatctgtccttatatagcaatgactggggagctccaaataagattctgagattaaaaaaaaaaagtttcactacctcaaaatatagaattaaagtaaaccaggcttcctggaataatagaaatggcctgttatgctagaatagtttattataccctgaaggccctgtcatgttttacagtcacacacatgctatatctctgatgtacatttttaccactcaataactgcatttacaattaatgtgttttcaaacttttggatttttttcaagtttctatgaatattaaatttacaatag

SEQ ID NO: 2239 - protein, 117 aa, Homosapiens; identical to SEQ ID NO: 2237

SEQ ID NO: 2240 - DNA, 1129 bp, Homosapiens
taaaaaataaataatgagcttttattattctcaacaacagagaagactccagcctgatgtctatgggacctgagtccacactgtggagggcacaagctgtgggagggcctggaagacacgcctcagagattctcccagtcctgccaccctgtgggagacacttcaaaggaatcgtaaactcatgtgaccagcagggaggacaacgatgaagaaactttcctgcctaaaatcagctgctgtccagagctagcacctggaaggagacactccctctcctggggtcacatcttcactgcaaggcgggtgggagctcactgctgtgacccacatatactcctctctcggcgtctctatcctgctgctttctctgactgcatcttcctctgttccttggtcagtgtttgagaagagaatgttgaacaagtcacatccttgtcactctgagtcagaaccctcatttgacttggaagatttgtgcttccgttttttcttctttttcttttctttcttccttttcttatgcttttctttcttcttctttttcttgtgtttctctttaccttcagaggaactggagctgctcctatcttcatctgaggtagaatcctccagtaactgttttaactgctgtatccttacgtccttttcatgtcgtttattgtctcgtatgatgtcatacatgggatcttcatgtgccactctgaactgctctaacttttggttgcctttgataaagaaagggcattctttgtcacccgttcggtgaccatagcgtttgcaacgccaacactgcataactttgacttctttccccagtggcatccaaagtcctttagttggtgcatgagccagaaattccctggcgtgttcattgcctggtacatctggtatgcaatcttctggcttagtctcatcttccttgataagcccaggaggaggtttttcgtaactgagaagagcagaatgcttctcctccctgtgctgagcggcacctgccatctaagactggccaggccttccttatttccatccagggactgaacccagaggagacccagaatgctgagcacgcaagtctccagatgggacaggcagcaagatgggaaggaaattctgaaggcgaggtgtt

SEQ ID NO: 2241 - protein, 117 aa, Homosapiens; identical to SEQ ID NO: 2237

SEQ ID NO: 2242 - DNA, 475 bp, Homosapiens
cagcaaggtgggtttgtggtgagagctttcttcctggcttaagatgacagccctctttcttcttcacatggcacggtggtggggggtggggtggatgcttccttatctagaagatggagaacgtgccttggctgtaagagggctgtgatgagaacaagttaaataaaagaagtaaacactctttgtaaattgaggcatgtaagttgcatggattagggaaactctcccacactcacactgcataactttgacttctttccccagtggcatccaaagtcctttagttggtgcatgagccagaaattccctggcgtgttcattgcctggtacatctggtatgcaatcttctggcttagtctcatcttccttgataagcccaggaggaggtttttcgtaaaaggactccaggtgcttgagctgctgcagctgctgcgcgtcgtgtcgccgccgcttctgctcccgacgtcgctgcagc

SEQ ID NO: 2243 - protein, 60 aa, Homosapiens
MSQKFPGVFIAWYIWYAIFWLSLIFLDKPRRRFFVKGLQVLELLQLLRVVSPPLLLPTSL

SEQ ID NO: 2244 - DNA, 799 bp, Homosapiens
gtggcctgcccccggagcccaggcaggaggagggtcttccttaaggaactgctgccaggacagggcagaggattgcagtaattatcactctctgctaatgaggaccaggccgtggttcactcgagccccgccccagtagcaatctaattccaaccgcggccctctcagaagtcggtccccgcctttgcgcctcagcctctctggactccagcccccagaagtcggcgcggcacggcgtgacctgcgcagtggcgtccgttgtaagtgctatgacaacagggcgaagatggctcagagttaggctggagaggggaggtgtcccttccgctgcggccgtcgggtttctgctacatcccattcaccgcctcctccatcctttcctcctcggtgtgagcagcaggacttgcatttgttctcgcctgcctagtgtcttccaagggatagatgccgtttcctctgctggtctctgggggtgacggggggcgcaggggagcttcttgggggaatcactccaactctgtggagctggtggtgctgcctggtggggctctctctttgcccgggacgtggaacaactttcagctggaggacgagagggaatagtgaagctaaaggttgcttttctctgcaccgtccgttcttgctccctctgctccatcactgggaccttgtcaggcgttcataaagcaaaatttgccgaacgagggttcgcagaaaggtggggcagagctcatctgacgtggcatcagataaaataattgtgggtagctttatgggatacctaaggatctttagcccc

SEQ ID NO: 2245 - protein, 68 aa, Homosapiens
MTTGRRWLRVRLERGGVPSAAAVGFLLHPIHRLLHPFLLGVSSRTCICSRLPSVFQGIDAVSSAGLWG

SEQ ID NO: 2246 - DNA, 2376 bp, Homosapiens
gtggcctgcccccggagcccaggcaggaggagggtcttccttaaggaactgctgccaggacagggcagaggattgcagtaattatcactctctgctaatgaggaccaggccgtggttcactcgagccccgccccagtagcaatctaattccaaccgcggccctctcagaagtcggtccccgcctttgcgcctcagcctctctggactccagcccccagaagtcggcgcggcacggcgtgacctgcgcagtggcgtccgttgtaagtgctatgacaacagggcgaagatggctcagagttaggctggagaggggaggtgtcccttccgctgcggccgtcgggtttctgctacatcccattcaccgcctcctccatcctttcctcctcggtgtgagcagcaggacttgcatttgttctcgcctgcctagtgtcttccaagggatagatgccgtttcctctgctggtctctgggggtgacggggggcgcaggggagcttcttgggggaatcactccaactctgtggagctggtggtgctgcctggtggggctctctctttgcccgggacgtggaacaactttcagctggaggacgagagggaatagtgaagctaaaggttgcttttctctgcaccgtccgttcttgctccctctgctccatcactgggaccttgtcaggcgttcataaagcaaaatttgccgaacgagggttcgcagaaaggtggggcagagctcatctgacgtggcatcagtgtgaaagaaaatgtctttatttaaagcccgtgattggtggtctactattctgggagataaagaagaatttgatcaaggctgtttgtgtctggctaatgttgacaatagtggaaatggacaagataaaataattgtgggtagctttatgggatacctaaggatctttagcccccatcctgcaaaaacaggagatggagctcaagccgaagatttgcttctagaagtggatctacgagatccagtacttcaagtggaagtaggaaagtttgtttcaggtaccgaaatgctacatttggctgtgttacattctagaaaactttgtgtctactctgtctcaggaaccttgggtaatgtggaacatgggaaccaatgtcagatgaaattgatgtatgaacataatcttcagagaacagcctgcaatatgacctatggatcatttggtggtgtaaaaggtcgagatttaatttgcatccagtctatggatgggatgctgatggtatttgagcaggagagctatgcttttggaagatttctccctggctttcttctgcctggtcctcttgcctacagttcccgtacagattccttccttactgtctcttcctgccaacaagtggaaagttataagtaccaggtacttgcttttgcaacagatgcagataaaaggcaggagactgaacagcaaaaacttggttctggaaaaagactagttgtggattggactctaaatattggagagcaagcccttgacatatgtattgtctctttcaatcagtcggcatcctctgtttttgttcttggtgagagaaactttttttgccttaaggataatggacaaattcgattcatgaagaagcttgattggagcccaagttgttttctgccatattgctcagtttctgaaggaacaataaatactttgattggaaatcataataacatgctgcatatttatcaagatgtgacactgaagtgggccacccaacttccccacattcctgtagcagtaagagtgggctgtttgcatgatttaaagggagtgatagtcactctgagtgatgatggtcacttgcagtgttcatacctggggacagatccttctctgttccaagctccaaacgttcaatctcgagaactaaactatgtgctgaccaggttgctattctggaagcggcatttctgccgctacaagaagacactcaagaattgggctgggaagaaacggtggatgccgccatttcccacctgttgaagacttgcctgtcgaagagttctaaggagcaggctttgaacctcaacagccagctgaacatacccaaagacacaagccaactgaagaaacatatcaccttgctctgcgatagattatccaaaggtggccgtctctgcctaagtaccgatgcagcagccccacagaccatggtcatgccaggtaagagctctgtccatgctccctaatcacaattgtacttctcctaaattagaggaatgtgcctgtggttgtatttggggtttaaatttcatattaaagtgatgatagccaagaaaattgatttcacgtttcccctctgacatcccagggtaaccccttgaataaatatccctgagatatttgcttgctagaca

SEQ ID NO: 2247 - protein, 413 aa, Homosapiens
MSLFKARDWWSTILGDKEEFDQGCLCLANVDNSGNGQDKIIVGSFMGYLRIFSPHPAKTGDGAQAEDLLLEVDLRDPVLQVEVGKFVSGTEMLHLAVLHSRKLCVYSVSGTLGNVEHGNQCQMKLMYEHNLQRTACNMTYGSFGGVKGRDLICIQSMDGMLMVFEQESYAFGRFLPGFLLPGPLAYSSRTDSFLTVSSCQQVESYKYQVLAFATDADKRQETEQQKLGSGKRLVVDWTLNIGEQALDICIVSFNQSASSVFVLGERNFFCLKDNGQIRFMKKLDWSPSCFLPYCSVSEGTINTLIGNHNNMLHIYQDVTLKWATQLPHIPVAVRVGCLHDLKGVIVTLSDDGHLQCSYLGTDPSLFQAPNVQSRELNYVLTRLLFWKRHFCRYKKTLKNWAGKKRWMPPFPTC

SEQ ID NO: 2248 - DNA, 3972 bp, Homosapiens
gtggcctgcccccggagcccaggcaggaggagggtcttccttaaggaactgctgccaggacagggcagaggattgcagtaattatcactctctgctaatgaggaccaggccgtggttcactcgagccccgccccagtagcaatctaattccaaccgcggccctctcagaagtcggtccccgcctttgcgcctcagcctctctggactccagcccccagaagtcggcgcggcacggcgtgacctgcgcagtggcgtccgttgtaagtgctatgacaacagggcgaagatggctcagagttaggctggagaggggaggtgtcccttccgctgcggccgtcgggtttctgctacatcccattcaccgcctcctccatcctttcctcctcggtgtgagcagcaggacttgcatttgttctcgcctgcctagtgtcttccaagggatagatgccgtttcctctgctggtctctgggggtgacggggggcgcaggggagcttcttgggggaatcactccaactctgtggagctggtggtgctgcctggtggggctctctctttgcccgggacgtggaacaactttcagctggaggacgagagggaatagtgaagctaaaggttgcttttctctgcaccgtccgttcttgctccctctgctccatcactgggaccttgtcaggcgttcataaagcaaaatttgccgaacgagggttcgcagaaaggtggggcagagctcatctgacgtggcatcagtgtgaaagaaaatgtctttatttaaagcccgtgattggtggtctactattctgggagataaagaagaatttgatcaaggctgtttgtgtctggctaatgttgacaatagtggaaatggacaagataaaataattgtgggtagctttatgggatacctaaggatctttagcccccatcctgcaaaaacaggagatggagctcaagccgaagatttgcttctagaagtggatctacgagatccagtacttcaagtggaagtaggaaagtttgtttcaggtaccgaaatgctacatttggctgtgttacattctagaaaactttgtgtctactctgtctcaggaaccttgggtaatgtggaacatgggaaccaatgtcagatgaaattgatgtatgaacataatcttcagagaacagcctgcaatatgacctatggatcatttggtggtgtaaaaggtcgagatttaatttgcatccagtctatggatgggatgctgatggtatttgagcaggagagctatgcttttggaagatttctccctggctttcttctgcctggtcctcttgcctacagttcccgtacagattccttccttactgtctcttcctgccaacaagtggaaagttataagtaccaggtacttgcttttgcaacagatgcagataaaaggcaggagactgaacagcaaaaacttggttctggaaaaagactagttgtggattggactctaaatattggagagcaagcccttgacatatgtattgtctctttcaatcagtcggcatcctctgtttttgttcttggtgagagaaactttttttgccttaaggataatggacaaattcgattcatgaagaagcttgattggagcccaagttgttttctgccatattgctcagtttctgaaggaacaataaatactttgattggaaatcataataacatgctgcatatttatcaagatgtgacactgaagtgggccacccaacttccccacattcctgtagcagtaagagtgggctgtttgcatgatttaaagggagtgatagtcactctgagtgatgatggtcacttgcagtgttcatacctggggacagatccttctctgttccaagctccaaacgttcaatctcgagaactaaactatgatgaacttgatgtagaaatgaaagaacttcagaaaatcatcaaagatgttaacaaatcacaaggtgtttggcccatgactgagagagaagatgacttgaacgtttctgtcgtggtttctcctaactttgattcagtttctcaagcgaccgatgttgaggtgggaactgaccttgtcccttctgtcacggtgaagcagccaagatatacaaccatgcaagtttccatcataataaatcctgttaattgagaaaatttttccatccgttccaagtgaatgaagatgtggctaccttgagtatgtgtgcatgatgcgtgaccatctattccaggcaactaggtcacactgcagaacagagtgatattgcaaaaagccaaattatcagtctacgtgcaaccaccattagaattgacttgtgatcagttcacctttgaatttatgacaccagatttgactagaacagtaagcttttctgtttatctgaaaagaagttatacaccatcagaattggaaggaaatgctgttgtttcttattccagaccaacagatcgaaatcctgatggcattccgcgagttatccaatgtaaatttagacttcccctaaagttaatttgcctaccaggtcagccttcaaaaactgcaagccacaaaattactattgataccaacaaatctccagtcagtcttcttagtctcttcccaggttttgccagtcagtcagatgatgatcaggtgaatgtaatgggttttcacttcttaggaggtgctcgaattactgttcttgcttccaaaacttctcaacgatatcgcattcagagtgaacaatttgaagatctttggctcataaccaatgagcttattcttcgccttcaagaatattttgaaaaacagggagtcaaagattttgcatgttctttttcgggatctataccccttcaagaatattttgagttgattgatcatcattttgagctacggataaatggtgaaaaattagaagaactcttatctgagagagctgtacaatttcgggccattcaacgccggctactagcaagattcaaagataaaactcctgcccctcttcaacacctggacaccttgttagatggaacctacaagcaggtaattgctctagcagatgcagtggaggaaaaccaaggcaatctgttccagtcattcaccaggctgaagagtgccacccatttggtgattctgctgatcgcgctgtggcagaagcttagtgctgaccaggttgctattctggaagcggcatttctgccgctacaagaagacactcaagaattgggctgggaagaaacggtggatgccgccatttcccacctgttgaagacttgcctgtcgaagagttctaaggagcaggctttgaacctcaacagccagctgaacatacccaaagacacaagccaactgaagaaacatatcaccttgctctgcgatagattatccaaaggtggccgtctctgcctaagtaccgatgcagcagccccacagaccatggtcatgccaggtggttgtactacaatcccagagtcagacctagaagaaagatcagtagaacaagactctacagaactgtttaccaaccacagacatctcactgcagagacacccaggcctgaagtttcacccctccaaggagtctcggaataattcaagtagagttgtttggttgagaggaacatccccatctcaaggccgaacctgtgtgaacctcatgccaagcacagatatagggctggcgcaggtgcttcctaaagctcaccttcctggagatgacatgcatagaaagaggggttgggactttttacttcactaggagaacttgtaacaccatggggaagtcagctgaaacttgtcttgttttgccaggaaaggaagtagttgcctttggtcatccatctgctaatagtcacagaatacagtgaaatgacatagttttgggttagattttataatgcaaagattcagatccaaaataatttcataccccattttttcacagaattcttatatagtaaatgtatcaagtttaataaagcatctcattgtcaaat

SEQ ID NO: 2249 - protein, 460 aa, Homosapiens
MSLFKARDWWSTILGDKEEFDQGCLCLANVDNSGNGQDKIIVGSFMGYLRIFSPHPAKTGDGAQAEDLLLEVDLRDPVLQVEVGKFVSGTEMLHLAVLHSRKLCVYSVSGTLGNVEHGNQCQMKLMYEHNLQRTACNMTYGSFGGVKGRDLICIQSMDGMLMVFEQESYAFGRFLPGFLLPGPLAYSSRTDSFLTVSSCQQVESYKYQVLAFATDADKRQETEQQKLGSGKRLVVDWTLNIGEQALDICIVSFNQSASSVFVLGERNFFCLKDNGQIRFMKKLDWSPSCFLPYCSVSEGTINTLIGNHNNMLHIYQDVTLKWATQLPHIPVAVRVGCLHDLKGVIVTLSDDGHLQCSYLGTDPSLFQAPNVQSRELNYDELDVEMKELQKIIKDVNKSQGVWPMTEREDDLNVSVVVSPNFDSVSQATDVEVGTDLVPSVTVKQPRYTTMQVSIIINPVN

SEQ ID NO: 2250 - DNA, 4266 bp, Homosapiens
gtggcctgcccccggagcccaggcaggaggagggtcttccttaaggaactgctgccaggacagggcagaggattgcagtaattatcactctctgctaatgaggaccaggccgtggttcactcgagccccgccccagtagcaatctaattccaaccgcggccctctcagaagtcggtccccgcctttgcgcctcagcctctctggactccagcccccagaagtcggcgcggcacggcgtgacctgcgcagtggcgtccgttgtaagtgctatgacaacagggcgaagatggctcagagttaggctggagaggggaggtgtcccttccgctgcggccgtcgggtttctgctacatcccattcaccgcctcctccatcctttcctcctcggtgtgagcagcaggacttgcatttgttctcgcctgcctagtgtcttccaagggatagatgccgtttcctctgctggtctctgggggtgacggggggcgcaggggagcttcttgggggaatcactccaactctgtggagctggtggtgctgcctggtggggctctctctttgcccgggacgtggaacaactttcagctggaggacgagagggaatagtgaagctaaaggttgcttttctctgcaccgtccgttcttgctccctctgctccatcactgggaccttgtcaggcgttcataaagcaaaatttgccgaacgagggttcgcagaaaggtggggcagagctcatctgacgtggcatcagtgtgaaagaaaatgtctttatttaaagcccgtgattggtggtctactattctgggagataaagaagaatttgatcaaggctgtttgtgtctggctaatgttgacaatagtggaaatggacaagataaaataattgtgggtagctttatgggatacctaaggatctttagcccccatcctgcaaaaacaggagatggagctcaagccgaagatttgcttctagaagtggatctacgagatccagtacttcaagtggaagtaggaaagtttgtttcaggtaccgaaatgctacatttggctgtgttacattctagaaaactttgtgtctactctgtctcaggaaccttgggtaatgtggaacatgggaaccaatgtcagatgaaattgatgtatgaacataatcttcagagaacagcctgcaatatgacctatggatcatttggtggtgtaaaaggtcgagatttaatttgcatccagtctatggatgggatgctgatggtatttgagcaggagagctatgcttttggaagatttctccctggctttcttctgcctggtcctcttgcctacagttcccgtacagattccttccttactgtctcttcctgccaacaagtggaaagttataagtaccaggtacttgcttttgcaacagatgcagataaaaggcaggagactgaacagcaaaaacttggttctggaaaaagactagttgtggattggactctaaatattggagagcaagcccttgacatatgtattgtctctttcaatcagtcggcatcctctgtttttgttcttggtgagagaaactttttttgccttaaggataatggacaaattcgattcatgaagaagcttgattggagcccaagttgttttctgccatattgctcagtttctgaaggaacaataaatactttgattggaaatcataataacatgctgcatatttatcaagatgtgacactgaagtgggccacccaacttccccacattcctgtagcagtaagagtgggctgtttgcatgatttaaagggagtgatagtcactctgagtgatgatggtcacttgcagtgttcatacctggggacagatccttctctgttccaagctccaaacgttcaatctcgagaactaaactatgatgaacttgatgtagaaatgaaagaacttcagaaaatcatcaaagatgttaacaaatcacaaggtgtttggcccatgactgagagagaagatgacttgaacgtttctgtcgtggtttctcctaactttgattcagtttctcaagcgaccgatgttgaggtgggaactgaccttgtcccttctgtcacggtgaaggtcacactgcagaacagagtgatattgcaaaaagccaaattatcagtctacgtgcaaccaccattagaattgacttgtgatcagttcacctttgaatttatgacaccagatttgactagaacagtaagcttttctgtttatctgaaaagaagttatacaccatcagaattggaaggaaatgctgttgtttcttattccagaccaacagatcgaaatcctgatggcattccgcgagttatccaatgtaaatttagacttcccctaaagttaatttgcctaccaggtcagccttcaaaaactgcaagccacaaaattactattgataccaacaaatctccagtcagtcttcttagtctcttcccaggttttgccagtcagtcagatgatgatcaggtgaatgtaatgggttttcacttcttaggaggtgctcgaattactgttcttgcttccaaaacttctcaacgatatcgcattcagagtgaacaatttgaagatctttggctcataaccaatgagcttattcttcgccttcaagaatattttgaaaaacagggagtcaaagattttgcatgttctttttcgggatctataccccttcaagaatattttgagttgattgatcatcattttgagctacggataaatggtgaaaaattagaagaactcttatctgagagagctgtacaatttcgggccattcaacgccggctactagcaagattcaaagataaaactcctgcccctcttcaacacctggacaccttgttagatggaacctacaagcaggtaattgctctagcagatgcagtggaggaaaaccaaggcaatctgttccagtcattcaccaggctgaagagtgccacccatttggtgattctgctgatcgcgctgtggcagaagcttagtgctgaccaggttgctattctggaagcggcatttctgccgctacaagaagacactcaagaattgggctgggaagaaacggtggatgccgccatttcccacctgttgaagacttgcctgtcgaagagttctaaggagcaggctttgaacctcaacagccagctgaacatacccaaagacacaagccaactgaagaaacatatcaccttgctctgcgatagattatccaaaggtggccgtctctgcctaagtaccgatgcagcagccccacagaccatggtcatgccaggtggttgtactacaatcccagagtcagacctagaagaaagatcagtagaacaagactctacagaactgtttaccaaccacagacatctcactgcagagacacccaggcctgaagtttcacccctccaaggagtctcggaataattcaagtagagttgtttggttgagaggaacatccccatctcaaggccgaacctgtgtgaacctcatgccaagcacagatatagggctggcgcaggtgcttcctaaagctcaccttcctggagatgacatgcatagaaagaggggttgggactttttacttcactaggagaacttgtaacaccatggggaagtcagctgaaacttgtcttgttttgccaggaaaggaagtagttgcctttggtcatccatctgctaatagtcacagaatacagtgaaatgacatagttttgggttagattttataatgcaaagattcagatccaaaataatttcataccccattttttcacagaattcttatatagtaaatgtatcaagtttaataaagcatctcattgtcaaataatatcttggattttatttataattagagggatttatgagtgattgctctacattatttcttcaaaggaaaggaaaggaattgaagactttgctactctctggtaagacttgaatgtgattattttataaataaaagaaccactatgaaactttcatgtgatttgttctattaagctaaacgtggaagaagggaagttttctagtattgtatgaaaatgtttaaatattttcaaggaagctagtacattaacatccccttttcattaccccattgggtggcaccttttaaaaatccaggttattaaaggattcacactttattacagttaaaatttaaggtttttatgtgtaagaagtgaaagaaactttgctaatttcaagttcgaattacagttgtgagattgatttatttaaataaaaatatgcctttgccagtt

SEQ ID NO: 2251 - protein, 887 aa, Homosapiens; identical to SEQ ID NO: 258

SEQ ID NO: 2252 - DNA, 4146 bp, Homosapiens
gtggcctgcccccggagcccaggcaggaggagggtcttccttaaggaactgctgccaggacagggcagaggattgcagtaattatcactctctgctaatgaggaccaggccgtggttcactcgagccccgccccagtagcaatctaattccaaccgcggccctctcagaagtcggtccccgcctttgcgcctcagcctctctggactccagcccccagaagtcggcgcggcacggcgtgacctgcgcagtggcgtccgttgtaagtgctatgacaacagggcgaagatggctcagagttaggctggagaggggaggtgtcccttccgctgcggccgtcgggtttctgctacatcccattcaccgcctcctccatcctttcctcctcggtgtgagcagcaggacttgcatttgttctcgcctgcctagtgtcttccaagggatagatgccgtttcctctgctggtctctgggggtgacggggggcgcaggggagcttcttgggggaatcactccaactctgtggagctggtggtgctgcctggtggggctctctctttgcccgggacgtggaacaactttcagctggaggacgagagggaatagtgaagctaaaggttgcttttctctgcaccgtccgttcttgctccctctgctccatcactgggaccttgtcaggcgttcataaagcaaaatttgccgaacgagggttcgcagaaaggtggggcagagctcatctgacgtggcatcagtgtgaaagaaaatgtctttatttaaagcccgtgattggtggtctactattctgggagataaagaagaatttgatcaaggctgtttgtgtctggctaatgttgacaatagtggaaatggacaagataaaataattgtgggtagctttatgggatacctaaggatctttagcccccatcctgcaaaaacaggagatggagctcaagccgaagatttgcttctagaagtggatctacgagatccagtacttcaagtggaagtaggaaagtttgtttcaggtaccgaaatgctacatttggctgtgttacattctagaaaactttgtgtctactctgtctcaggaaccttgggtaatgtggaacatgggaaccaatgtcagatgaaattgatgtatgaacataatcttcagagaacagcctgcaatatgacctatggatcatttggtggtgtaaaaggtcgagatttaatttgcatccagtctatggatgggatgctgatggtatttgagcaggagagctatgcttttggaagatttctccctggctttcttctgcctggtcctcttgcctacagttcccgtacagattccttccttactgtctcttcctgccaacaagtggaaagttataagtaccaggtacttgcttttgcaacagatgcagataaaaggcaggagactgaacagcaaaaacttggttctggaaaaagactagttgtggattggactctaaatattggagagcaagcccttgacatatgtattgtctctttcaatcagtcggcatcctctgtttttgttcttggtgagagaaactttttttgccttaaggataatggacaaattcgattcatgaagaagcttgattggagcccaagttgttttctgccatattgctcagtttctgaaggaacaataaatactttgattggaaatcataataacatgctgcatatttatcaagatgtgacactgaagtgggccacccaacttccccacattcctgtagcagtaagagtgggctgtttgcatgatttaaagggagtgatagtcactctgagtgatgatggtcacttgcagtgttcatacctggggacagatccttctctgttccaagctccaaacgttcaatctcgagaactaaactatgatgaacttgatgtagaaatgaaagaacttcagaaaatcatcaaagatgttaacaaatcacaaggtgtttggcccatgactgagagagaagatgacttgaacgtttctgtcgtggtttctcctaactttgattcagtttctcaagcgaccgatgttgaggtgggaactgaccttgtcccttctgtcacggtgaaggtcacactgcagaacagagtgatattgcaaaaagccaaattatcagtctacgtgcaaccaccattagaattgacttgtgatcagttcacctttgaatttatgagcattccgcgagttatccaatgtaaatttagacttcccctaaagttaatttgcctaccaggtcagccttcaaaaactgcaagccacaaaattactattgataccaacaaatctccagtcagtcttcttagtctcttcccaggttttgccagtcagtcagatgatgatcaggtgaatgtaatgggttttcacttcttaggaggtgctcgaattactgttcttgcttccaaaacttctcaacgatatcgcattcagagtgaacaatttgaagatctttggctcataaccaatgagcttattcttcgccttcaagaatattttgaaaaacagggagtcaaagattttgcatgttctttttcgggatctataccccttcaagaatattttgagttgattgatcatcattttgagctacggataaatggtgaaaaattagaagaactcttatctgagagagctgtacaatttcgggccattcaacgccggctactagcaagattcaaagataaaactcctgcccctcttcaacacctggacaccttgttagatggaacctacaagcaggtaattgctctagcagatgcagtggaggaaaaccaaggcaatctgttccagtcattcaccaggctgaagagtgccacccatttggtgattctgctgatcgcgctgtggcagaagcttagtgctgaccaggttgctattctggaagcggcatttctgccgctacaagaagacactcaagaattgggctgggaagaaacggtggatgccgccatttcccacctgttgaagacttgcctgtcgaagagttctaaggagcaggctttgaacctcaacagccagctgaacatacccaaagacacaagccaactgaagaaacatatcaccttgctctgcgatagattatccaaaggtggccgtctctgcctaagtaccgatgcagcagccccacagaccatggtcatgccaggtggttgtactacaatcccagagtcagacctagaagaaagatcagtagaacaagactctacagaactgtttaccaaccacagacatctcactgcagagacacccaggcctgaagtttcacccctccaaggagtctcggaataattcaagtagagttgtttggttgagaggaacatccccatctcaaggccgaacctgtgtgaacctcatgccaagcacagatatagggctggcgcaggtgcttcctaaagctcaccttcctggagatgacatgcatagaaagaggggttgggactttttacttcactaggagaacttgtaacaccatggggaagtcagctgaaacttgtcttgttttgccaggaaaggaagtagttgcctttggtcatccatctgctaatagtcacagaatacagtgaaatgacatagttttgggttagattttataatgcaaagattcagatccaaaataatttcataccccattttttcacagaattcttatatagtaaatgtatcaagtttaataaagcatctcattgtcaaataatatcttggattttatttataattagagggatttatgagtgattgctctacattatttcttcaaaggaaaggaaaggaattgaagactttgctactctctggtaagacttgaatgtgattattttataaataaaagaaccactatgaaactttcatgtgatttgttctattaagctaaacgtggaagaagggaagttttctagtattgtatgaaaatgtttaaatattttcaaggaagctagtacattaacatccccttttcattaccccattgggtggcaccttttaaaaatccaggttattaaaggattcacactttattacagttaaaatttaaggtttttatgtgtaagaagtgaaagaaactttgctaatttcaagttcgaattacagttgtgagattgatttatttaaataaaaatatgcctttgccagtt

SEQ ID NO: 2253 - protein, 847 aa, Homosapiens; identical to SEQ ID NO: 256

SEQ ID NO: 2254 - DNA, 2452 bp, Homosapiens
ctttctaaaatacattctaaataatttattttttccatttattatggctctctaatacaggttgggggccagatatgttaacatagatgagcacgcacaatctgttaagtggctactgtgtaacactcctcatccattttctccttcagtctatgttctacccatgataaattgctattttcctcccaaattctcttgcccttttgtgtaccgttttctctgttcatgctgtctgttcctcgaagtaaagaacagcagtggtgtagaatgccagtttctttgtaccttgttctggagttaattcctagtagctgtgttaccttaggcaagcttctttttttgtttttgtttctgtttttgagacagagtctcactctgttgcctggactggagtgcagtggagcaatctcggttcactgcaaactccaccttccaggtgtcaccacgcccagctaatttttttgtatttttagtaaagatgtggttttctcatgttggctaggctggtcttgaacttctggcctcacgtgatccgcccacctaggcctcccaaagtgttgggattacaggcgtgagccactgtgcccggtcttaggcaagcttcttaatctctctgtatttcagttttctcatcataataaatgaggacaataatagtatcaacctcacaggtttgttgtgaagatttaaagagttacttcatgtaagtgcttatgacagtacctggcatgtggtgagtgcttattaaattttaactgttgttaataacagttgccccaaattatgtaatttatattatttttacattgcttatagcaccagatttgactagaacagtaagcttttctgtttatctgaaaagaagttatacaccatcagaattggaaggaaatgctgttgtttcttattccagaccaacagatcgaaatcctgatggcattccgcgagttatccaatgtaaatttagacttcccctaaagttaatttgcctaccaggtcagccttcaaaaactgcaagccacaaaattactattgataccaacaaatctccagtcagtcttcttagtctcttcccaggttttgccagtcagtcagatgatgatcaggtgaatgtaatgggttttcacttcttaggaggtgctcgaattactgttcttgcttccaaaacttctcaacgatatcgcattcagagtgaacaatttgaagatctttggctcataaccaatgagcttattcttcgccttcaagaatattttgaaaaacagggagtcaaagattttgcatgttctttttcgggatctataccccttcaagaatattttgagttgattgatcatcattttgagctacggataaatggtgaaaaattagaagaactcttatctgagagagctgtacaatttcgggccattcaacgccggctactagcaagattcaaagataaaactcctgcccctcttcaacacctggacaccttgttagatggaacctacaagcaggtaattgctctagcagatgcagtggaggaaaaccaaggcaatctgttccagtcattcaccaggctgaagagtgccacccatttggtgattctgctgatcgcgctgtggcagaagcttagtgctgaccaggttgctattctggaagcggcatttctgccgctacaagaagacactcaagaattgggctgggaagaaacggtggatgccgccatttcccacctgttgaagacttgcctgtcgaagagttctaaggagcaggctttgaacctcaacagccagctgaacatacccaaagacacaagccaactgaagaaacatatcaccttgctctgcgatagattatccaaaggtggccgtctctgcctaagtaccgatgcagcagccccacagaccatggtcatgccaggtggttgtactacaatcccagagtcagacctagaagaaagatcagtagaacaagactctacagaactgtttaccaaccacagacatctcactgcagagacacccaggcctgaagtttcacccctccaaggagtctcggaataattcaagtagagttgtttggttgagaggaacatccccatctcaaggccgaacctgtgtgaacctcatgccaagcacagatatagggctggcgcaggtgcttcctaaagctcaccttcctggagatgacatgcatagaaagaggggttgggactttttacttcactaggagaacttgtaacaccatggggaagtcagctgaaacttgtcttgttttgccaggaaaggaagtagttgcctttggtcatccatctgctaatagtcacagaatacagtgaaatgacatagttttgggttagattttataatgcaaagattcagatccaaaataatttcataccccattttttcacagaattcttatatagtaaatgtatcaagtttaataaagcatctcattgtcaaat

SEQ ID NO: 2255 - protein, 310 aa, Homosapiens [sequence omitted]

SEQ ID NO: 2256 - DNA, 2890 bp, Homosapiens
ctttctaaaatacattctaaataatttattttttccatttattatggctctctaatacaggttgggggccagatatgttaacatagatgagcacgcacaatctgttaagtggctactgtgtaacactcctcatccattttctccttcagtctatgttctacccatgataaattgctattttcctcccaaattctcttgcccttttgtgtaccgttttctctgttcatgctgtctgttcctcgaagtaaagaacagcagtggtgtagaatgccagtttctttgtaccttgttctggagttaattcctagtagctgtgttaccttaggcaagcttctttttttgtttttgtttctgtttttgagacagagtctcactctgttgcctggactggagtgcagtggagcaatctcggttcactgcaaactccaccttccaggtgtcaccacgcccagctaatttttttgtatttttagtaaagatgtggttttctcatgttggctaggctggtcttgaacttctggcctcacgtgatccgcccacctaggcctcccaaagtgttgggattacaggcgtgagccactgtgcccggtcttaggcaagcttcttaatctctctgtatttcagttttctcatcataataaatgaggacaataatagtatcaacctcacaggtttgttgtgaagatttaaagagttacttcatgtaagtgcttatgacagtacctggcatgtggtgagtgcttattaaattttaactgttgttaataacagttgccccaaattatgtaatttatattatttttacattgcttatagcaccagatttgactagaacagtaagcttttctgtttatctgaaaagaagttatacaccatcagaattggaaggaaatgctgttgtttcttattccagaccaacagatcgaaatcctgatggcattccgcgagttatccaatgtaaatttagacttcccctaaagttaatttgcctaccaggtcagccttcaaaaactgcaagccacaaaattactattgataccaacaaatctccagtcagtcttcttagtctcttcccaggttttgccagtcagtcagatgatgatcaggtgaatgtaatgggttttcacttcttaggaggtgctcgaattactgttcttgcttccaaaacttctcaacgatatcgcattcagagtgaacaatttgaagatctttggctcataaccaatgagcttattcttcgccttcaagaatattttgaaaaacagggagtcaaagattttgcatgttctttttcgggatctataccccttcaagaatattttgagttgattgatcatcattttgagctacggataaatggtgaaaaattagaagaactcttatctgagagagctgtacaatttcgggccattcaacgccggctactagcaagattcaaagataaaactcctgcccctcttcaacacctggacaccttgttagatggaacctacaagcaggtaattgctctagcagatgcagtggaggaaaaccaaggcaatctgttccagtcattcaccaggctgaagagtgccacccatttggtgattctgctgatcgcgctgtggcagaagcttagtgctgaccaggttgctattctggaagcggcatttctgccgctacaagaagacactcaagaattgggctgggaagaaacggtggatgccgccatttcccacctgttgaagacttgcctgtcgaagagttctaaggagcaggctttgaacctcaacagccagctgaacatacccaaagacacaagccaactgaagaaacatatcaccttgctctgcgatagattatccaaaggtggccgtctctgcctaagtaccgatgcagcagccccacagaccatggtcatgccaggtggttgtactacaatcccagagtcagacctagaagaaagatcagtagaacaagactctacagaactgtttaccaaccacagacatctcactgcagagacacccaggcctgaagtttcacccctccaaggagtctcggaataattcaagtagagttgtttggttgagaggaacatccccatctcaaggccgaacctgtgtgaacctcatgccaagcacagatatagggctggcgcaggtgcttcctaaagctcaccttcctggagatgacatgcatagaaagaggggttgggactttttacttcactaggagaacttgtaacaccatggggaagtcagctgaaacttgtcttgttttgccaggaaaggaagtagttgcctttggtcatccatctgctaatagtcacagaatacagtgaaatgacatagttttgggttagattttataatgcaaagattcagatccaaaataatttcataccccattttttcacagaattcttatatagtaaatgtatcaagtttaataaagcatctcattgtcaaataatatcttggattttatttataattagagggatttatgagtgattgctctacattatttcttcaaaggaaaggaaaggaattgaagactttgctactctctggtaagacttgaatgtgattattttataaataaaagaaccactatgaaactttcatgtgatttgttctattaagctaaacgtggaagaagggaagttttctagtattgtatgaaaatgtttaaatattttcaaggaagctagtacattaacatccccttttcattaccccattgggtggcaccttttaaaaatccaggttattaaaggattcacactttattacagttaaaatttaaggtttttatgtgtaagaagtgaaagaaactttgctaatttcaagttcgaattacagttgtgagattgatttatttaaataaaaatatgcctttgccagtt

SEQ ID NO: 2257 - protein, 310 aa, Homosapiens [sequence omitted]

SEQ ID NO: 2258 - DNA, 807 bp, Homosapiens
ggcatttctgccgctacaagaagacactcaagaattgggctgggaagaaacggtggatgccgccatttcccacctgttgaagacttgcctgtcgaagagttctaaggagcaggctttgaacctcaacagccagctgaacatacccaaagacacaagccaactgaagaaacatatcaccttgctctgcgatagattatccaaaggtggccgtctctgcctaagtaccgatgcagcagccccacagaccatggtcatgccaggtggttgtactacaatcccagagtcagacctagaagaaagatcagtagaacaagactctacagaactgtttaccaaccacagacatctcactgcagagacacccaggcctgaagtttcacccctccaaggagtctcggaataattcaagtagagttgtttggttgagaggaacatccccatctcaaggccgaacctgtgtgaacctcatgccaagcacagatatagggctggcgcaggtgcttcctaaagctcaccttcctggagatgacatgcatagaaagaggggttgggactttttacttcactaggagaacttgtaacaccatggggaagtcagctgaaacttgtcttgttttgccaggaaaggaagtagttgcctttggtcatccatctgctaatagtcacagaatacagtgaaatgacatagttttgggttagattttataatgcaaagattcagatccaaaataatttcataccccattttttcacagaattcttatatagtaaatgtatcaagtttaataaagcatctcattgtcaaat

SEQ ID NO: 2259 - protein, 51 aa, Homosapiens
MVMPGGCTTIPESDLEERSVEQDSTELFTNHRHLTAETPRPEVSPLQGVSE

SEQ ID NO: 2260 - DNA, 1245 bp, Homosapiens
ggcatttctgccgctacaagaagacactcaagaattgggctgggaagaaacggtggatgccgccatttcccacctgttgaagacttgcctgtcgaagagttctaaggagcaggctttgaacctcaacagccagctgaacatacccaaagacacaagccaactgaagaaacatatcaccttgctctgcgatagattatccaaaggtggccgtctctgcctaagtaccgatgcagcagccccacagaccatggtcatgccaggtggttgtactacaatcccagagtcagacctagaagaaagatcagtagaacaagactctacagaactgtttaccaaccacagacatctcactgcagagacacccaggcctgaagtttcacccctccaaggagtctcggaataattcaagtagagttgtttggttgagaggaacatccccatctcaaggccgaacctgtgtgaacctcatgccaagcacagatatagggctggcgcaggtgcttcctaaagctcaccttcctggagatgacatgcatagaaagaggggttgggactttttacttcactaggagaacttgtaacaccatggggaagtcagctgaaacttgtcttgttttgccaggaaaggaagtagttgcctttggtcatccatctgctaatagtcacagaatacagtgaaatgacatagttttgggttagattttataatgcaaagattcagatccaaaataatttcataccccattttttcacagaattcttatatagtaaatgtatcaagtttaataaagcatctcattgtcaaataatatcttggattttatttataattagagggatttatgagtgattgctctacattatttcttcaaaggaaaggaaaggaattgaagactttgctactctctggtaagacttgaatgtgattattttataaataaaagaaccactatgaaactttcatgtgatttgttctattaagctaaacgtggaagaagggaagttttctagtattgtatgaaaatgtttaaatattttcaaggaagctagtacattaacatccccttttcattaccccattgggtggcaccttttaaaaatccaggttattaaaggattcacactttattacagttaaaatttaaggtttttatgtgtaagaagtgaaagaaactttgctaatttcaagttcgaattacagttgtgagattgatttatttaaataaaaatatgcctttgccagtt

SEQ ID NO: 2261 - protein, 51 aa, Homosapiens; identical to SEQ ID NO: 2259

SEQ ID NO: 2262 - DNA, 1037 bp, Homosapiens
gatctccaacccttggagggacagactgttaacatcctcatttgtagatgaggatgaggctaagaggaattaagtaacttgctcaaggtcaaacaggtgacagagccagaattccaaaccagcctagtctggaatattccagataccacactcttcacaggttcccaacacttgaacataaacactcaataatctgtataatacatcaagtgcccacttttcttattgtcatctttgtattaattcaaaattggcttttgtatccagggctgggaagaaacggtggatgccgccatttcccacctgttgaagacttgcctgtcgaagagttctaaggagcaggctttgaacctcaacagccagctgaacatacccaaagacacaagccaactgaagaaacatatcaccttgctctgcgatagattatccaaaggtggccgtctctgcctaagtaccgatgcagcagccccacagaccatggtcatgccaggtggttgtactacaatcccagagtcagacctagaagaaagatcagtagaacaagactctacagaactgtttaccaaccacagacatctcactgcagagacacccaggcctgaagtttcacccctccaaggagtctcggaataattcaagtagagttgtttggttgagaggaacatccccatctcaaggccgaacctgtgtgaacctcatgccaagcacagatatagggctggcgcaggtgcttcctaaagctcaccttcctggagatgacatgcatagaaagaggggttgggactttttacttcactaggagaacttgtaacaccatggggaagtcagctgaaacttgtcttgttttgccaggaaaggaagtagttgcctttggtcatccatctgctaatagtcacagaatacagtgaaatgacatagttttgggttagattttataatgcaaagattcagatccaaaataatttcataccccattttttcacagaattcttatatagtaaatgtatcaagtttaataaagcatctcattgtcaaat

SEQ ID NO: 2263 - protein, 51 aa, Homosapiens; identical to SEQ ID NO: 2259

SEQ ID NO: 2264 - DNA, 1475 bp, Homosapiens
gatctccaacccttggagggacagactgttaacatcctcatttgtagatgaggatgaggctaagaggaattaagtaacttgctcaaggtcaaacaggtgacagagccagaattccaaaccagcctagtctggaatattccagataccacactcttcacaggttcccaacacttgaacataaacactcaataatctgtataatacatcaagtgcccacttttcttattgtcatctttgtattaattcaaaattggcttttgtatccagggctgggaagaaacggtggatgccgccatttcccacctgttgaagacttgcctgtcgaagagttctaaggagcaggctttgaacctcaacagccagctgaacatacccaaagacacaagccaactgaagaaacatatcaccttgctctgcgatagattatccaaaggtggccgtctctgcctaagtaccgatgcagcagccccacagaccatggtcatgccaggtggttgtactacaatcccagagtcagacctagaagaaagatcagtagaacaagactctacagaactgtttaccaaccacagacatctcactgcagagacacccaggcctgaagtttcacccctccaaggagtctcggaataattcaagtagagttgtttggttgagaggaacatccccatctcaaggccgaacctgtgtgaacctcatgccaagcacagatatagggctggcgcaggtgcttcctaaagctcaccttcctggagatgacatgcatagaaagaggggttgggactttttacttcactaggagaacttgtaacaccatggggaagtcagctgaaacttgtcttgttttgccaggaaaggaagtagttgcctttggtcatccatctgctaatagtcacagaatacagtgaaatgacatagttttgggttagattttataatgcaaagattcagatccaaaataatttcataccccattttttcacagaattcttatatagtaaatgtatcaagtttaataaagcatctcattgtcaaataatatcttggattttatttataattagagggatttatgagtgattgctctacattatttcttcaaaggaaaggaaaggaattgaagactttgctactctctggtaagacttgaatgtgattattttataaataaaagaaccactatgaaactttcatgtgatttgttctattaagctaaacgtggaagaagggaagttttctagtattgtatgaaaatgtttaaatattttcaaggaagctagtacattaacatccccttttcattaccccattgggtggcaccttttaaaaatccaggttattaaaggattcacactttattacagttaaaatttaaggtttttatgtgtaagaagtgaaagaaactttgctaatttcaagttcgaattacagttgtgagattgatttatttaaataaaaatatgcctttgccagtt

SEQ ID NO: 2265 - protein, 51 aa, Homosapiens; identical to SEQ ID NO: 2259

SEQ ID NO: 2266 - DNA, 633 bp, Homosapiens
ggaatgagaaagaggaaaactctgagaaagcagccacacagaagccaagcgaagggaggatttccaaggtcagcagatggagcaaggtggttgtactacaatcccagagtcagacctagaagaaagatcagtagaacaagactctacagaactgtttaccaaccacagacatctcactgcagagacacccaggcctgaagtttcacccctccaaggagtctcggaataattcaagtagagttgtttggttgagaggaacatccccatctcaaggccgaacctgtgtgaacctcatgccaagcacagatatagggctggcgcaggtgcttcctaaagctcaccttcctggagatgacatgcatagaaagaggggttgggactttttacttcactaggagaacttgtaacaccatggggaagtcagctgaaacttgtcttgttttgccaggaaaggaagtagttgcctttggtcatccatctgctaatagtcacagaatacagtgaaatgacatagttttgggttagattttataatgcaaagattcagatccaaaataatttcataccccattttttcacagaattcttatatagtaaatgtatcaagtttaataaagcatctcattgtcaaat

SEQ ID NO: 2267 - protein, 64 aa, Homosapiens
MRKRKTLRKQPHRSQAKGGFPRSADGARWLYYNPRVRPRRKISRTRLYRTVYQPQTSHCRDTQA

SEQ ID NO: 2268 - DNA, 1071 bp, Homosapiens
ggaatgagaaagaggaaaactctgagaaagcagccacacagaagccaagcgaagggaggatttccaaggtcagcagatggagcaaggtggttgtactacaatcccagagtcagacctagaagaaagatcagtagaacaagactctacagaactgtttaccaaccacagacatctcactgcagagacacccaggcctgaagtttcacccctccaaggagtctcggaataattcaagtagagttgtttggttgagaggaacatccccatctcaaggccgaacctgtgtgaacctcatgccaagcacagatatagggctggcgcaggtgcttcctaaagctcaccttcctggagatgacatgcatagaaagaggggttgggactttttacttcactaggagaacttgtaacaccatggggaagtcagctgaaacttgtcttgttttgccaggaaaggaagtagttgcctttggtcatccatctgctaatagtcacagaatacagtgaaatgacatagttttgggttagattttataatgcaaagattcagatccaaaataatttcataccccattttttcacagaattcttatatagtaaatgtatcaagtttaataaagcatctcattgtcaaataatatcttggattttatttataattagagggatttatgagtgattgctctacattatttcttcaaaggaaaggaaaggaattgaagactttgctactctctggtaagacttgaatgtgattattttataaataaaagaaccactatgaaactttcatgtgatttgttctattaagctaaacgtggaagaagggaagttttctagtattgtatgaaaatgtttaaatattttcaaggaagctagtacattaacatccccttttcattaccccattgggtggcaccttttaaaaatccaggttattaaaggattcacactttattacagttaaaatttaaggtttttatgtgtaagaagtgaaagaaactttgctaatttcaagttcgaattacagttgtgagattgatttatttaaataaaaatatgcctttgccagtt

SEQ ID NO: 2269 - protein, 64 aa, Homosapiens; identical to SEQ ID NO: 2267

SEQ ID NO: 2270 - DNA, 4188 bp, Homosapiens
gggaggcaggacctgcattccaataagttggcaagtgatgcttctgcagggagagaagagctgctctaggctgtgcaccatttctctctctcccctttactggaatcttttctatcatcactctcgtttaatggcttcatgaatttcgtacattgtgtttcttattgtgggccacctcaaatcctttttggtccttgatgttgtataatatttagtcaacgttaagaacaaactgtcctccaaaccagggtttgatagtccgggcattttcatatgtattagagaaaacattttaataacagcttcatgaaggagaaagaggagccataagtagttttaactcaatttagggttaataagtaaccactattaattgagcatctactgtgtattagccctggatatgcagactcactcagtcctcacaaaattctatgaagtgggtgtttttatctccattttataggttaggaatggaggctcaggaaggtcatatgccttgaatgagggggggcattgctaagcggtggcttcaagggcttccctagctcctatcaccagcaccaaaacacccactaaaattaatctaataagtaattatacaattgagatagttttgcatacagttgtgcataataaatgaaattgtgcttgctctacaaatgtgcttcaagacaccccctctctttcaacttgctcattctcccactgcccttccaaagcgaaccctttgagtgacgctccacccagggccacttagctccaccacagtgacgccaaagtttcggctggaaactaaggaagtgaaagttctaagttgcttgccaagtgctttatatttttttaatttttaaaatttttgtacttagtaaattcgaaccagtgtcagtagccaaatgccttaaaatcaggaagggcttgggaagttttctacagcatatgacacaccttccaaggatccccctcaacttgctagtctgtagtcatctcccgtctggtttctttaaacaggaatgtgattgtctatcctggagcatgttgctcccctttgattctaattttaaaagcccatatggcgctggtgtgtgggtctgtcatctttccatcatgctctgggcagggtggagggtccagtatgagtttctgtgactaaaggaggacttacaagacctagagtagaagtcaagatctctaactgtggagctgtggcaaggaattacaagaaaagcctgggctatagggtcaaccaagttagaatcttggttttgtcacctgctggaaaccagggcttgggcaagtgagctcatctcattgaacgtttcgtttctagataatgaacatctcagactttttaaaattttgaaatatttaattgatgaataagaactgaatatattcaaggtatacaatgcaatgattttatttaagtatataatgtataatgattatcactatcagaataattaaaacattcttcaccacccatgatgtacattagatcccagaacttattcatcttataactgaaggtttgtacagtttgatcagcgtctccccatttccctcatccccagcctttagtaaccaccattttaccctccttctatgagtttgagttttttagattccacatgtgagataatgcagtatttgtctttctgtgtctggcttatttcacttagcataatgtcctctaggttcacccatgttgtaacaaatggcgggatttccttcatttttatggctgaataatattccattgtgtatatgtaccacaatttccttatctgtcatccactgatcgacacttaggttgtttccatatcttggttattgtgaataatgcttctatgaacatgggagtgcagatatctctttgaagtactgatttcattttctttggatacatacccagtagtggggtttctggatcatatgatggtagttctatttttaactttttgagaatctccatactgttttgcataagtggttgtactaatttaggacccaccagcagtgtacagggctccctttttctgcatccttgccagcccttgttatttcttgtcttttttgacagtagattcctaacaggagtgaggtgatgtctcattatggttttgattctcatttccctgatgattagtgatttgagcatttttttcatgcacttattgaccacttatatgtcttctttggaaaaatgtctattcaggtcctttgcctatgttttaattgagttgtttctcaagcttactgtgtagaattataataaaggatctggcacatagtacaggcttagtaaatggtagttctgatgacactgatgatcatgacaaggagaaatgaaatatcatctgaataaggaaatattaaaggactaaggttgttcatctctagggagagagggtccttagaaacagtcatgaaacaaacagaggttttcatgcagagctggtgcctgctttttctgtattctgatacactgagtgtggagaccatggattctgtccaaatgtagcgaataagaaaatgtgcctagatgttagacaggctcggttcaatctggatcaactccatcctagctctatgactggtcaaattggccagtctctttgattctcagtttattcattgtaaaatggggataatagtcctataagactcaagtttttgtaaggactgtgcttgacacagtgccaggcatgtactttaagtgctgttatttgaattgcatttcaatacatggccagcactcccagattggattagttgctgtggaatggcctacagaaagatcttacagagtctgtcttgaagacagcatttcatgagcagtacaggttgtcagtgtggaatgattcagagggattcctgttacatcagagttcctacagactcagacacagagaaggaacacccatggacagcctagtgtcctatggagacacagtgccttttgcatgagcctcaactgcagagcttctcagcaggacagttgctaagaaaattggtcatctactttctaattttgcctgctgccatattgccagtccaggtaatttccatgttcagtgttaaaaggtggatacttccaaattggtcttcactttgaaagcatgttgtttcttcatgttttaccaacctgtgtgatcagagttttttatgcaggaagatttagggtgggctatttcaaaacaacccctatgaatacccatgtatcatgtaacagtgtgattctgtgctttctgccttcccatttgtgtctgatacaggaatagaaataagaccttcatgatgatagcttaatattttccctctttgcaccttggcttattatccatctgaaattttatatatatataatttgtgtgtgtgtgtgtgtgtgtgtggagcagggggtgtgggtactgtgattttctctagtgctgaccagttaaggaccaagctttctgttggggaggtgagtgagcagaaaaaaaatgaacttggaatcacgtaacatcctatttttctgaaaatagctttggaataagaaacaagaaaatgagaatgcagaaaatatgatctgttacctcagattgtttctaaaacaaatgctttcacaaagtagaggtaaatcttttttctactctgtaactgctctgacctgtgtaaacccagtgggcactttcagctgggctggaatgtcagagaattcccggtttgtctaggttacaagatattgtcttcatttctgttgtttttctgcataaagaccattcattcattattcacgaactggttcagtcattcattcaacaatactattcagcatctaatatgcagagatgaaggaattgttaaccctgtttgaagaaattcacgcttactgggacaacagacatgtatgtccatgatttacagtgaggggtcattacagtgagcacagctttaggaacactgagcagggatctcccactggtttgggactctcatggaaacctaccaagagaggagagttgagctgacccttgaggaatgataaagaattttccattaggccgggtgcggtggatacgcctgtaatcccagctacttgggaggctgaggcaggagaatcacttgaacccaggaggcagagattgcagcgagctaagattacaccactgcactccagcctgggcgacagagcaagactctgtc

SEQ ID NO: 2271 - protein, 69 aa, Homosapiens
MTHLPRIPLNLLVCSHLPSGFFKQECDCLSWSMLLPFDSNFKSPYGAGVWVCHLSIMLWAGWRVQYEFL

SEQ ID NO: 2272 - DNA, 1058 bp, Homosapiens
agtcagtgaaacggcagaatcagaagaggttccacaaccagaaaatcttggctggaatttcaccatcaggaataaaacagaaaaactaaaagagtgccccagatagcctttcttaggggcctgtgtcaggtcgcaggaatcttgttggtgatccatccagatgttgtgtgttctggaagtggacatcgcggctctgtgtttttgaagtcagatctcattgctgtggtttctatgcctgaccccccgaagttcttgctcctgttgccacagggagccgggagagcacagagcgctgctcccggtgccctgcagccacacaaacatgctcctgctcctggcggaggcagagctgctgggaaagacatttcggaagtttcctgtggctgcaacaaattgttcaaatctgcactggagcaccgctgtgacctgtctttctccatcttagggcaaacagctcctgaaactggaaactccccagcacctcctcaccctacccctcaggctctccttgtgggggtggggcagggggagttgtctggaatgcctggcctctctgtccaagcatggcagccttgccccatgggtggtgcagactcagtttcccatgcaccttgccccagggaggaggtaggggttccttccatagagatggtgaagaataagggaggtagtgatcgtctctgggatccagttagatctgcgtttgcaggcagaaagaggctggggcacatggagagagtgatcaactggaagattctagggtcctcaattttgaaaggtgacatgataccctggaaagggcatgaacttagttgtcagttcgtccttgccttttccaatcaatgctgtgtggccacggcaaattaatgaacatctctgagtttcggtctcctgtctaaaatgaggtgataatagcttcttgaaggttgtaaggccccaaacatgctgcctggcacatagatggctaatcaatattttcctacccttcccttccttcccttctctggagttgctacctgtcttctcctggggccttgcaaataaacttctgaattaaa

SEQ ID NO: 2273 - protein, 211 aa, Homosapiens; identical to SEQ ID NO: 704

SEQ ID NO: 2274 - DNA, 1589 bp, Homosapiens
aagatatcccccatggcagagaaaaaaaaaagtttcttctgggatgcagacaatccaggaatcagtgataatccactgacctttctaggaagtaagagcaaagaacaaacaggttagattctgagaagctgtttctaagtttgatggttttttttttcctaagcctgaggcactgagaagggttcaagcttgtattctccagatgcaagatttactgttacagcacactgaagtcctgagccctccgccacccgcaaggccttcctcggagacagggacctatccagagatgtctctgtcactgtcaggatgcgctgcaagtggacaaagggtttccttcgtgttgaccctaagaagacctcgacttgatcaaggaagaactgagcatggcttgcagtagagacagtcacacacagcttcccatgaataggtgtgggcctgatcatcttagcaccttctctagccttcaagaagctctcaaaatcagggccatcttggtatttcactagctgcttctttctttttttgatattttaagagacagggacttgctatgttgcccaggttggacttgtattcctgggctcaagccattatcctgccccagggctcccaagtagctgggactacaggcctgtgccacctcacccaccctcgctgtttatttcaatgaactgcaggttgatgatgatcaatcttctttcctaatctcctggttgaaattagggatattcagatttttttgaagtggagactatcagggtgttagaagacctagttctgaacctgctctctgctaacttaccatacgactttaggcaagttgctgccccactaagaacttcagtcttatctgtgaaatcaagggactggactaagtggtctccgagatcccctccagctgaaaccatctcctgtactgtccactattatagcaaataaccacacatggctgattaaatctaaattaatgaaataaaagtcagaatgtagttcctcaatctcactaatcatatgtcaagggctttaatagccatgtgtggccagtggctgccaggttgaacagtgtagttctcctgctctcattttattgatgatcatggtttcataacaaaacctgccagttgaagaccactttcacgtgtatggtgcattttaatacacgcttacatttaactacccaaaataggcaagagagatattctaatatctgccttatcagatgaggacactaactcaaagagtaaattacttgctatagggtcataccactaatgactaaatgtagtttccaagcccaggactctctaacacatggtacaaagtcatgacgagaagacatgtgccccctggccaaaactattcaacccatggtagcaccagaactgagatccagggattaagggctgatctggagaccctgtgccttggtgtagaccttagctcagcacatcctagctgtgtgaccatgggcaagttatttaatatctctgggctcctttctagtcctctgttaaatgggaatgaccacaggatccactgcttatgagaactgcacaagtagatgcaaataaaatgctttgcatggg

SEQ ID NO: 2275 - protein, 65 aa, Homosapiens
MQDLLLQHTEVLSPPPPARPSSETGTYPEMSLSLSGCAASGQRVSFVLTLRRPRLDQGRTEHGLQ

SEQ ID NO: 2276 - DNA, 1410 bp, Homosapiens
ggcaaacacagacagtttctagttgcaagatatcccccatggcagagaaaaaaaaaagtttcttctgggatgcagacaatccaggaatcagtgataatccactgacctttctaggaagtaagagcaaagaacaaacaggttagattctgagaagctgtttctaagtttgatggttttttttttcctaagcctgaggcactgagaagggttcaagcttgtattctccagatgcaagccaacctattgctgcaactgacaaatgagtataatactgacacaaatgtgggctgtttttgtttgtgtgtgaagacatatgtcagaactccactcatctgtcaatgatggtgcaaataaagcccgatttccactggcagctattataaccaggagaggatcctgcctttggctaaggccagcggaaaggaaggcaaatggagagacacaaagagcctgaatctttgagccatcactcagttgcgatcaaactgcctggaacccaccccaccccgatcgcctgctcggacaaaaataactgaagctcccattgttcaaaccagcttgtgtcatggtttctgatgtttataactaagaccaattcaaacaatacaatattttaaatctttattattttttaaggaaacaatagcttaagggtaaaaactcatctctaattgtaaaaaaaaattatctctaattgtaggcttttgaagttagggtcggtcagtatttttagatagaatctttcaaaactcaggagagagactcagcttatttcatgtgtatgatgaggatgtctcctttattctttttcctgctatcacacttatgccaggctttctttcaaaacttaactcacccagctccttgtctttgaagccttcttttaattcttctcccacattccccaaaaccaagtcaattctctccctcagtgccctcatgtgtataaattgcatatcatatggcatttttttcatgtctgtaagactcccaatttcccaaaggcgaggttactgtcattttcttctgtatctacagtgaccatcacatgaaaagtactccataaaggtgttaaggatggaattgtgtccccaaccccaaaattcatgtgttgaagccctcaccctcgatgtgaccatatttggagatagatagggcctttaaagaggtaattaagttaaatgaagtcaaaatagtggggcctagtatcatatgaccgatgtccttataggaagaggagagacaccagggatgtgcacacacagaggggagtccatgggaggacggggcaagaaggtggctgtcctcgagccagagagaggcctcagaagaaacccaacttgctggcaccttgatcttgaactttcggcctccagaactgtgagaaaataaattcctgttgtttaagcc

SEQ ID NO: 2277 - protein, 46 aa, Homosapiens
MSELHSSVNDGANKARFPLAAIITRRGSCLWLRPAERKANGETQRA

SEQ ID NO: 2278 - DNA, 3509 bp, Homosapiens
acgcttgcgcggcgagtagaacgtgtggcggcggcggagatcgcgtctctttcgctccgtgtcccgctgctgctcctgtgagcgcccggcgagtccgtcccgtccaccgtccgcagctggtagccagcctgcccctcgcctcgactccctttcaccaacaccgacacccacattgacacctccagtccggccagccgctccactcgttgcctttgcatctccacacatggcgtcctccgcgcagagcggcggctcctccgggggacccgcggtccccaccgtgcagcggggcatcatcaagatggtcctctcagggtgcgccatcattgtccgaggtcagcctcgtggtgggcctcctcctgagcggcagatcaacctcagcaacattcgtgctggaaatcttgctcgccgggcagccgccacacaacctgatgcaaaggatacccctgatgagccctgggcatttccagctcgagagttccttcgaaagaagctgattgggaaggaagtctgtttcacgatagaaaacaagactccccaggggcgagagtatggcatgatctaccttggaaaagataccaatggggaaaacattgcagaatcactggttgcagagggcttagccacccggagagaaggcatgagagctaataatcctgagcagaaccggctttcagaatgtgaagaacaagcaaaggcagccaagaaagggatgtggagtgaggggaacggttcacatactatccgggatctcaagtataccattgaaaacccaaggcactttgtggactcacaccaccagaagcctgttaatgctatcatcgagcatgtgcgggacggcagtgtggtcagggccctgctcctcccagattactacctggttacagtcatgctgtcaggcatcaagtgcccaacttttcgacgggaagcagatggcagtgaaactccagagccttttgctgcagaagccaaatttttcactgagtcgcgactgcttcagagagatgttcagatcattctggagagctgccacaaccagaacattctgggtaccatccttcatccaaatggcaacatcacagagctcctcctgaaggaaggtttcgcacgctgtgtggactggtcgattgcagtttacacccggggcgcagaaaagctgagggcggcagagaggtttgccaaagagcgcaggctgagaatatggagagactatgtggctcccacagctaatttggaccaaaaggacaagcagtttgttgccaaggtgatgcaggttctgaatgctgatgccattgttgtgaagctgaactcaggcgattacaagacgattcacctgtccagcatccgaccaccgaggctggagggggagaacacccaggataagaacaagaaactgcgtcccctgtatgacattccttacatgtttgaggcccgggaatttcttcgaaaaaagcttattgggaagaaggtcaatgtgacggtggactacattagaccagccagcccagccacagagacagtgcctgccttttcagagcgtacctgtgccactgtcaccattggaggaataaacattgctgaggctcttgtcagcaaaggtctagccacagtgatcagataccggcaggatgatgaccagagatcatcacactacgatgaactgcttgctgcagaggccagagctattaagaatggcaaaggattgcatagcaagaaggaagtgcctatccaccgtgttgcagatatatctggggatacccaaaaagcaaagcagttcctgccttttcttcagcgggcaggtcgttctgaagctgtggtggaatacgtcttcagtggttctcgtctcaaactctatttgccaaaggaaacttgccttatcaccttcttgcttgcaggcattgaatgccccagaggagcccgaaacctcccaggcttggtgcaggaaggagagcccttcagcgaggaagctacacttttcaccaaggaactggtgctgcagcgagaggtggaggtggaggtggagagcatggacaaggccggcaactttatcggctggctgcacatcgacggtgccaacctgtccgtcctgctggtggagcacgcgctctccaaggtccacttcaccgccgaacgcagctcctactacaagtccctgctgtctgccgaggaggccgcaaagcagaagaaagagaaggtctgggcccactatgaggagcagcccgtggaggaggtgatgccagtgctggaggagaaggagcgatctgctagctacaagcccgtgtttgtgactgagatcactgatgacctgcacttctacgtgcaggatgtggagaccggcacccagttggagaagctgatggagaacatgcgcaatgacattgccagtcacccccctgtagagggctcctatgccccccgcaggggagagttctgcattgccaaatttgtagatggagaatggtaccgtgcccgagtagagaaagtcgagtctcctgccaaaatacatgtcttctacattgactacggcaacagagaggtcctgccatccacccgcctgggtaccctatcacctgccttcagcactcgggtgctgccagctcaagccacggagtatgccttcgccttcatccaggtgccccaagatgatgatgcccgcacggacgccgtggacagcgtagttcgggatatccagaacactcagtgcctgctcaacgtggaacacctgagtgccggctgcccccatgtcaccctgcagtttgcagattccaagggcgatgtggggctgggcttggtgaaggaagggctggtcatggtggaggtgcgcaaggagaaacagttccagaaagtgatcacagaatacctgaatgcccaagagtcagccaagagcgccaggctgaacctgtggcgctatggagactttcgagctgatgatgcagacgaatttggctacagccgctaaggaggggatcgggtttggcccccagccccgctcacgccagtccctcttcctctgccgggagggtgttttcaactccaaaccccagagaggggttgtagattgggtccagctttgcttcagtgtgtggaaatgtctcgtggggtggcatcggggctgcggggtggggaccccaaggctttctggggcagacccttgtcctctgggatgatgggcactgctatccacagtctctgccagttggttttatttggaggtttgtgggctttttttaaaaaaaaaaagtcctcaaatcaggaagaaacatcaaagactatgtcctagtggagggagtaatcctaacacccaggctggccgccagctggcacctgcctctatcccagactgccctcgtcccagctctctgtccaactgttgattatgtgatttttctgatacgtccattctcaaatgccagtgtgttcacatcttcgctctggccagcccattctgtatttaaagcttttgaggcccaataaaatagtacgtgctgtctgcagcccttattgatcac

SEQ ID NO: 2279 - protein, 910 aa, Homosapiens; identical to SEQ ID NO: 260

SEQ ID NO: 2280 - DNA, 3675 bp, Homosapiens
acgcttgcgcggcgagtagaacgtgtggcggcggcggagatcgcgtctctttcgctccgtgtcccgctgctgctcctgtgagcgcccggcgagtccgtcccgtccaccgtccgcagctggtagccagcctgcccctcgcctcgactccctttcaccaacaccgacacccacattgacacctccagtccggccagccgctccactcgttgcctttgcatctccacacatggcgtcctccgcgcagagcggcggctcctccgggggacccgcggtccccaccgtgcagcggggcatcatcaagatggtcctctcagggtgcgccatcattgtccgaggtcagcctcgtggtgggcctcctcctgagcggcagatcaacctcagcaacattcgtgctggaaatcttgctcgccgggcagccgccacacaacctgatgcaaaggatacccctgatgagccctgggcatttccagctcgagagttccttcgaaagaagctgattgggaaggaagtctgtttcacgatagaaaacaagactccccaggggcgagagtatggcatgatctaccttggaaaagataccaatggggaaaacattgcagaatcactggttgcagagggcttagccacccggagagaaggcatgagagctaataatcctgagcagaaccggctttcagaatgtgaagaacaagcaaaggcagccaagaaagggatgtggagtgaggggaacggttcacatactatccgggatctcaagtataccattgaaaacccaaggcactttgtggactcacaccaccagaagcctgttaatgctatcatcgagcatgtgcgggacggcagtgtggtcagggccctgctcctcccagattactacctggttacagtcatgctgtcaggcatcaagtgcccaacttttcgacgggaagcagatggcagtgaaactccagagccttttgctgcagaagccaaatttttcactgagtcgcgactgcttcagagagatgttcagatcattctggagagctgccacaaccagaacattctgggtaccatccttcatccaaatggcaacatcacagagctcctcctgaaggaaggtttcgcacgctgtgtggactggtcgattgcagtttacacccggggcgcagaaaagctgagggcggcagagaggtttgccaaagagcgcaggctgagaatatggagagactatgtggctcccacagctaatttggaccaaaaggacaagcagtttgttgccaaggtgatgcaggttctgaatgctgatgccattgttgtgaagctgaactcaggcgattacaagacgattcacctgtccagcatccgaccaccgaggctggagggggagaacacccaggataagaacaagaaactgcgtcccctgtatgacattccttacatgtttgaggcccgggaatttcttcgaaaaaagcttattgggaagaaggtcaatgtgacggtggactacattagaccagccagcccagccacagagacagtgcctgccttttcagagcgtacctgtgccactgtcaccattggaggaataaacattgctgaggctcttgtcagcaaaggtctagccacagtgatcagataccggcaggatgatgaccagagatcatcacactacgatgaactgcttgctgcagaggccagagctattaagaatggcaaaggattgcatagcaagaaggaagtgcctatccaccgtgttgcagatatatctggggatacccaaaaagcaaagcagttcctgccttttcttcagcgggcaggtcgttctgaagctgtggtggaatacgtcttcagtggttctcgtctcaaactctatttgccaaaggaaacttgccttatcaccttcttgcttgcaggcattgaatgccccagaggagcccgaaacctcccaggcttggtgcaggaaggagagcccttcagcgaggaagctacacttttcaccaaggaactggtgctgcagcgagaggtggaggtggaggtggagagcatggacaaggccggcaactttatcggctggctgcacatcgacggtgccaacctgtccgtcctgctggtggagcacgcgctctccaaggtccacttcaccgccgaacgcagctcctactacaagtccctgctgtctgccgaggaggccgcaaagcagaagaaagagaaggtctgggcccactatgaggagcagcccgtggaggaggtgatgccagtgctggaggagaaggagcgatctgctagctacaagcccgtgtttgtgactgagatcactgatgacctgcacttctacgtgcaggatgtggagaccggcacccagttggagaagctgatggagaacatgcgcaatgacattgccagtcacccccctgtagagggctcctatgccccccgcaggggagagttctgcattgccaaatttgtagatggagaatggtaccgtgcccgagtagagaaagtcgagtctcctgccaaaatacatgtcttctacattgactacggcaacagagaggtcctgccatccacccgcctgggtaccctatcacctgccttcagcactcgggtgctgccagctcaagccacggagtatgccttcgccttcatccaggtgccccaagatgatgatgcccgcacggacgccgtggacagcgtagttcgggatatccagaacactcagtgcctgctcaacgtggaacacctgagtgccggctgcccccatgtcaccctgcagtttgcagattccaagggcgatgtggggctgggcttggtgaaggaagggctggtcatggtggaggtgcgcaaggagaaacagttccagaaagtgatcacagaatacctgaatgcccaagagtcagccaagagcgccaggctgaacctgtggcgctatggagactttcgagctgatgatgcagacgaatttggctacagccgctaaggaggggatcgggtttggcccccagccccgctcacgccagtccctcttcctctgccgggagggtgttttcaactccaaaccccagagaggggttgtagattgggtccagctttgcttcagtgtgtggaaatgtctcgtggggtggcatcggggctgcggggtggggaccccaaggctttctggggcagacccttgtcctctgggatgatgggcactgctatccacagtctctgccagttggttttatttggaggtttgtgggctttttttaaaaaaaaaaagtcctcaaatcaggaagaaacatcaaagactatgtcctagtggagggagtaatcctaacacccaggctggccgccagctggcacctgcctctatcccagactgccctcgtcccagctctctgtccaactgttgattatgtgatttttctgatacgtccattctcaaatgccagtgtgttcacatcttcgctctggccagcccattctgtatttaaagcttttgaggcccaataaaatagtacgtgctgtctgcagcccttattgatcacagtgtggtccagagcatggagtcttggcagcttcacccaggaggagacctggacacttgaatgacccccaagatagtcatccaaatgcctggacattctccctagaaatagagccagctggggaaagcaaggcagatcttcagagtctgagcaagcaactcctgga

SEQ ID NO: 2281 - protein, 910 aa, Homosapiens; identical to SEQ ID NO: 260

SEQ ID NO: 2282 - DNA, 451 bp, Homosapiens
attgcagaatcactggttgcagagggcttagccacccggagagaaggcatgagagctaataagtaagtacccaaggctttctggggcagacccttgtcctctgggatgatgggcactgctatccacagtctctgccagttggttttatttggaggtttgtgggctttttttaaaaaaaaaaagtcctcaaatcaggaagaaacatcaaagactatgtcctagtggagggagtaatcctaacacccaggctggccgccagctggcacctgcctctatcccagactgccctcgtcccagctctctgtccaactgttgattatgtgatttttctgatacgtccattctcaaatgccagtgtgttcacatcttcgctctggccagcccattctgtatttaaagcttttgaggcccaataaaatagtacgtgctgtctgcagcccttattgatcac

SEQ ID NO: 2283 - protein, 38 aa, Homosapiens
MMGTAIHSLCQLVLFGGLWAFFKKKKSSNQEETSKTMS

SEQ ID NO: 2284 - DNA, 617 bp, Homosapiens
attgcagaatcactggttgcagagggcttagccacccggagagaaggcatgagagctaataagtaagtacccaaggctttctggggcagacccttgtcctctgggatgatgggcactgctatccacagtctctgccagttggttttatttggaggtttgtgggctttttttaaaaaaaaaaagtcctcaaatcaggaagaaacatcaaagactatgtcctagtggagggagtaatcctaacacccaggctggccgccagctggcacctgcctctatcccagactgccctcgtcccagctctctgtccaactgttgattatgtgatttttctgatacgtccattctcaaatgccagtgtgttcacatcttcgctctggccagcccattctgtatttaaagcttttgaggcccaataaaatagtacgtgctgtctgcagcccttattgatcacagtgtggtccagagcatggagtcttggcagcttcacccaggaggagacctggacacttgaatgacccccaagatagtcatccaaatgcctggacattctccctagaaatagagccagctggggaaagcaaggcagatcttcagagtctgagcaagcaactcctgga

SEQ ID NO: 2285 - protein, 38 aa, Homosapiens; identical to SEQ ID NO: 2283

SEQ ID NO: 2286 - DNA, 513 bp, Homosapiens
atcaggatacccaaaaagcaaagcagttcctgccttttcttcagcgggcaggtcgttctgaagctgtggtggaatacgtcttcagtggttctcgtctcaaactctatttgccaaaggaaacttgccttatcaccttcttgctttctggggcagacccttgtcctctgggatgatgggcactgctatccacagtctctgccagttggttttatttggaggtttgtgggctttttttaaaaaaaaaaagtcctcaaatcaggaagaaacatcaaagactatgtcctagtggagggagtaatcctaacacccaggctggccgccagctggcacctgcctctatcccagactgccctcgtcccagctctctgtccaactgttgattatgtgatttttctgatacgtccattctcaaatgccagtgtgttcacatcttcgctctggccagcccattctgtatttaaagcttttgaggcccaataaaatagtacgtgctgtctgcagcccttattgatc

SEQ ID NO: 2287 - protein, 38 aa, Homosapiens; identical to SEQ ID NO: 2283

SEQ ID NO: 2288 - DNA, 681 bp, Homosapiens
atcaggatacccaaaaagcaaagcagttcctgccttttcttcagcgggcaggtcgttctgaagctgtggtggaatacgtcttcagtggttctcgtctcaaactctatttgccaaaggaaacttgccttatcaccttcttgctttctggggcagacccttgtcctctgggatgatgggcactgctatccacagtctctgccagttggttttatttggaggtttgtgggctttttttaaaaaaaaaaagtcctcaaatcaggaagaaacatcaaagactatgtcctagtggagggagtaatcctaacacccaggctggccgccagctggcacctgcctctatcccagactgccctcgtcccagctctctgtccaactgttgattatgtgatttttctgatacgtccattctcaaatgccagtgtgttcacatcttcgctctggccagcccattctgtatttaaagcttttgaggcccaataaaatagtacgtgctgtctgcagcccttattgatcacagtgtggtccagagcatggagtcttggcagcttcacccaggaggagacctggacacttgaatgacccccaagatagtcatccaaatgcctggacattctccctagaaatagagccagctggggaaagcaaggcagatcttcagagtctgagcaagcaactcctgga

SEQ ID NO: 2289 - protein, 38 aa, Homosapiens; identical to SEQ ID NO: 2283

SEQ ID NO: 2290 - DNA, 1342 bp, Homosapiens
gctgcgggagctctggcttcgcaacaaccccatcgaaagcatcccctcttacgccttcaaccgggtgccctccctcatgcgcctggacttgggggagctcaagaagctggagtatatctctgagggagcttttgaggggctgttcaacctcaagtatctgaacttgggcatgtgcaacattaaagacatgcccaatctcacccccctggtggggctggaggagctggagatgtcagggaaccacttccctgagatcaggcctggctccttccatggcctgagctccctcaagaagctctgggtcatgaactcacaggtcagcctgattgagcggaatgcttttgacgggctggcttcacttgtggaactcaacttggcccacaataacctctcttctttgccccatgacctctttaccccgctgaggtacctggtggagttgcatctacaccacaacccttggaactgtgattgtgacattctgtggctagcctggtggcttcgagagtatatacccaccaattccacctgctgtggccgctgtcatgctcccatgcacatgcgaggccgctacctcgtggaggtggaccaggcctccttccagtgctctgcccccttcatcatggacgcacctcgagacctcaacatttctgagggtcggatggcagaacttaagtgtcggactccccctatgtcctccgtgaagtggttgctgcccaatgggacagtgctcagccacgcctcccgccacccaaggatctctgtcctcaacgacggcaccttgaacttttcccacgtgctgctttcagacactggggtgtacacatgcatggtgaccaatgttgcaggcaactccaacgcctcggcctacctcaatgtgagcacggctgagcttaacacctccaactacagcttcttcaccacagtaacaagatctctgttattctggtccatctaatgatgtaacttctttcagttattattttagctttaaaaggaaataaggggttcagatttgaaagggggtggtatgggtgggggaggggaattgccaacaaaagaacactgattgtaatgtgagaaaagtgtatttttgtattttaataaatattgttgaatttttaattcaatgtccccaaagggttaaattgagtaagaccctgaacctatagattcttatgagccaatcatttctatttaataaaaaagcggggaggggagggtacaggtatgatgggggaaagacaaatgttaaattattttcaagtatgggaaaatgctaaagctgtcaacctttccttagcttaaataaaagcaccccgattctagtgcaccttctaca

SEQ ID NO: 2291 - protein, 293 aa, Homosapiens
MRLDLGELKKLEYISEGAFEGLFNLKYLNLGMCNIKDMPNLTPLVGLEELEMSGNHFPEIRPGSFHGLSSLKKLWVMNSQVSLIERNAFDGLASLVELNLAHNNLSSLPHDLFTPLRYLVELHLHHNPWNCDCDILWLAWWLREYIPTNSTCCGRCHAPMHMRGRYLVEVDQASFQCSAPFIMDAPRDLNISEGRMAELKCRTPPMSSVKWLLPNGTVLSHASRHPRISVLNDGTLNFSHVLLSDTGVYTCMVTNVAGNSNASAYLNVSTAELNTSNYSFFTTVTRSLLFWSI

SEQ ID NO: 2292 - DNA, 3924 bp, Homosapiens
ggacaccacgccagtgctttcctgccttccttccgagatggaaagaggagctcctagctcacttaagccggggtagggctggttctcctttccgagccaaaatcccaggcgatggtgaattatgaacgtgccacaccatgaagctcttgtggcaggtaactgtgcaccaccacacctggaatgccatcctgctcccgttcgtctacctcacggcgcaagtgtggattctgtgtgcagccatcgctgctgccgcctcagccgggccccagaactgcccctccgtctgctcgtgcagtaaccagttcagcaaggtggtgtgcacgcgccggggcctctccgaggtcccgcagggtattccctcgaacacccggtacctcaacctcatggagaacaacatccagatgatccaggccgacaccttccgccacctccaccacctggaggtcctgcagttgggcaggaactccatccggcagattgaggtgggggccttcaacggcctggccagcctcaacaccctggagctgttcgacaactggctgacagtcatccctagcggggcctttgaatacctgtccaagctgcgggagctctggcttcgcaacaaccccatcgaaagcatcccctcttacgccttcaaccgggtgccctccctcatgcgcctggacttgggggagctcaagaagctggagtatatctctgagggagcttttgaggggctgttcaacctcaagtatctgaacttgggcatgtgcaacattaaagacatgcccaatctcacccccctggtggggctggaggagctggagatgtcagggaaccacttccctgagatcaggcctggctccttccatggcctgagctccctcaagaagctctgggtcatgaactcacaggtcagcctgattgagcggaatgcttttgacgggctggcttcacttgtggaactcaacttggcccacaataacctctcttctttgccccatgacctctttaccccgctgaggtacctggtggagttgcatctacaccacaacccttggaactgtgattgtgacattctgtggctagcctggtggcttcgagagtatatacccaccaattccacctgctgtggccgctgtcatgctcccatgcacatgcgaggccgctacctcgtggaggtggaccaggcctccttccagtgctctgcccccttcatcatggacgcacctcgagacctcaacatttctgagggtcggatggcagaacttaagtgtcggactccccctatgtcctccgtgaagtggttgctgcccaatgggacagtgctcagccacgcctcccgccacccaaggatctctgtcctcaacgacggcaccttgaacttttcccacgtgctgctttcagacactggggtgtacacatgcatggtgaccaatgttgcaggcaactccaacgcctcggcctacctcaatgtgagcacggctgagcttaacacctccaactacagcttcttcaccacagtaacagtggagaccacggagatctcgcctgaggacacaacgcgaaagtacaagcctgttcctaccacgtccactggttaccagccggcatataccacctctaccacggtgctcattcagactacccgtgtgcccaagcaggtggcagtacccgcgacagacaccactgacaagatgcagaccagcctggatgaagtcatgaagaccaccaagatcatcattggctgctttgtggcagtgactctgctagctgccgccatgttgattgtcttctataaacttcgtaagcggcaccagcagcggagtacagtcacagccgcccggactgttgagataatccaggtggacgaagacatcccagcagcaacatccgcagcagcaacagcagctccgtccggtgtatcaggtgagggggcagtagtgctgcccacaattcatgaccatattaactacaacacctacaaaccagcacatggggcccactggacagaaaacagcctggggaactctctgcaccccacagtcaccactatctctgaaccttatataattcagacccataccaaggacaaggtacaggaaactcaaatatgactcccctcccccaaaaaacttataaaatgcaatagaatgcacacaaagacagcaacttttgtacagagtggggagagactttttcttgtatatgcttatatattaagtctatgggctggttaaaaaaaacagattatattaaaatttaaagacaaaaagtcaaaacaaaaatattttctaacttgtaagttctatttaaagggggtgggggggaatcttgggaacgttgtggggtacaagccacaagttaacttgctatgctgccagaagggatttctggtataaggttgaaattgctgagataaaataaactaaaacaacaaacatccttaaagaggtagggtgtgggctgctgagggggcaagagggatagactgaatctgtcattttttagaagatgcttcataggacacaggactatccatttctacagacatctttcttaagccgagagctgtctttgcagaattatcttattaaaaaaaaatacaaaaaaaaagcaccatgaatttgtactgtgccaaaatgatagtggcaataatatttttcttcagaggctaaggggaagatagacctgtacatgtattttaagcaggaaaaccaccaaaattcaaacgaacccttaaaggggctgagtctttgtccatgtgcacaagtcttgggggtctgtgcactggacacacatgtgccttgcctgacagaattgcttagaaaggagcagagaaggacgggagctggcgtagctctcagtctaatgctttcacattgcaccagattcctgcagttgggcttaacccactctgcaaggcatgtgtctattcagggtttcccaggaggaggaggcccctgaaggggtgcggcagcaggggggtgggaagggagggtaaagcagagagaatgtattcacaggaggccataaattagcattgtgccatgtccacctgttgttcctggactctgacacatgattgtagacaatgatggcattttatgatttttaaaaaagattttgtttgttttaaggtggagagggaggagaagcctgaattggggagcttgggagtggaagcttttctcatgcttgtgatttggtgactcttctaaatgctgattcattagggattattacagcggatgtcaactggttgtggtgatggggtgggggcagaacatgagtagcaaagaaaagggagagacgaaaagggtacaggctcacgtaaagtaatgaagcctttcccaaccaggatggttcacaaaaaagctgtgagatccacagttacaagtgacacgcatgcacacatggagttccacatggggtactgttgaatggagcacactgatgggaagcttccctctcccaggccccctcaggagaaggtggaagagaaagggtgggcgtgggtggggaaggcagagatctctgttattctggtccatctaatgatgtaacttctttcagttattattttagctttaaaaggaaataaggggttcagatttgaaagggggtggtatgggtgggggaggggaattgccaacaaaagaacactgattgtaatgtgagaaaagtgtatttttgtattttaataaatattgttgaatttttaattcaatgtccccaaagggttaaattgagtaagaccctgaacctatagattcttatgagccaatcatttctatttaataaaaaagcggggaggggagggtacaggtatgatgggggaaagacaaatgttaaattattttcaagtatgggaaaatgctaaagctgtcaacctttccttagcttaaataaaagcaccccgattctagtgcaccttctaca

SEQ ID NO: 2293 - protein, 653 aa, Homosapiens; identical to SEQ ID NO: 262

SEQ ID NO: 2294 - DNA, 3705 bp, Homosapiens
ggacaccacgccagtgctttcctgccttccttccgagatggaaagaggagctcctagctcacttaagccggggtagggctggttctcctttccgagccaaaatcccaggcgatggtgaattatgaacgtgccacaccatgaagctcttgtggcaggtaactgtgcaccaccacacctggaatgccatcctgctcccgttcgtctacctcacggcgcaagtgtggattctgtgtgcagccatcgctgctgccgcctcagccgggccccagaactgcccctccgtctgctcgtgcagtaaccagttcagcaaggtggtgtgcacgcgccggggcctctccgaggtcccgcagggtattccctcgaacacccggtacctcaacctcatggagaacaacatccagatgatccaggccgacaccttccgccacctccaccacctggaggtcctgcagttgggcaggaactccatccggcagattgaggtgggggccttcaacggcctggccagcctcaacaccctggagctgttcgacaactggctgacagtcatccctagcggggcctttgaatacctgtccaagctgcgggagctctggcttcgcaacaaccccatcgaaagcatcccctcttacgccttcaaccgggtgccctccctcatgcgcctggacttgggggagctcaagaagctggagtatatctctgagggagcttttgaggggctgttcaacctcaagtatctgaacttgggcatgtgcaacattaaagacatgcccaatctcacccccctggtggggctggaggagctggagatgtcagggaaccacttccctgagatcaggcctggctccttccatggcctgagctccctcaagaagctctgggtcatgaactcacaggtcagcctgattgagcggaatgcttttgacgggctggcttcacttgtggaactcaacttggcccacaataacctctcttctttgccccatgacctctttaccccgctgaggtacctggtggagttgcatctacaccacaacccttggaactgtgattgtgacattctgtggctagcctggtggcttcgagagtatatacccaccaattccacctgctgtggccgctgtcatgctcccatgcacatgcgaggccgctacctcgtggaggtggaccaggcctccttccagtgctctgcccccttcatcatggacgcacctcgagacctcaacatttctgagggtcggatggcagaacttaagtgtcggactccccctatgtcctccgtgaagtggttgctgcccaatgggacagtgctcagccacgcctcccgccacccaaggatctctgtcctcaacgacggcaccttgaacttttcccacgtgctgctttcagacactggggtgtacacatgcatggtgaccaatgttgcaggcaactccaacgcctcggcctacctcaatgtgagcacggctgagcttaacacctccaactacagcttcttcaccacagtaacagtggagaccacggagatctcgcctgaggacacaacgcgaaagtacaagcctgttcctaccacgtccactggttaccagccggcatataccacctctaccacggtgctcattcagactacccgtgtgcccaagcaggtggcagtacccgcgacagacaccactgacaagatgcagaccagcctggatgaagtcatgaagaccaccaagatcatcattggctgctttgtggcagtgactctgctagctgccgccatgttgattgtcttctataaacttcgtaagcggcaccagcagcggagtacagtcacagccgcccggactgttgagataatccaggtggacgaagacatcccagcagcaacatccgcagcagcaacagcagctccgtccggtgtatcaggtgagggggcagtagtgctgcccacaattcatgaccatattaactacaacacctacaaaccagcacatggggcccactggacagaaaacagcctggggaactctctgcaccccacagtcaccactatctctgaaccttatataattcagacccataccaaggacaaggtacaggaaactcaaatatgactcccctcccccaaaaaacttataaaatgcaatagaatgcacacaaagacagcaacttttgtacagagtggggagagactttttcttgtatatgcttatatattaagtctatgggctggttaaaaaaaacagattatattaaaatttaaagacaaaaagtcaaaacaaaaatattttctaacttgtaagttctatttaaagggggtgggggggaatcttgggaacgttgtggggtacaagccacaagttaacttgctatgctgccagaagggatttctggtataaggttgaaattgctgagataaaataaactaaaacaacaaacatccttaaagaggtagggtgtgggctgctgagggggcaagagggatagactgaatctgtcattttttagaagatgcttcataggacacaggactatccatttctacagacatctttcttaagccgagagctgtctttgcagaattatcttattaaaaaaaaatacaaaaaaaaagcaccatgaatttgtactgtgccaaaatgatagtggcaataatatttttcttcagaggctaaggggaagatagacctgtacatgtattttaagcaggaaaaccaccaaaattcaaacgaacccttaaaggggctgagtctttgtccatgtgcacaagtcttgggggtctgtgcactggacacacatgtgccttgcctgacagaattgcttagaaaggagcagagaaggacgggagctggcgtagctctcagtctaatgctttcacattgcaccagattcctgcagttgggcttaacccactctgcaaggcatgtgtctattcagggtttcccaggaggaggaggcccctgaaggggtgcggcagcaggggggtgggaagggagggtaaagcagagagaatgtattcacaggaggccataaattagcattgtgccatgtccacctgttgttcctggactctgacacatgattgtagacaatgatggcattttatgatttttaaaaaagattttgtttgttttaaggtggagagggaggagaagcctgaattggggagcttgggagtggaagcttttctcatgcttgtgatttggtgactcttctaaatgctgattcattagggattattacagcggatgtcaactggttgtggtgatggggtgggggcagaacatgagtagcaaagaaaagggagagacgaaaagggtacaggctcacgtaaagtaatgaagcctttcccaaccaggatggttcacaaaaaagctgtgagatccacagttacaagtgacacgcatgcacacatggagttccacatggggtactgttgaatggagcacactgatgggaagcttccctctcccaggccccctcaggagaaggtggaagagaaagggtgggcgtgggtggggaaggcagagatctctgttattctggtccatctaatgatgtaacttctttcagttattattttagctttaaaaggaaataaggggttcagatttgaaagggggtggtatgggtgggggaggggaattgccaacaaaagaacactgattgtaatgtgagaaaagtgtatttttgtattttaataaatattgttgaattttt

SEQ ID NO: 2295 - protein, 653 aa, Homosapiens; identical to SEQ ID NO: 262

SEQ ID NO: 2296 - DNA, 2274 bp, Homosapiens
ggacaccacgccagtgctttcctgccttccttccgagatggaaagaggagctcctagctcacttaagccggggtagggctggttctcctttccgagccaaaatcccaggcgatggtgaattatgaacgtgccacaccatgaagctcttgtggcaggtaactgtgcaccaccacacctggaatgccatcctgctcccgttcgtctacctcacggcgcaagtgtggattctgtgtgcagccatcgctgctgccgcctcagccgggccccagaactgcccctccgtctgctcgtgcagtaaccagttcagcaaggtggtgtgcacgcgccggggcctctccgaggtcccgcagggtattccctcgaacacccggtacctcaacctcatggagaacaacatccagatgatccaggccgacaccttccgccacctccaccacctggaggtcctgcagttgggcaggaactccatccggcagattgaggtgggggccttcaacggcctggccagcctcaacaccctggagctgttcgacaactggctgacagtcatccctagcggggcctttgaatacctgtccaagctgcgggagctctggcttcgcaacaaccccatcgaaagcatcccctcttacgccttcaaccgggtgccctccctcatgcgcctggacttgggggagctcaagaagctggagtatatctctgagggagcttttgaggggctgttcaacctcaagtatctgaacttgggcatgtgcaacattaaagacatgcccaatctcacccccctggtggggctggaggagctggagatgtcagggaaccacttccctgagatcaggcctggctccttccatggcctgagctccctcaagaagctctgggtcatgaactcacaggtcagcctgattgagcggaatgcttttgacgggctggcttcacttgtggaactcaacttggcccacaataacctctcttctttgccccatgacctctttaccccgctgaggtacctggtggagttgcatctacaccacaacccttggaactgtgattgtgacattctgtggctagcctggtggcttcgagagtatatacccaccaattccacctgctgtggccgctgtcatgctcccatgcacatgcgaggccgctacctcgtggaggtggaccaggcctccttccagtgctctgcccccttcatcatggacgcacctcgagacctcaacatttctgagggtcggatggcagaacttaagtgtcggactccccctatgtcctccgtgaagtggttgctgcccaatgggacagtgctcagccacgcctcccgccacccaaggatctctgtcctcaacgacggcaccttgaacttttcccacgtgctgctttcagacactggggtgtacacatgcatggtgaccaatgttgcaggcaactccaacgcctcggcctacctcaatgtgagcacggctgagcttaacacctccaactacagcttcttcaccacagtaacagtggagaccacggagatctcgcctgaggacacaacgcgaaagtacaagcctgttcctaccacgtccactggttaccagccggcatataccacctctaccacggtgctcattcagactacccgtgtgcccaagcaggtggcagtacccgcgacagacaccactgacaagatgcagaccagcctggatgaagtcatgaagaccaccaagatcatcattggctgctttgtggcagtgactctgctagctgccgccatgttgattgtcttctataaacttcgtaagcggcaccagcagcggagtacagtcacagccgcccggactgttgagataatccaggtggacgaagacatcccagcagcaacatccgcagcagcaacagcagctccgtccggtgtatcaggtgagggggcagtagtgctgcccacaattcatgaccatattaactacaacacctacaaaccagcacatggggcccactggacagaaaacagcctggggaactctctgcaccccacagtcaccactatctctgaaccttatataattcagacccataccaaggacaaggtacaggaaactcaaatatgactcccctcccccaaaaaacttataaaatgcaatagaatgcacacaaagacagcaacttttgtacagagtggggagagactttttcttgtatatgcttatatattaagtctatgggctggttaaaaaaaacagattatattaaaatttaaagacaaaaagtcaaaacaaaaatatt

SEQ ID NO: 2297 - protein, 653 aa, Homosapiens; identical to SEQ ID NO: 262

SEQ ID NO: 2298 - DNA, 1446 bp, Homosapiens
gtcctgccagacaagggtgaacccagatgcctgggccagaaccacaggcaggcccggtgaccacagggatacttgtcttggtgtgctcccctagccagcagctggagaaccccctggcctgtgggaacgtagtcagggaacccatgtcacagacagaagggcattgggaggaaatggaaaagcgattagagtccagttatactgcgattgttttcatgggaaccactaggtgtgccagcaccaggcccagagtgagctccccatctactgctggaccagcagggcacgttctctccaggcttcacccactggggagcctttgtacattgcaaagtggaaccaagtcatgggatgaacagggtggcccagagttagcattcccagaggcctggccacagagagctgtcctgtgagagagcaagggggcagcgagtatgtgacatgttggcctgctgcttcctctgcagagagaggtcctgccatccacccgcctgggtaccctatcacctgccttcagcactcgggtgctgccagctcaagccacggagtatgccttcgccttcatccaggtgccccaagatgatgatgcccgcacggacgccgtggacagcgtagttcgggatatccagaacactcagtgcctgctcaacgtggaacacctgagtgccggctgcccccatgtcaccctgcagtttgcagattccaagggcgatgtggggctgggcttggtgaaggaagggctggtcatggtggaggtgcgcaaggagaaacagttccagaaagtgatcacagaatacctgaatgcccaagagtcagccaagagcgccaggctgaacctgtggcgctatggagactttcgagctgatgatgcagacgaatttggctacagccgctaaggaggggatcgggtttggcccccagccccgctcacgccagtccctcttcctctgccgggagggtgttttcaactccaaaccccagagaggggttgtagattgggtccagctttgcttcagtgtgtggaaatgtctcgtggggtggcatcggggctgcggggtggggaccccaaggctttctggggcagacccttgtcctctgggatgatgggcactgctatccacagtctctgccagttggttttatttggaggtttgtgggctttttttaaaaaaaaaaagtcctcaaatcaggaagaaacatcaaagactatgtcctagtggagggagtaatcctaacacccaggctggccgccagctggcacctgcctctatcccagactgccctcgtcccagctctctgtccaactgttgattatgtgatttttctgatacgtccattctcaaatgccagtgtgttcacatcttcgctctggccagcccattctgtatttaaagcttttgaggcccaataaaatagtacgtgctgtctgcagcccttattgatcac

SEQ ID NO: 2299 - protein, 57 aa, Homosapiens
MLACCFLCRERSCHPPAWVPYHLPSALGCCQLKPRSMPSPSSRCPKMMMPARTPWTA

SEQ ID NO: 2300 - DNA, 415 bp, Homosapiens
cacggagtatgccttcgccttcatccaggtgcccccaaggctttctggggcagacccttgtcctctgggatgatgggcactgctatccacagtctctgccagttggttttatttggaggtttgtgggctttttttaaaaaaaaaaagtcctcaaatcaggaagaaacatcaaagactatgtcctagtggagggagtaatcctaacacccaggctggccgccagctggcacctgcctctatcccagactgccctcgtcccagctctctgtccaactgttgattatgtgatttttctgatacgtccattctcaaatgccagtgtgttcacatcttcgctctggccagcccattctgtatttaaagcttttgaggcccaataaaatagtacgtgctgtctgcagcccttattgatcac

SEQ ID NO: 2301 - protein, 42 aa, Homosapiens
MPSPSSRCPQGFLGQTLVLWDDGHCYPQSLPVGFIWRFVGFF

SEQ ID NO: 2302 - DNA, 1608 bp, Homosapiens
gaagaagtcactttttctcggagacacagggcaggtgggtgggagcacagggtaggaaagaaaggggtcacttgcaaatagtctctggctgagggcaaggaaaagaaaaggggaaggcttcctatccagagcctgtttctgcctcactagggttctttctggtttgtgtttttttgtttttttggtatttttttgaggccaagtctcactctgtcacccaggcaggagtgcagtggcgcaatattggctcactgcagcctccgcctcctagcttcaagcgattctcgtgccgcagtttcccaagtagctgggattacaggcatgcaccccatgcccagctaatttttgtgtttttggtagagatggggtttcactgtgttggccaggctggtcgccaactcctggcctcaaggggtccacccacctcagcctcccaaagtgctgggattacaggcatgagccaccgtgcctggccaacctcactagggttctctggggagaaaattacaggcccctgctggccagactttcttgggagtctatggacaggagctggggcccaagtggttgttctctggcttgctctgacctgagtgtgtctctgctccaggatgatgcccgcacggacgccgtggacagcgtagttcgggatatccagaacactcagtgcctgctcaacgtggaacacctgagtgccggctgcccccatgtcaccctgcagtttgcagattccaagggcgatgtggggctgggcttggtgaaggaagggctggtcatggtggaggtgcgcaaggagaaacagttccagaaagtggtatgtgatgtggagaggcggccccagcattgcgccaccaccctcacagagaaagggactgttccacaagccaggaagggagcagggaatccaccatcctgctgttcctgctgaggaaagataatggatttggatcacagaatacctgaatgcccaagagtcagccaagagcgccaggctgaacctgtggcgctatggagactttcgagctgatgatgcagacgaatttggctacagccgctaaggaggggatcgggtttggcccccagccccgctcacgccagtccctcttcctctgccgggagggtgttttcaactccaaaccccagagaggggttgtagattgggtccagctttgcttcagtgtgtggaaatgtctcgtggggtggcatcggggctgcggggtggggaccccaaggctttctggggcagacccttgtcctctgggatgatgggcactgctatccacagtctctgccagttggttttatttggaggtttgtgggctttttttaaaaaaaaaaagtcctcaaatcaggaagaaacatcaaagactatgtcctagtggagggagtaatcctaacacccaggctggccgccagctggcacctgcctctatcccagactgccctcgtcccagctctctgtccaactgttgattatgtgatttttctgatacgtccattctcaaatgccagtgtgttcacatcttcgctctggccagcccattctgtatttaaagcttttgaggcccaataaaatagtacgtgctgtctgcagcccttattgatcac

SEQ ID NO: 2303 - protein, 128 aa, Homosapiens [sequence omitted]

SEQ ID NO: 2304 - DNA, 1774 bp, Homosapiens
gaagaagtcactttttctcggagacacagggcaggtgggtgggagcacagggtaggaaagaaaggggtcacttgcaaatagtctctggctgagggcaaggaaaagaaaaggggaaggcttcctatccagagcctgtttctgcctcactagggttctttctggtttgtgtttttttgtttttttggtatttttttgaggccaagtctcactctgtcacccaggcaggagtgcagtggcgcaatattggctcactgcagcctccgcctcctagcttcaagcgattctcgtgccgcagtttcccaagtagctgggattacaggcatgcaccccatgcccagctaatttttgtgtttttggtagagatggggtttcactgtgttggccaggctggtcgccaactcctggcctcaaggggtccacccacctcagcctcccaaagtgctgggattacaggcatgagccaccgtgcctggccaacctcactagggttctctggggagaaaattacaggcccctgctggccagactttcttgggagtctatggacaggagctggggcccaagtggttgttctctggcttgctctgacctgagtgtgtctctgctccaggatgatgcccgcacggacgccgtggacagcgtagttcgggatatccagaacactcagtgcctgctcaacgtggaacacctgagtgccggctgcccccatgtcaccctgcagtttgcagattccaagggcgatgtggggctgggcttggtgaaggaagggctggtcatggtggaggtgcgcaaggagaaacagttccagaaagtggtatgtgatgtggagaggcggccccagcattgcgccaccaccctcacagagaaagggactgttccacaagccaggaagggagcagggaatccaccatcctgctgttcctgctgaggaaagataatggatttggatcacagaatacctgaatgcccaagagtcagccaagagcgccaggctgaacctgtggcgctatggagactttcgagctgatgatgcagacgaatttggctacagccgctaaggaggggatcgggtttggcccccagccccgctcacgccagtccctcttcctctgccgggagggtgttttcaactccaaaccccagagaggggttgtagattgggtccagctttgcttcagtgtgtggaaatgtctcgtggggtggcatcggggctgcggggtggggaccccaaggctttctggggcagacccttgtcctctgggatgatgggcactgctatccacagtctctgccagttggttttatttggaggtttgtgggctttttttaaaaaaaaaaagtcctcaaatcaggaagaaacatcaaagactatgtcctagtggagggagtaatcctaacacccaggctggccgccagctggcacctgcctctatcccagactgccctcgtcccagctctctgtccaactgttgattatgtgatttttctgatacgtccattctcaaatgccagtgtgttcacatcttcgctctggccagcccattctgtatttaaagcttttgaggcccaataaaatagtacgtgctgtctgcagcccttattgatcacagtgtggtccagagcatggagtcttggcagcttcacccaggaggagacctggacacttgaatgacccccaagatagtcatccaaatgcctggacattctccctagaaatagagccagctggggaaagcaaggcagatcttcagagtctgagcaagcaactcctgga

SEQ ID NO: 2305 - protein, 128 aa, Homosapiens [sequence omitted]

SEQ ID NO: 2306 - DNA, 1094 bp, Homosapiens
aatagagatggggtcagcctggtcttgaactcctgggctcaagtgatcctcctgccttggcctcccaaagtgcagcaattataggcatgagccaccacacctggcctaggttgtaattttaaatggggttgcccgagacctcattaagagggagatactttatcacagactgaagcaggtgggagaggtagccaggaggacgtgaccagaggagcgttccaggcagacagaagagctagtgcgaagagttaagggaaaagccaggagactaatgtgattgtgttttccgttttactctgagggaactaaggctccattggacaggcttgagcaagggagagctctggcgcttacctaagcattctgcagggtcctgctggctgatcatttgagggcaactctgaccactccctttcttctctcgtccctccagatcacagaatacctgaatgcccaagagtcagccaagagcgccaggctgaacctgtggcgctatggagactttcgagctgatgatgcagacgaatttggctacagccgctaaggaggggatcgggtttggcccccagccccgctcacgccagtccctcttcctctgccgggagggtgttttcaactccaaaccccagagaggggttgtagattgggtccagctttgcttcagtgtgtggaaatgtctcgtggggtggcatcggggctgcggggtggggaccccaaggctttctggggcagacccttgtcctctgggatgatgggcactgctatccacagtctctgccagttggttttatttggaggtttgtgggctttttttaaaaaaaaaaagtcctcaaatcaggaagaaacatcaaagactatgtcctagtggagggagtaatcctaacacccaggctggccgccagctggcacctgcctctatcccagactgccctcgtcccagctctctgtccaactgttgattatgtgatttttctgatacgtccattctcaaatgccagtgtgttcacatcttcgctctggccagcccattctgtatttaaagcttttgaggcccaataaaatagtacgtgctgtctgcagcccttattgatcac

SEQ ID NO: 2307 - protein, 85 aa, Homosapiens [sequence omitted]

SEQ ID NO: 2308 - DNA, 1260 bp, Homosapiens
aatagagatggggtcagcctggtcttgaactcctgggctcaagtgatcctcctgccttggcctcccaaagtgcagcaattataggcatgagccaccacacctggcctaggttgtaattttaaatggggttgcccgagacctcattaagagggagatactttatcacagactgaagcaggtgggagaggtagccaggaggacgtgaccagaggagcgttccaggcagacagaagagctagtgcgaagagttaagggaaaagccaggagactaatgtgattgtgttttccgttttactctgagggaactaaggctccattggacaggcttgagcaagggagagctctggcgcttacctaagcattctgcagggtcctgctggctgatcatttgagggcaactctgaccactccctttcttctctcgtccctccagatcacagaatacctgaatgcccaagagtcagccaagagcgccaggctgaacctgtggcgctatggagactttcgagctgatgatgcagacgaatttggctacagccgctaaggaggggatcgggtttggcccccagccccgctcacgccagtccctcttcctctgccgggagggtgttttcaactccaaaccccagagaggggttgtagattgggtccagctttgcttcagtgtgtggaaatgtctcgtggggtggcatcggggctgcggggtggggaccccaaggctttctggggcagacccttgtcctctgggatgatgggcactgctatccacagtctctgccagttggttttatttggaggtttgtgggctttttttaaaaaaaaaaagtcctcaaatcaggaagaaacatcaaagactatgtcctagtggagggagtaatcctaacacccaggctggccgccagctggcacctgcctctatcccagactgccctcgtcccagctctctgtccaactgttgattatgtgatttttctgatacgtccattctcaaatgccagtgtgttcacatcttcgctctggccagcccattctgtatttaaagcttttgaggcccaataaaatagtacgtgctgtctgcagcccttattgatcacagtgtggtccagagcatggagtcttggcagcttcacccaggaggagacctggacacttgaatgacccccaagatagtcatccaaatgcctggacattctccctagaaatagagccagctggggaaagcaaggcagatcttcagagtctgagcaagcaactcctgga

SEQ ID NO: 2309 - protein, 85 aa, Homosapiens [sequence omitted]

SEQ ID NO: 2310 - DNA, 3400 bp, Homosapiens
aggcccaagaagcccatcctgggaaggaaaatgcattggggaaccctgtgcggattcttgtggctttggccctatcttttctatgtccaagctgtgcccatccaaaaagtccaagatgacaccaaaaccctcatcaagacaattgtcaccaggatcaatgacatttcacacacgcagtcagtctcctccaaacagaaagtcaccggtttggacttcattcctgggctccaccccatcctgaccttatccaagatggaccagacactggcagtctaccaacagatcctcaccagtatgccttccagaaacgtgatccaaatatccaacgacctggagaacctccgggatcttcttcacgtgctggccttctctaagagctgccacttgccctgggccagtggcctggagaccttggacagcctggggggtgtcctggaagcttcaggctactccacagaggtggtggccctgagcaggctgcaggggtctctgcaggacatgctgtggcagctggacctcagccctgggtgctgaggccttgaaggtcactcttcctgcaaggactacgttaagggaaggaactctggcttccaggtatctccaggattgaagagcattgcatggacaccccttatccaggactctgtcaatttccctgactcctctaagccactcttccaaaggcataagaccctaagcctccttttgcttgaaaccaaagatatatacacaggatcctattctcaccaggaagggggtccacccagcaaagagtgggctgcatctgggattcccaccaaggtcttcagccatcaacaagagttgtcttgtcccctcttgacccatctccccctcactgaatgcctcaatgtgaccaggggtgatttcagagagggcagaggggtaggcagagcctttggatgaccagaacaaggttccctctgagaattccaaggagttccatgaagaccacatccacacacgcaggaactcccagcaacacaagctggaagcacatgtttatttattctgcattttattctggatggatttgaagcaaagcaccagcttctccaggctctttggggtcagccagggccaggggtctccctggagtgcagtttccaatcccatagatgggtctggctgagctgaacccattttgagtgactcgagggttgggttcatctgagcaagagctggcaaaggtggctctccagttagttctctcgtaactggtttcatttctactgtgactgatgttacatcacagtgtttgcaatggtgttgccctgagtggatctccaaggaccaggttattttaaaaagatttgttttgtcaagtgtcatatgtaggtgtctgcacccaggggtggggaatgtttgggcagaagggagaaggatctagaatgtgttttctgaataacatttgtgtggtgggttctttggaaggagtgagatcattttcttatcttctgcaattgcttaggatgtttttcatgaaaatagctctttcaggggggttgtgaggcctggccaggcaccccctggagagaagtttctggccctggctgaccccaaagagcctggagaagctgatgctttgcttcaaatccatccagaataaaacgcaaagggctgaaagccatttgttggggcagtggtaagctctggctttctccgactgctagggagtggtctttcctatcatggagtgacggtcccacactggtgactgcgatcttcagagcaggggtccttggtgtgaccctctgaatggtccagggttgatcacactctgggtttattacatggcagtgttcctatttggggcttgcatgccaaattgtagttcttgtctgattggctcacccaagcaaggccaaaattaccaaaaatcttggggggtttttactccagtggtgaagaaaactcctttagcaggtggtcctgagacctgacaagcactgctaggcgagtgccaggactccccaggccaggccaccaggatggcccttcccactggaggtcacattcaggaagatgaaagaggaggtttggggtctgccaccatcctgctgctgtgtttttgctatcacacagtgggtggtggatctgtccaaggaaacttgaatcaaagcagttaactttaagactgagcacctgcttcatgctcagccctgactggtgctataggctggagaagctcacccaataaacattaagattgaggcctgccctcagggatcttgcattcccagtggtcaaaccgcactcacccatgtgccaaggtggggtatttaccacagcagctgaacagccaaatgcatggtgcagttgacagcaggtgggaaatggtatgagctgaggggggccgtgcccaggggcccacagggaaccctgcttgcactttgtaacatgtttacttttcagggcatcttagcttctattatagccacatccctttgaaacaagataactgagaatttaaaaataagaaaatacataagaccataacagccaacaggtggcaggaccaggactatagcccaggtcctctgatacccagagcattacgtgagccaggtaatgagggactggaaccagggagaccgagcgctttctggaaaagaggagtttcgaggtagagtttgaaggaggtgagggatgtgaattgcctgcagagagaagcctgttttgttggaaggtttggtgtgtggagatgcagaggtaaaagtgtgagcagtgagttacagcgagaggcagagaaagaagagacaggagggcaagggccatgctgaagggaccttgaagggtaaagaagtttgatattaaaggagttaagagtagcaagttctagagaagaggctggtgctgtggccagggtgagagctgctctggaaaatgtgacccagatcctcacaaccacctaatcaggctgaggtgtcttaagccttttgctcacaaaacctggcacaatggctaattcccagagtgtgaaacttcctaagtataaatggttgtctgtttttgtaacttaaaaaaaaaaaaaaaagtttggccgggtgcggtggctcacgcctgtaatcccagcactttgggaggccaaggtggggggatcacaaggtcactagatggcgagcatcctggccaacatggtgaaaccccgtctctactaaaaacacaaaagttagctgagcgtggtggcgggcgcctgtagtcccagccactcgggaggctgagacaggagaatcgcttaaacctgggaggcggagagtacagtgagccaagatcgcgccactgcactccggcctgatgacagagcgagattccgtcttaaaaaaaaaaaaaaaaaagtttgtttttaaaaaaatctaaataaaataactttgccccctgc

SEQ ID NO: 2311 - protein, 167 aa, Homosapiens; identical to SEQ ID NO: 264

SEQ ID NO: 2312 - DNA, 3261 bp, Homosapiens
ggagtttgagaccgacctggccaacatagtgagacccccatctctattattttgaaaaacaacagcaaattttttcttaacatccaagacaaggccaccagtcaaaactatcaagttttagtagtattttcctgcttgattatataatagcctggcttagagatacaacctttaaataaggaatcttaagatgatgtgcagctgttctttgccttatttgtttgtttgttggttagtttgtagtttctaagaatctgctctgttcagctgtacagttccttcttctggagttaacctgtggcaaggattatgtttcacctgtcacaaaaatgagatctgtgccttcctctattataaagttagggcatgtgattcattcttcgaaatacttcaaaatgtactttggtatgtttttgtcttgaaaagaggttttctagctagaaattcggggcccagaaggtcaaggctccagagatccccttctcatcatccttcagttgtctgaggagacagaggatcacatgtgtcacagtgagtgctgattccccagaatctgcagtcttaagctcccctgctgacgcacacagccagttctctgcttcatattcatgtgacccataattctgagaagagaactgctgagttactgaaagaccttttggaccacccctaaatggagcatcttgatagatggcaaatccagtgtttcttaaacttgtccatgctgcccagagcccactgccttttatcagatgtgagacttcactgccacagtgtcatcccacagtttccttccctggacatttgataaagggaaaatcatttcttgtcctttaaggcagggactattattttttcacttttccacataccccacaacacctaacattgatttactcgtagtaggagtttcatactgttgaactctctaaaggccatttgttccagggcctagctgggcttgtgaaggacaacagagtcatttcctaaggaccccaaaagacagcatgaaggaaaaaataataataaactgctgttcacagtgccttgagtgtaccaccgtactttctgctatgccttgtccattccaatctggacagtctctgtgcccctcctttccactcaagtgttatccagcactcaagttctggctcaaggcccaacatctccgtggggacctcagccatcccagggcattgtgaccccttcctctaagtccccggcacactcgctgattggtaccctctcattcgacaaagcatatgccattgtggcttacttgtcatttctttaggtcttgccttcccaagtagatcatgagccactataagaactagctcccatagtcccagcccctgggcctggtacatggcaatgcttagtgattggtgattgaggataatggtggtaaaggatgtaccagacagtcatctcctgaagagatgccgaacaacctgtccttgttttatgtattttctctttctttcctgtccagttttattcctctcatagtaactgctaaaaaaatatcagttcctgtcactcttccaccccttttctccctctcccctgcattgtggtctgggccttggtccactagcaactccccttaggtgttgcttaatctgcctcatggccaaagccaatcccattcctgtcccccgctacccaagggactcccagtctgtatgcacaaggcgggatgtgaagtctggatgtgcaagaaacccagctgtaagaaacagcttccctcggcttggcatggtggctcatgcctatattcccagcactttgagaggtcaaagtgggagaatcacttgagcccaggagttcaggactagcctgggcaacatagcaagatcccacctctacaaaaaaagaaaaaattcagagtctcaaatgtcccttcatctccttactctcgacctgtctccctagttctctgccgccttttcctctcccctggatctgacactcaattgtctgcatgcacttttcaactgaaagagactccaatgccatccttctgatgaaatttttgctttggatactactgcagaaaaaatgctatcttgtattctggtccatggtggggaagaccctgtcgtagaacctggcaactcaagtggagggaggggccagaacattgttcttatgctatttacagtgagacaacaggattgatgcagaactttctttttttttttttttttttgagacagagtttcattcttgttgcccagggctggagtgcagtggcatgatctcagctcactgcaacctccaccccccaggttcaagcagttcttcctcagcctccggagtagctgggattacaggcgtgcgccaccacgccccactaatttttgtatttttggtagagacggggtttcaccagtgttggccaggctggtctcgaactcctgacctcaggtgatccacccacctcggcctcccaaagtgctgggattacaggcatgaaccaccgtgcccggccgtgatgcgcaactttctaataacatacttttgaaagtgcccagacatacatccctcctctggtaccacagtggccatcagttgccagagaacatgaaattatccagccctcagctctgcagcaggattctgaggagtaaagcaggcctgtaaagtactctaaagtacttcagagaggtaatgccacaaagcgaagaacacctcttggaggcagagcccctcagccctatccaggccagcagtgtccacttgaaatctgaaagcagcctccctcaccaaaccagcaagatggaaaacctccctgggttggcaagtggccctgggaagtacatgccccatctctgtcaggatagcagtggagaggtttcgtgccagtgccagctccacccacccagatggtactcaagactccaagcctgtcaatggggtggaaactttctggcattttctgtcagaagggtgagttagcactgaaccatctcatgtgtcttttcactgagtaacagcccatatccattccatgaaatgagtgactgctttgttgaatcagatagtaacaaacatttatttgtagtctggttgtgtcatatcatggttgaattgcaaacaggttggatagaagagtcagcaaaaatcaacaaaagcattctgtaaaaaacttttctagaattacaataaatggcattgtatattttatttataaattatgtgctgcacatcatttttatcaatgaaatttataataaatttctgtacatatataca

SEQ ID NO: 2313 - protein, 95 aa, Homosapiens
MPQSEEHLLEAEPLSPIQASSVHLKSESSLPHQTSKMENLPGLASGPGKYMPHLCQDSSGEVSCQCQLHPPRWYSRLQACQWGGNFLAFSVRRVS

SEQ ID NO: 2314 - DNA, 3202 bp, Homosapiens
ggagtttgagaccgacctggccaacatagtgagacccccatctctattattttgaaaaacaacagcaaattttttcttaacatccaagacaaggccaccagtcaaaactatcaagttttagtagtattttcctgcttgattatataatagcctggcttagagatacaacctttaaataaggaatcttaagatgatgtgcagctgttctttgccttatttgtttgtttgttggttagtttgtagtttctaagaatctgctctgttcagctgtacagttccttcttctggagttaacctgtggcaaggattatgtttcacctgtcacaaaaatgagatctgtgccttcctctattataaagttagggcatgtgattcattcttcgaaatacttcaaaatgtactttggtatgtttttgtcttgaaaagaggttttctagctagaaattcggggcccagaaggtcaaggctccagagatccccttctcatcatccttcagttgtctgaggagacagaggatcacatgtgtcacagtgagtgctgattccccagaatctgcagtcttaagctcccctgctgacgcacacagccagttctctgcttcatattcatgtgacccataattctgagaagagaactgctgagttactgaaagaccttttggaccacccctaaatggagcatcttgatagatggcaaatccagtgtttcttaaacttgtccatgctgcccagagcccactgccttttatcagatgtgagacttcactgccacagtgtcatcccacagtttccttccctggacatttgataaagggaaaatcatttcttgtcctttaaggcagggactattattttttcacttttccacataccccacaacacctaacattgatttactcgtagtaggagtttcatactgttgaactctctaaaggccatttgttccagggcctagctgggcttgtgaaggacaacagagtcatttcctaaggaccccaaaagacagcatgaaggaaaaaataataataaactgctgttcacagtgccttgagtgtaccaccgtactttctgctatgccttgtccattccaatctggacagtctctgtgcccctcctttccactcaagtgttatccagcactcaagttctggctcaaggcccaacatctccgtggggacctcagccatcccagggcattgtgaccccttcctctaagtccccggcacactcgctgattggtaccctctcattcgacaaagcatatgccattgtggcttacttgtcatttctttaggtcttgccttcccaagtagatcatgagccactataagaactagctcccatagtcccagcccctgggcctggtacatggcaatgcttagtgattggtgattgaggataatggtggtaaaggatgtaccagacagtcatctcctgaagagatgccgaacaacctgtccttgttttatgtattttctctttctttcctgtccagttttattcctctcatagtaactgctaaaaaaatatcagttcctgtcactcttccaccccttttctccctctcccctgcattgtggtctgggccttggtccactagcaactccccttaggtgttgcttaatctgcctcatggccaaagccaatcccattcctgtcccccgctacccaagggactcccagtctgtatgcacaaggcgggatgtgaagtctggatgtgcaagaaacccagctgtaagaaacagcttccctcggcttggcatggtggctcatgcctatattcccagcactttgagaggtcaaagtgggagaatcacttgagcccaggagttcaggactagcctgggcaacatagcaagatcccacctctacaaaaaaagaaaaaattcagagtctcaaatgtcccttcatctccttactctcgacctgtctccctagttctctgccgccttttcctctcccctggatctgacactcaattgtctgcatgcacttttcaactgaaagagactccaatgccatccttctgatgaaatttttgctttggatactactgcagaaaaaatgctatcttgtattctggtccatggtggggaagaccctgtcgtagaacctggcaactcaagtggagggaggggccagaacattgttcttatgctatttacagtgagacaacaggattgatgcagaactttctttttttttttttttttttgagacagagtttcattcttgttgcccagggctggagtgcagtggcatgatctcagctcactgcaacctccaccccccaggttcaagcagttcttcctcagcctccggagtagctgggattacaggcgtgcgccaccacgccccactaatttttgtatttttggtagagacggggtttcaccagtgttggccaggctggtctcgaactcctgacctcaggtgatccacccacctcggcctcccaaagtgctgggattacaggcatgaaccaccgtgcccggccgtgatgcgcaactttctaataacatacttttgaaagtgcccagacatacatccctcctctggtaccacagtggccatcagttgccagagaacatgaaattatccagccctcagctctgcagcaggattctgaggagtaaagcaggcctgtaaagtactctaaagtacttcagagaggtaatgccacaaagcgaagaacacctcttggaggcagagcccctcagccctatccaggccagcagtgtccacttgaaatctgaaagcagcctccctcaccaaaccagcaagatggaaaacctccctgggttggcaagtggccctgggaagtacatgccccatctctgtcaggatagcagtggagaggtttcgtgccagtgccagctccacccacccagatggtactcaagactccaagcctgtcaatggggtggaaactttctggcattttctgtcagaagggtgagttagcactgaaccatctcatgtgtcttttcactgagtaacagcccatatccattccatgaaatgagtgactgctttgttgaatcagatagtaacaaacatttatttgtagtctggttgtgtcatatcatggttgaattgcaaacaggttggatagaagagtcagcaaaaatcaacaaaagcattctgtaaaaaacttttctagaattacaataaatggcattgtatattttatttataaatt

SEQ ID NO: 2315 - protein, 95 aa, Homosapiens; identical to SEQ ID NO: 2313

SEQ ID NO: 2316 - DNA, 2823 bp, Homosapiens
acttccggaatctctcggcgtgtgagcttggttgtcctaccaaagccagcgtttcggctcgcgtgcgccggcctagtttgctcgcgtcctcacgcgctttgggtttcccggtctcatggccggcctgaccttatttgtgggccgcctcccgccctcggcccgcagtgagcagctggaggaactgttcagtcaggtggggccggtgaagcagtgcttcgtggtgactgaaaaagggagtaaggcatgtcgaggctttggctatgtcactttttcaatgctggaagatgttcagagggccctcaaggagattaccacctttgaaggttgcaagatcaacgtgactgttgccaagaaaaaactgaggaacaagacaaaggaaaaggggaaaaatgaaaactcagagtgcccaaagaaggagccgaaggctaaaaaagccaaagtggcagataagaaagccagattaattattcggaacctgagctttaagtgttcagaagatgacttgaagacagtatttgctcaatttggagctgtcctggaagtaaatatccctaggaaaccagatgggaagatgcgcggttttggttttgttcagttcaaaaacctcctagaagcaggtaaagctctcaaaggcatgaacatgaaagagataaaaggccggacagtggctgtggattgggccgtggcaaaggataaatataaagatacacagtctgtttctgctataggtgaggaaaagagccatgaatctaaacatcaggaatcagttaaaaagaagggcagagaggaagaggatatggaagaggaagaaaacgatgatgatgacgatgatgatgatgaagaagatggggtttttgatgatgaagatgaagaggaagagaatatagaatcaaaggtgaccaagcctgtgcaaattcagaagagagcagtcaagagaccagcccctgcaaaaagcagtgatcattctgaggaggacagtgacctagaggaaagcgatagtattgatgatggagaggaactggctcagagtgataccagcactgaggagcaagaggataaagctgtgcaagtctcaaacaaaaagaagaggaaattaccctctgatgtgaatgaagggaaaactgtttttatcagaaatctgtcctttgactcagaagaagaagaacttggggagcttctccaacagtttggagaactcaaatatgtccgcattgtcttgcatccagacacagagcattctaaaggttgtgcatttgcccagttcatgactcaagaagcagctcagaaatgccttctagctgcttctccagagaatgaggctggtgggcttaaactggatggccggcagctcaaggttgacttggcggtgacccgtgatgaggctgcaaagcttcagacgacgaaggtgaagaagccgactggcacccggaatctctatctggcccgagaaggcttgattcgtgctgggacgaaggctgcagagggtgtgagtgctgctgatatggccaaaagagaacggtttgagctgctgaagcatcagaaactcaaggaccagaatatctttgtctcccgaaccaggctctgcctgcacaatctcccaaaggctgtagatgacaaacagctcagaaagctgctgctgagtgctactagtggagagaaaggggtgcgcatcaaggagtgtagagtgatgcgagacctcaaaggagttcatgggaacatgaagggtcagtccctgggctacgcctttgcggagttccaagagcacgagcatgccctgaaagccctccgcctcatcaacaacaatccagaaatctttgggcctctgaagagaccaatagtggagttctctttagaagatcgaagaaaacttaaaatgaaggaattaaggatccagcgcagcttgcaaaaaatgagatccaagcctgcaactggtgagcctcagaaggggcaaccagagcctgcaaaagaccagcaacagaaggcagctcaacaccacacagaggaacaaagcaaggtgcccccagagcagaagagaaaggcgggctctacctcatggaccgggttccagaccaaggctgaagtggagcaggtggagctgcctgatggaaagaagagaagaaaggtcctggcgctcccctcacaccgaggccccaaaatcaggttgcgggacaaaggcaaagtgaagcccgtccatcccaaaaagccaaagccacagataaaccagtggaagcaggagaagcagcaattatcgtccgagcaggtatctaggaaaaaagctaagggaaataagacggaaacccgcttcaaccagctggtcgaacaatataagcagaaattattgggaccttctaaaggagcacctcttgcaaagaggagcaaatggtttgatagttgatgatggcagcaggctgggtaagaagctgggttgtgtactttctggtgacactcctgggctcctccccatcccccgtgtctctcactgagggaaagaaaatccccaagggcactgccactgtgctcggaggtgccctggactgtgtacatctgaactttggtccatcctttgatgtgtggttcgttagccacaaagagaaatatctgaaagtcaacatgatgcttcttgcatattatccagattattgtatgaagttgtgtctataattattaccaatttttattctttatttctcaaatggaaacacctgaaaaagcattctggagtgctgaatttttaagatgtatattttgttaagcatattctctaaatgagatattgtgtggctttttagtaacaacgtcatttctaatatgtgtgactccttt

SEQ ID NO: 2317 - protein, 759 aa, Homosapiens
MAGLTLFVGRLPPSARSEQLEELFSQVGPVKQCFVVTEKGSKACRGFGYVTFSMLEDVQRALKEITTFEGCKINVTVAKKKLRNKTKEKGKNENSECPKKEPKAKKAKVADKKARLIIRNLSFKCSEDDLKTVFAQFGAVLEVNIPRKPDGKMRGFGFVQFKNLLEAGKALKGMNMKEIKGRTVAVDWAVAKDKYKDTQSVSAIGEEKSHESKHQESVKKKGREEEDMEEEENDDDDDDDDEEDGVFDDEDEEEENIESKVTKPVQIQKRAVKRPAPAKSSDHSEEDSDLEESDSIDDGEELAQSDTSTEEQEDKAVQVSNKKKRKLPSDVNEGKTVFIRNLSFDSEEEELGELLQQFGELKYVRIVLHPDTEHSKGCAFAQFMTQEAAQKCLLAASPENEAGGLKLDGRQLKVDLAVTRDEAAKLQTTKVKKPTGTRNLYLAREGLIRAGTKAAEGVSAADMAKRERFELLKHQKLKDQNIFVSRTRLCLHNLPKAVDDKQLRKLLLSATSGEKGVRIKECRVMRDLKGVHGNMKGQSLGYAFAEFQEHEHALKALRLINNNPEIFGPLKRPIVEFSLEDRRKLKMKELRIQRSLQKMRSKPATGEPQKGQPEPAKDQQQKAAQHHTEEQSKVPPEQKRKAGSTSWTGFQTKAEVEQVELPDGKKRRKVLALPSHRGPKIRLRDKGKVKPVHPKKPKPQINQWKQEKQQLSSEQVSRKKAKGNKTETRFNQLVEQYKQKLLGPSKGAPLAKRSKWFDS

SEQ ID NO: 2318 - DNA, 2666 bp, Homosapiens
acttccggaatctctcggcgtgtgagcttggttgtcctaccaaagccagcgtttcggctcgcgtgcgccggcctagtttgctcgcgtcctcacgcgctttgggtttcccggtctcatggccggcctgaccttatttgtgggccgcctcccgccctcggcccgcagtgagcagctggaggaactgttcagtcaggtggggccggtgaagcagtgcttcgtggtgactgaaaaagggagtaaggcatgtcgaggctttggctatgtcactttttcaatgctggaagatgttcagagggccctcaaggagattaccacctttgaaggttgcaagatcaacgtgactgttgccaagaaaaaactgaggaacaagacaaaggaaaaggggaaaaatgaaaactcagagtgcccaaagaaggagccgaaggctaaaaaagccaaagtggcagataagaaagccagattaattattcggaacctgagctttaagtgttcagaagatgacttgaagacagtatttgctcaatttggagctgtcctggaagtaaatatccctaggaaaccagatgggaagatgcgcggttttggttttgttcagttcaaaaacctcctagaagcaggtaaagctctcaaaggcatgaacatgaaagagataaaaggccggacagtggctgtggattgggccgtggcaaaggataaatataaagatacacagtctgtttctgctataggtgaggaaaagagccatgaatctaaacatcaggaatcagttaaaaagaagggcagagaggaagaggatatggaagaggaagaaaacgatgatgatgacgatgatgatgatgaagaagatggggtttttgatgatgaagatgaagaggaagagaatatagaatcaaaggtgaccaagcctgtgcaaattcagaagagagcagtcaagagaccagcccctgcaaaaagcagtgatcattctgaggaggacagtgacctagaggaaagcgatagtattgatgatggagaggaactggctcagagtgataccagcactgaggagcaagaggataaagctgtgcaagtctcaaacaaaaagaagaggaaattaccctctgatgtgaatgaagggaaaactgtttttatcagaaatctgtcctttgactcagaagaagaagaacttggggagcttctccaacagtttggagaactcaaatatgtccgcattgtcttgcatccagacacagagcattctaaaggttgtgcatttgcccagttcatgactcaagaagcagctcagaaatgccttctagctgcttctccagagaatgaggctggtgggcttaaactggatggccggcagctcaaggttgacttggcggtgacccgtgatgaggctgcaaagcttcagacgacgaaggtgaagaagccgactggcacccggaatctctatctggcccgagaaggcttgattcgtgctgggacgaaggctgcagagggtgtgagtgctgctgatatggccaaaagagaacggtttgagctgctgaagcatcagaaactcaaggaccagaatatctttgtctcccgaaccaggctctgcctgcacaatctcccaaaggctgtagatgacaaacagctcagaaagctgctgctgagtgctactagtggagagaaaggggtgcgcatcaaggagtgtagagtgatgcgagacctcaaaggagttcatgggaacatgaagggtcagtccctgggctacgcctttgcggagttccaagagcacgagcatgccctgaaagccctccgcctcatcaacaacaatccagaaatctttgggcctctgaagagaccaatagtggagttctctttagaagatcgaagaaaacttaaaatgaaggaattaaggatccagcgcagcttgcaaaaaatgagatccaagcctgcaactggtgagcctcagaaggggcaaccagagcctgcaaaagaccagcaacagaaggcagctcaacaccacacagaggaacaaagcaaggtgcccccagagcagaagagaaaggcgggctctacctcatggaccgggttccagaccaaggctgaagtggagcaggtggagctgcctgatggaaagaagagaagaaaggtcctggcgctcccctcacaccgaggccccaaaatcaggttgcgggacaaaggcaaagtgaagcccgtccatcccaaaaagccaaagccacagataaaccagtggaagcaggagaagcagcaattatcgtccgagcaggtatctaggaaaaaagctaagggaaataagacggaaacccgcttcaaccagctggtcgaacaatataagcagaaattattgggaccttctaaaggagcacctcttgcaaagaggagcaaatggtttgatagttgatgatggcagcaggctgggtaagaagctgggttgtgtactttctggtgacactcctgggctcctccccatcccccgtgtctctcactgagggaaagaaaatccccaagggcactgccactgtgctcggaggtgccctggactgtgtacatctgaactttggtccatcctttgatgtgtggttcgttagccacaaagagaaatatctgaaagtcaacatgatgcttcttgcatattatccagattattgtatgaagttgtgtctataattatt

SEQ ID NO: 2319 - protein, 759 aa, Homosapiens; identical to SEQ ID NO: 2317

SEQ ID NO: 2320 - DNA, 2840 bp, Homosapiens
gtgcggagtgcggagcgcggggcctggccgcccgcctgagagaagcggtgagataccacgaagcgttgcccagctgggcgccagggccgccacgaccgccccttttcggaggctcggcgaggagacctgcctgcgggagagaccccggggagcaggaccttcctcctcaaaagctgctgaacaactgagtccctgcccaccaaggccacccgaagccaggtggggccatggccaggcatggctgtctagggctgggactgttctgctgcgtcctgtttgctgctactgtgggcccccagcccaccccctccatcccaggtgcccctgccaccactttgacccccgtacctcaaagtgaggcctctatgctgtctctcaacctgggacttaacttcaaattccatcttcggggacctgctgctgtctgggggagcccagtcacagagacccagccactctctcttgggccaggccaggagccaggggaagaggtggccagtgggctgaggactgaccccctttgggaattgctggtgggctcctcagggaactctctcactgagtggggctccaccgaaggtggctcaaagccccgggcctcctccctgcttccggagtccacatcccggcgctctgggcccagcgatgggcccactgccccctatcagcccaggaggagcactgtgacctgggacactgctctgatggtgacagcacttccatccagtgctcccaggccccaccagagcgagctggagctgaagtttgacatggcactgagagcaggtgcagcccccacgcttgggcatcgaacgctgcccctgctgcccagcctgcgggccagcctggcagagattgctgggcgcctgggaccctttggattctttggcactactctgtccccactccggaacttctccggcctgagccccccaggtgaaactacatccacaagctctgcctctggagtttcgggttctctggggttccttggtaccactctgtccctgcccccatactccctggagaggaagctctccagcccaagtcctctggacccagctgcttccctaagttttgcctcgattgcaacaacatcattagaccccacagtccccatctctggcccagatgacctctctcctcccgccagcctcgggaacccttcggggcagccagagtgtgggccagggtcctgcagcgtgggagaattgcctgaacgcgaggggcagcctcccgaggcgccgaggcccctctttttcctgaccctggaggccgactgggcagaggccagggctcgctgggggctggcctgggaggcccacgtgtacgggggctatgaggtgctgcacgccctgggctacggcggccaatccggcctggaagggccctggccctggtgggccttccagctaggcctgcgcctgggcgaggtgggcgtcgcgctcccgttggcgctgctgggcctctacccggcgctctgcagtcctcgcgtgccgccgcgctgctgggccaagctcttccgcttgtccccgggccacgcggctccgctgctgccgggaggctgggtcactgggcccccagacaaggagcccctggggagcgccatcgctcgcggggacgcggagctgctgcagctgtgcgcgctggcagggccaggcccagacctcctactccagggcggaggttgccggggcttcgaaggcgcggcggccaacccggccccgtccccggcttcctctccctgcagcgattacaccgtggacttccgcccgccctccccaatcaacctgcgacgcagcatcgaggaggccctctgcagcgaggccctgcttgcgcctggcctcttccagggccctgccttcgaggacgctctgcctgggctcggactctaccgcaccgcctcgctggggaccgggggcagggccagtgagagatcaggggaggcctctggccccgctgcgcccccggagctcccctcccctggggcttggcccgcaggcagcagcgtctcatctggctcgttctgcggactctcgcgggacagctcgtccatgctgctgtgttccagccccgacaggcccccgcgctgccctctggtctgcgtcctcagtcccccgcggccctcaggaagcagccccagcctcccggcctcaggatcctaccaggccctgtccccaccctctcgcgactccccagagcctgcttctgagctgcaggccgaggaggccttgctgcaggagcagttcctggacgcctgccgacagatcgacgagctgagcgtgggcagcgacaccatagacctgtgaagaggtggccaccttgctaccctgcgatatgcccctttctggcgcctgccctgcccgagacctgcacactgtaatccttccccaatcctccctggctcagatacctctccagattccttccccatccaggggtccctgggtgggtgggtcagcagccaggctctatcgattgggaatcagtgccaccttctctggagccctgggtgctgatgccctcagctgcaaatctaggttggcaggggtcccattttccttggcattcaccagcaataaagctccaaggtgctccactcctgaccaccactccccactctggtgctgagtgagaggggctgtcctcagaggaccctgggacctgcctcaggcccccctacccacctctgccatgcctaggaatcccacccctgtgtgaatgggactccctttcctccatgtgacacccacaggggtccatgacccatctaggagactttatagcagttgggtgggaggggaatgctcttaatttatcaataaaatattttcagagga

SEQ ID NO: 2321 - protein, 693 aa, Homosapiens
MARHGCLGLGLFCCVLFAATVGPQPTPSIPGAPATTLTPVPQSEASMLSLNLGLNFKFHLRGPAAVWGSPVTETQPLSLGPGQEPGEEVASGLRTDPLWELLVGSSGNSLTEWGSTEGGSKPRASSLLPESTSRRSGPSDGPTAPYQPRRSTVTWDTALMVTALPSSAPRPHQSELELKFDMALRAGAAPTLGHRTLPLLPSLRASLAEIAGRLGPFGFFGTTLSPLRNFSGLSPPGETTSTSSASGVSGSLGFLGTTLSLPPYSLERKLSSPSPLDPAASLSFASIATTSLDPTVPISGPDDLSPPASLGNPSGQPECGPGSCSVGELPEREGQPPEAPRPLFFLTLEADWAEARARWGLAWEAHVYGGYEVLHALGYGGQSGLEGPWPWWAFQLGLRLGEVGVALPLALLGLYPALCSPRVPPRCWAKLFRLSPGHAAPLLPGGWVTGPPDKEPLGSAIARGDAELLQLCALAGPGPDLLLQGGGCRGFEGAAANPAPSPASSPCSDYTVDFRPPSPINLRRSIEEALCSEALLAPGLFQGPAFEDALPGLGLYRTASLGTGGRASERSGEASGPAAPPELPSPGAWPAGSSVSSGSFCGLSRDSSSMLLCSSPDRPPRCPLVCVLSPPRPSGSSPSLPASGSYQALSPPSRDSPEPASELQAEEALLQEQFLDACRQIDELSVGSDTIDL

SEQ ID NO: 2322 - DNA, 3061 bp, Homosapiens
tgccgcggagccccggcgcgggcggcttcgccggggagcgaggctcggagccaggaggcggcgccgctgggagggagcgcggagtgcggagtgcggagcgcggggcctggccgcccgcctggtgagagcgctgcgggccggggctgggccgggggcggctcaggggcagcggggcggcgaggctgcggtctctggactaggcgaggggccgccgggggctggaggtccggatcttcagtcggggcgctgggcacaacagagagaagcggtgagataccacgaagcgttgcccagctgggcgccagggccgccacgaccgccccttttcggaggctcggcgaggagacctgcctgcgggagagaccccggggagcaggaccttcctcctcaaaagctgctgaacaactgagtccctgcccaccaaggccacccgaagccaggtggggccatggccaggcatggctgtctagggctgggactgttctgctgcgtcctgtttgctgctactgtgggcccccagcccaccccctccatcccaggtgcccctgccaccactttgacccccgtacctcaaagtgaggcctctatgctgtctctcaacctgggacttaacttcaaattccatcttcggggacctgctgctgtctgggggagcccagtcacagagacccagccactctctcttgggccaggccaggagccaggggaagaggtggccagtgggctgaggactgaccccctttgggaattgctggtgggctcctcagggaactctctcactgagtggggctccaccgaaggtggctcaaagccccgggcctcctccctgcttccggagtccacatcccggcgctctgggcccagcgatgggcccactgccccctatcagcccaggaggagcactgtgacctgggacactgctctgatggtgacagcacttccatccagtgctcccaggccccaccagagcgagctggagctgaagtttgacatggcactgagagcaggtgcagcccccacgcttgggcatcgaacgctgcccctgctgcccagcctgcgggccagcctggcagagattgctgggcgcctgggaccctttggattctttggcactactctgtccccactccggaacttctccggcctgagccccccaggtgaaactacatccacaagctctgcctctggagtttcgggttctctggggttccttggtaccactctgtccctgcccccatactccctggagaggaagctctccagcccaagtcctctggacccagctgcttccctaagttttgcctcgattgcaacaacatcattagaccccacagtccccatctctggcccagatgacctctctcctcccgccagcctcgggaacccttcggggcagccagagtgtgggccagggtcctgcagcgtgggagaattgcctgaacgcgaggggcagcctcccgaggcgccgaggcccctctttttcctgaccctggaggccgactgggcagaggccagggctcgctgggggctggcctgggaggcccacgtgtacgggggctatgaggtgctgcacgccctgggctacggcggccaatccggcctggaagggccctggccctggtgggccttccagctaggcctgcgcctgggcgaggtgggcgtcgcgctcccgttggcgctgctgggcctctacccggcgctctgcagtcctcgcgtgccgccgcgctgctgggccaagctcttccgcttgtccccgggccacgcggctccgctgctgccgggaggctgggtcactgggcccccagacaaggagcccctggggagcgccatcgctcgcggggacgcggagctgctgcagctgtgcgcgctggcagggccaggcccagacctcctactccagggcggaggttgccggggcttcgaaggcgcggcggccaacccggccccgtccccggcttcctctccctgcagcgattacaccgtggacttccgcccgccctccccaatcaacctgcgacgcagcatcgaggaggccctctgcagcgaggccctgcttgcgcctggcctcttccagggccctgccttcgaggacgctctgcctgggctcggactctaccgcaccgcctcgctggggaccgggggcagggccagtgagagatcaggggaggcctctggccccgctgcgcccccggagctcccctcccctggggcttggcccgcaggcagcagcgtctcatctggctcgttctgcggactctcgcgggacagctcgtccatgctgctgtgttccagccccgacaggcccccgcgctgccctctggtctgcgtcctcagtcccccgcggccctcaggaagcagccccagcctcccggcctcaggatcctaccaggccctgtccccaccctctcgcgactccccagagcctgcttctgagctgcaggccgaggaggccttgctgcaggagcagttcctggacgcctgccgacagatcgacgagctgagcgtgggcagcgacaccatagacctgtgaagaggtggccaccttgctaccctgcgatatgcccctttctggcgcctgccctgcccgagacctgcacactgtaatccttccccaatcctccctggctcagatacctctccagattccttccccatccaggggtccctgggtgggtgggtcagcagccaggctctatcgattgggaatcagtgccaccttctctggagccctgggtgctgatgccctcagctgcaaatctaggttggcaggggtcccattttccttggcattcaccagcaataaagctccaaggtgctccactcctgaccaccactccccactctggtgctgagtgagaggggctgtcctcagaggaccctgggacctgcctcaggcccccctacccacctctgccatgcctaggaatcccacccctgtgtgaatgggactccctttcctccatgtgacacccacaggggtccatgacccatctaggagactttatagcagttgggtgggaggggaatgctcttaatttatcaataaaatattttcagagga

SEQ ID NO: 2323 - protein, 693 aa, Homosapiens; identical to SEQ ID NO: 2321

SEQ ID NO: 2324 - DNA, 2394 bp, Homosapiens
cggctgccgcggagccccggcgcgggcggcttcgccggggagcgaggctcggagccaggaggcggcgccgctgggagggagcgcggagtgcggagtgcggagcgcggggcctggccgcccgcctggaccttcctcctcaaaagctgctgaacaactgagtccctgcccaccaaggccacccgaagccaggtggggccatggccaggcatggctgtctagggctgggactgttctgctgcgtcctgtttgctgctactgtgggcccccagcccaccccctccatcccaggtgcccctgccaccactttgacccccgtacctcaaagtgaggcctctatgctgtctctcaacctgggacttaacttcaaattccatcttcggggacctgctgctgtctgggggagcccagtcacagagacccagccactctctcttgggccaggccaggagccaggggaagaggtggccagtgggctgaggactgaccccctttgggaattgctggtgggctcctcagggaactctctcactgagtggggctccaccgaaggtggctcaaagccccgggcctcctccctgcttccggagtccacatcccggcgctctgggcccagcgatgggcccactgccccctatcagcccaggaggagcactgtgacctgggacactgctctgatggtgacagcacttccatccagtgctcccaggccccaccagagcgagctggagctgaagtttgacatggcactgagagcaggtgcagcccccacgcttgggcatcgaacgctgcccctgctgcccagcctgcgggccagcctggcagagattgctgggcgcctgggaccctttggattctttggcactactctgtccccactccggaacttctccggcctgagccccccaggtgaaactacatccacaagctctgcctctggagtttcgggttctctggggttccttggtaccactctgtccctgcccccatactccctggagaggaagctctccagcccaagtcctctggacccagctgcttccctaagttttgcctcgattgcaacaacatcattagaccccacagtccccatctctggcccagatgacctctctcctcccgccagcctcgggaacccttcggggcagccagagtgtgggccagggtcctgcagcgtgggagaattgcctgaacgcgaggggcagcctcccgaggcgccgaggcccctctttttcctgaccctggaggccgactgggcagaggccagggctcgctgggggctggcctgggaggcccacgtgtacgggcgattacaccgtggacttccgcccgccctccccaatcaacctgcgacgcagcatcgaggaggccctctgcagcgaggccctgcttgcgcctggcctcttccagggccctgccttcgaggacgctctgcctgggctcggactctaccgcaccgcctcgctggggaccgggggcagggccagtgagagatcaggggaggcctctggccccgctgcgcccccggagctcccctcccctggggcttggcccgcaggcagcagcgtctcatctggctcgttctgcggactctcgcgggacagctcgtccatgctgctgtgttccagccccgacaggcccccgcgctgccctctggtctgcgtcctcagtcccccgcggccctcaggaagcagccccagcctcccggcctcaggatcctaccaggccctgtccccaccctctcgcgactccccagagcctgcttctgagctgcaggccgaggaggccttgctgcaggagcagttcctggacgcctgccgacagatcgacgagctgagcgtgggcagcgacaccatagacctgtgaagaggtggccaccttgctaccctgcgatatgcccctttctggcgcctgccctgcccgagacctgcacactgtaatccttccccaatcctccctggctcagatacctctccagattccttccccatccaggggtccctgggtgggtgggtcagcagccaggctctatcgattgggaatcagtgccaccttctctggagccctgggtgctgatgccctcagctgcaaatctaggttggcaggggtcccattttccttggcattcaccagcaataaagctccaaggtgctccactcctgaccaccactccccactctggtgctgagtgagaggggctgtcctcagaggaccctgggacctgcctcaggcccccctacccacctctgccatgcctaggaatcccacccctgtgtgaatgggactccctttcctccatgtgacacccacaggggtccatgacccatctaggagactttatagcagttgggtgggaggggaatgctcttaatttatcaataaaatattttcagagga

SEQ ID NO: 2325 - protein, 429 aa, Homosapiens
MARHGCLGLGLFCCVLFAATVGPQPTPSIPGAPATTLTPVPQSEASMLSLNLGLNFKFHLRGPAAVWGSPVTETQPLSLGPGQEPGEEVASGLRTDPLWELLVGSSGNSLTEWGSTEGGSKPRASSLLPESTSRRSGPSDGPTAPYQPRRSTVTWDTALMVTALPSSAPRPHQSELELKFDMALRAGAAPTLGHRTLPLLPSLRASLAEIAGRLGPFGFFGTTLSPLRNFSGLSPPGETTSTSSASGVSGSLGFLGTTLSLPPYSLERKLSSPSPLDPAASLSFASIATTSLDPTVPISGPDDLSPPASLGNPSGQPECGPGSCSVGELPEREGQPPEAPRPLFFLTLEADWAEARARWGLAWEAHVYGRLHRGLPPALPNQPATQHRGGPLQRGPACAWPLPGPCLRGRSAWARTLPHRLAGDRGQGQ

SEQ ID NO: 2326 - DNA, 2810 bp, Homosapiens
cggctgccgcggagccccggcgcgggcggcttcgccggggagcgaggctcggagccaggaggcggcgccgctgggagggagcgcggagtgcggagtgcggagcgcggggcctggccgcccgcctggaccttcctcctcaaaagctgctgaacaactgagtccctgcccaccaaggccacccgaagccaggtggggccatggccaggcatggctgtctagggctgggactgttctgctgcgtcctgtttgctgctactgtgggcccccagcccaccccctccatcccaggtgcccctgccaccactttgacccccgtacctcaaagtgaggcctctatgctgtctctcaacctgggacttaacttcaaattccatcttcggggacctgctgctgtctgggggagcccagtcacagagacccagccactctctcttgggccaggccaggagccaggggaagaggtggccagtgggctgaggactgaccccctttgggaattgctggtgggctcctcagggaactctctcactgagtggggctccaccgaaggtggctcaaagccccgggcctcctccctgcttccggagtccacatcccggcgctctgggcccagcgatgggcccactgccccctatcagcccaggaggagcactgtgacctgggacactgctctgatggtgacagcacttccatccagtgctcccaggccccaccagagcgagctggagctgaagtttgacatggcactgagagcaggtgcagcccccacgcttgggcatcgaacgctgcccctgctgcccagcctgcgggccagcctggcagagattgctgggcgcctgggaccctttggattctttggcactactctgtccccactccggaacttctccggcctgagccccccaggtgaaactacatccacaagctctgcctctggagtttcgggttctctggggttccttggtaccactctgtccctgcccccatactccctggagaggaagctctccagcccaagtcctctggacccagctgcttccctaagttttgcctcgattgcaacaacatcattagaccccacagtccccatctctggcccagatgacctctctcctcccgccagcctcgggaacccttcggggcagccagagtgtgggccagggtcctgcagcgtgggagaattgcctgaacgcgaggggcagcctcccgaggcgccgaggcccctctttttcctgaccctggaggccgactgggcagaggccagggctcgctgggggctggcctgggaggcccacgtgtacgggggctatgaggtgctgcacgccctgggctacggcggccaatccggcctggaagggccctggccctggtgggccttccagctaggcctgcgcctgggcgaggtgggcgtcgcgctcccgttggcgctgctgggcctctacccggcgctctgcagtcctcgcgtgccgccgcgctgctgggccaagctcttccgcttgtccccgggccacgcggctccgctgctgccgggaggctgggtcactgggcccccagacaaggagcccctggggagcgccatcgctcgcggggacgcggagctgctgcagctgtgcgcgctggcagggccaggcccagacctcctactccagggcggaggttgccggggcttcgaaggcgcggcggccaacccggccccgtccccggcttcctctccctgcagcgattacaccgtggacttccgcccgccctccccaatcaacctgcgacgcagcatcgaggaggccctctgcagcgaggccctgcttgcgcctggcctcttccagggccctgccttcgaggacgctctgcctgggctcggactctaccgcaccgcctcgctggggaccgggggcagggccagtgagagatcaggggaggcctctggccccgctgcgcccccggagctcccctcccctggggcttggcccgcaggcagcagcgtctcatctggctcgttctgcggactctcgcgggacagctcgtccatgctgctgtgttccagccccgacaggcccccgcgctgccctctggtctgcgtcctcagtcccccgcggccctcaggaagcagccccagcctcccggcctcaggatcctaccaggccctgtccccaccctctcgcgactccccagagcctgcttctgagctgcaggccgaggaggccttgctgcaggagcagttcctggacgcctgccgacagatcgacgagctgagcgtgggcagcgacaccatagacctgtgaagaggtggccaccttgctaccctgcgatatgcccctttctggcgcctgccctgcccgagacctgcacactgtaatccttccccaatcctccctggctcagatacctctccagattccttccccatccaggggtccctgggtgggtgggtcagcagccaggctctatcgattgggaatcagtgccaccttctctggagccctgggtgctgatgccctcagctgcaaatctaggttggcaggggtcccattttccttggcattcaccagcaataaagctccaaggtgctccactcctgaccaccactccccactctggtgctgagtgagaggggctgtcctcagaggaccctgggacctgcctcaggcccccctacccacctctgccatgcctaggaatcccacccctgtgtgaatgggactccctttcctccatgtgacacccacaggggtccatgacccatctaggagactttatagcagttgggtgggaggggaatgctcttaatttatcaataaaatattttcagagga

SEQ ID NO: 2327 - protein, 693 aa, Homosapiens; identical to SEQ ID NO: 2321

SEQ ID NO: 2328 - DNA, 606 bp, Homosapiens
gccgggacatcagtcttctcctgcctttggactctggacttacaccatcagctctactggttctcaggcctttggactcgaactggaactacaccattggctctcctgggtctccagcttggcaactgcaggtcttgggacttgtcagcctccacaatgatgtgtgtttcggcagatgagaccacaggcgctggccatgctgtacttccacctgtgccctggctgcaccatgtggcatgatgaggctgcggagggcgttttccggcagctgggtgtgaggccccgatgctggaattctacagccatgatgacccctcaacaatgctgcctggctgcaggagttgctgagtggcttgcagtaggtgaagcctgggagacctcctgacatggggcccacctgcaccagcacacccccaccccacccccagtacctcaacaccctcaaaccttcctggggaggcagggcctggtgccataccccccagcccaactctgatggggctccagccacccaatggacagggcatacagacaggatagtggaggcgttgagacctgcttgatttattccaagtatttaatacacaatgacgcaactgtgatccc

SEQ ID NO: 2329 - protein, 69 aa, Homosapiens
MRPQALAMLYFHLCPGCTMWHDEAAEGVFRQLGVRPRCWNSTAMMTPQQCCLAAGVAEWLAVGEAWETS

SEQ ID NO: 2330 - DNA, 1133 bp, Homosapiens
gccgggacatcagtcttctcctgcctttggactctggacttacaccatcagctctactggttctcaggcctttggactcgaactggaactacaccattggctctcctgggtctccagcttggcaactgcaggtcttgggacttgtcagcctccacaatgatgtgtgtttcggcagatgagaccacaggcgctggccatgctgtacttccacctgtgccctggctgcaccatgtggcatgatgaggctgcggagggcgttttccggcagctgggtgtgaggccccgatgctggaattctacagccatgatgacccctcaacaatgctgcctggctgcaggagttgctgagtggcttgcagtaggtgaagcctgggagacctcctgacatggggcccacctgcaccagcacacccccaccccacccccagtacctcaacaccctcaaaccttcctggggaggcagggcctggtgccataccccccagcccaactctgatggggctccagccacccaatggacagggcatacagacaggatagtggaggcgttgagacctgcttgatttattccaagtatttaatacacaatgacgcaactgtgatcccaagtgtgcaaagttaaagccttcgactgcagctgaggagaagggaggaatggttcacctggggacggtggtgagtcaggaatgacaggcaggcggccatgaccagggcagtctcctacccatggccagggacaggggagcggcctgaggagcaggacccaagggtagcccagggccggggaagggggcagagacctccccttggcctaggtcaggagctcagaagtgccacatggctgaggggcagcggcccgggaagggccagaggcagggccaggagagcaccatttcctgggaggctaggggcagggaggtgccctacaggagaagccaggaggggccgcctgcccctggggtgggggccaggctggagcaggctgcagcaagaaagacctgaggcaggcgcagggcctgagagcctggctggctgggctcggaggggggctcccagggcagcctggccccgggagcagtcctgactctgcaggggatgccgagtgaggggcagcagtcccctcaggacctccc

SEQ ID NO: 2331 - protein, 126 aa, Homosapiens [sequence omitted]

SEQ ID NO: 2332 - DNA, 956 bp, Homosapiens
ggacttacaccatcagctctactggttctcaggcctttggactcgaactggaactacaccattggctctcctgggtctccagcttggcaactgcaggtcttgggacttgtcagcctccacaatgatgtagtcctggattccagctttgtgtcctccttggcaagctcccctgtcctgaaactgcagaggggccacatgacctccacagtctgaactgctattccctgtccctctgtggtcctttgccaggagaagcccccaccacgaggtcaggggagaccctgagcagaggagtctccccccaccaggccaagcaaggaaagagctcagctggaaggggctggattcattctcgcctctctccagccactcctgcagctcctggcttcctcgcaagcctctccatcagcgccctcacagggcttggacacttcacagctgctgggagaaagaatggaatggacccaaggacatccaggcaggcccaggccctacctgctggcgactacaggtgtgtttcggcagatgagaccacaggcgctggccatgctgtacttccacctgtgccctggctgcaccatgtggcatgatgaggctgcggagggcgttttccggcagctgggtgtgaggccccgatgctggaattctacagccatgatgacccctcaacaatgctgcctggctgcaggagttgctgagtggcttgcagtaggtgaagcctgggagacctcctgacatggggcccacctgcaccagcacacccccaccccacccccagtacctcaacaccctcaaaccttcctggggaggcagggcctggtgccataccccccagcccaactctgatggggctccagccacccaatggacagggcatacagacaggatagtggaggcgttgagacctgcttgatttattccaagtatttaatacacaatgacgcaactgtgatccc

SEQ ID NO: 2333 - protein, 93 aa, Homosapiens
MEWTQGHPGRPRPYLLATTGVFRQMRPQALAMLYFHLCPGCTMWHDEAAEGVFRQLGVRPRCWNSTAMMTPQQCCLAAGVAEWLAVGEAWETS

SEQ ID NO: 2334 - DNA, 1483 bp, Homosapiens
ggacttacaccatcagctctactggttctcaggcctttggactcgaactggaactacaccattggctctcctgggtctccagcttggcaactgcaggtcttgggacttgtcagcctccacaatgatgtagtcctggattccagctttgtgtcctccttggcaagctcccctgtcctgaaactgcagaggggccacatgacctccacagtctgaactgctattccctgtccctctgtggtcctttgccaggagaagcccccaccacgaggtcaggggagaccctgagcagaggagtctccccccaccaggccaagcaaggaaagagctcagctggaaggggctggattcattctcgcctctctccagccactcctgcagctcctggcttcctcgcaagcctctccatcagcgccctcacagggcttggacacttcacagctgctgggagaaagaatggaatggacccaaggacatccaggcaggcccaggccctacctgctggcgactacaggtgtgtttcggcagatgagaccacaggcgctggccatgctgtacttccacctgtgccctggctgcaccatgtggcatgatgaggctgcggagggcgttttccggcagctgggtgtgaggccccgatgctggaattctacagccatgatgacccctcaacaatgctgcctggctgcaggagttgctgagtggcttgcagtaggtgaagcctgggagacctcctgacatggggcccacctgcaccagcacacccccaccccacccccagtacctcaacaccctcaaaccttcctggggaggcagggcctggtgccataccccccagcccaactctgatggggctccagccacccaatggacagggcatacagacaggatagtggaggcgttgagacctgcttgatttattccaagtatttaatacacaatgacgcaactgtgatcccaagtgtgcaaagttaaagccttcgactgcagctgaggagaagggaggaatggttcacctggggacggtggtgagtcaggaatgacaggcaggcggccatgaccagggcagtctcctacccatggccagggacaggggagcggcctgaggagcaggacccaagggtagcccagggccggggaagggggcagagacctccccttggcctaggtcaggagctcagaagtgccacatggctgaggggcagcggcccgggaagggccagaggcagggccaggagagcaccatttcctgggaggctaggggcagggaggtgccctacaggagaagccaggaggggccgcctgcccctggggtgggggccaggctggagcaggctgcagcaagaaagacctgaggcaggcgcagggcctgagagcctggctggctgggctcggaggggggctcccagggcagcctggccccgggagcagtcctgactctgcaggggatgccgagtgaggggcagcagtcccctcaggacctccc

SEQ ID NO: 2335 - protein, 93 aa, Homosapiens; identical to SEQ ID NO: 2333

SEQ ID NO: 2336 - DNA, 2278 bp, Homosapiens
agtagcagcagcagcagcggcggcagcggcgggcggccgcgcgggtgtttatgtcgggtcgcggggtctcgcggcagcatggcggactacctgatcagcggcggcaccggctacgtgcccgaggatgggctcaccgcgcagcagctcttcgccagcgccgacggcctcacctacaacgacttcctgattctcccaggattcatagacttcatagctgatgaggtggacctgacctcagccctgacccggaagatcacgctgaagacgccactgatctcctcccccatggacactgtgacagaggctgacatggccattgccatggctaagtttgaacagggcttcatcacggaccctgtggtgctgagcccctcgcacactgtgggcgatgtgctggaggccaagatgcggcatggcttctctggcatccccatcactgagacgggcaccatgggcagcaagctggtgggcatcgtcacctcccgagacatcgactttcttgctgagaaggaccacaccaccctcctcagtgaggtgatgacgccaaggattgaactggtggtggctccagcaggtgtgacgttgaaagaggcaaatgagatcctgcagcgtagcaagaaagggaagctgcctatcgtcaatgattgcgatgagctggtggccatcatcgcccgcaccgacctgaagaagaaccgagactaccctctggcctccaaggattcccagaagcagctgctctgtggggcagctgtgggcacccgtgaggatgacaaataccgtctggacctgctcacccaggcgggcgtcgacgtcatagtcttggactcgtcccaagggaattcggtgtatcagatcgccatggtgcattacatcaaacagaagtacccccacctccaggtgattggggggaacgtggtgacagcagcccaggccaagaacctgattgatgctggtgtggacgggctgcgcgtgggcatgggctgcggctccatctgcatcacccaggaagtgatggcctgtggtcggccccagggcactgctgtgtacaaggtggctgagtatgcccggcgctttggtgtgcccatcatagccgatggcggcatccagaccgtgggacacgtggtcaaggccctggcccttggagcctccacagtgatgatgggctccctgctggccgccactacggaggcccctggcgagtacttcttctcagacggggtgcggctcaagaagtaccggggcatgggctcactggatgccatggagaagagcagcagcagccagaaacgatacttcagcgagggggataaagtgaagatcgcgcagggtgtctcgggctccatccaggacaaaggatccattcagaagttcgtgccctacctcatagcaggcatccaacacggctgccaggatatcggggcccgcagcctgtctgtccttcggtccatgatgtactcaggagagctcaagtttgagaagcggaccatgtcggcccagattgagggtggtgtccatggcctgcactcttacgaaaagcggctgtactgaggacagcggtggaggccgaggtggtggaggggatgcaccccagtgtccacttttgggcacagcctccctccataactgagtggtccacagatttgcactacgggttctccagctcctttccaggcagagaggaggggaggtcctgaggggactgctgcccctcactcggcatcccctgcagagtcaggactgctcccggggccaggctgccctgggagcccccctccgagcccagccagccaggctctcaggccctgcgcctgcctcaggtctttcttgctgcagcctgctccagcctggcccccaccccaggggcaggcggcccctcctggcttctcctgtagggcacctccctgcccctagcctcccaggaaatggtgctctcctggccctgcctctggcccttcccgggccgctgcccctcagccatgtggcacttctgagctcctgacctaggccaaggggaggtctctgcccccttccccggccctgggctacccttgggtcctgctcctcaggccgctcccctgtccctggccatgggtaggagactgccctggtcatggccgcctgcctgtcattcctgactcaccaccgtccccaggtgaaccattcctcccttctcctcagctgcagtcgaaggctttaactttgcacacttgggatcacagttgcgtcattgtgtattaaatacttggaataaatcaagcaggtctcaacgcctccacta

SEQ ID NO: 2337 - protein, 489 aa, Homosapiens
MADYLISGGTGYVPEDGLTAQQLFASADGLTYNDFLILPGFIDFIADEVDLTSALTRKITLKTPLISSPMDTVTEADMAIAMAKFEQGFITDPVVLSPSHTVGDVLEAKMRHGFSGIPITETGTMGSKLVGIVTSRDIDFLAEKDHTTLLSEVMTPRIELVVAPAGVTLKEANEILQRSKKGKLPIVNDCDELVAIIARTDLKKNRDYPLASKDSQKQLLCGAAVGTREDDKYRLDLLTQAGVDVIVLDSSQGNSVYQIAMVHYIKQKYPHLQVIGGNVVTAAQAKNLIDAGVDGLRVGMGCGSICITQEVMACGRPQGTAVYKVAEYARRFGVPIIADGGIQTVGHVVKALALGASTVMMGSLLAATTEAPGEYFFSDGVRLKKYRGMGSLDAMEKSSSSQKRYFSEGDKVKIAQGVSGSIQDKGSIQKFVPYLIAGIQHGCQDIGARSLSVLRSMMYSGELKFEKRTMSAQIEGGVHGLHSYEKRLY

SEQ ID NO: 2338 - DNA, 2288 bp, Homosapiens
agccctagattggacctcgctacacacccgacgacaccccgttcagaactatcttcagtggtcttactggcaggtgttggtgtccagatggatcgccttcgcagggctagcgacttcctgattctcccaggattcatagacttcatagctgatgaggtggacctgacctcagccctgacccggaagatcacgctgaagacgccactgatctcctcccccatggacactgtgacagaggctgacatggccattgccatggctctgatgggaggtattggtttcattcaccacaactgcaccccagagttccaggccaacgaggtgcggaaggtcaaggcaatttgaacagggcttcatcacggaccctgtggtgctgagcccctcgcacactgtgggcgatgtgctggaggccaagatgcggcatggcttctctggcatccccatcactgagacgggcaccatgggcagcaagctggtgggcatcgtcacctcccgagacatcgactttcttgctgagaaggaccacaccaccctcctcagtgaggtgatgacgccaaggattgaactggtggtggctccagcaggtgtgacgttgaaagaggcaaatgagatcctgcagcgtagcaagaaagggaagctgcctatcgtcaatgattgcgatgagctggtggccatcatcgcccgcaccgacctgaagaagaaccgagactaccctctggcctccaaggattcccagaagcagctgctctgtggggcagctgtgggcacccgtgaggatgacaaataccgtctggacctgctcacccaggcgggcgtcgacgtcatagtcttggactcgtcccaagggaattcggtgtatcagatcgccatggtgcattacatcaaacagaagtacccccacctccaggtgattggggggaacgtggtgacagcagcccaggccaagaacctgattgatgctggtgtggacgggctgcgcgtgggcatgggctgcggctccatctgcatcacccaggaagtgatggcctgtggtcggccccagggcactgctgtgtacaaggtggctgagtatgcccggcgctttggtgtgcccatcatagccgatggcggcatccagaccgtgggacacgtggtcaaggccctggcccttggagcctccacagtgatgatgggctccctgctggccgccactacggaggcccctggcgagtacttcttctcagacggggtgcggctcaagaagtaccggggcatgggctcactggatgccatggagaagagcagcagcagccagaaacgatacttcagcgagggggataaagtgaagatcgcgcagggtgtctcgggctccatccaggacaaaggatccattcagaagttcgtgccctacctcatagcaggcatccaacacggctgccaggatatcggggcccgcagcctgtctgtccttcggtccatgatgtactcaggagagctcaagtttgagaagcggaccatgtcggcccagattgagggtggtgtccatggcctgcactcttacgaaaagcggctgtactgaggacagcggtggaggccgaggtggtggaggggatgcaccccagtgtccacttttgggcacagcctccctccataactgagtggtccacagatttgcactacgggttctccagctcctttccaggcagagaggaggggaggtcctgaggggactgctgcccctcactcggcatcccctgcagagtcaggactgctcccggggccaggctgccctgggagcccccctccgagcccagccagccaggctctcaggccctgcgcctgcctcaggtctttcttgctgcagcctgctccagcctggcccccaccccaggggcaggcggcccctcctggcttctcctgtagggcacctccctgcccctagcctcccaggaaatggtgctctcctggccctgcctctggcccttcccgggccgctgcccctcagccatgtggcacttctgagctcctgacctaggccaaggggaggtctctgcccccttccccggccctgggctacccttgggtcctgctcctcaggccgctcccctgtccctggccatgggtaggagactgccctggtcatggccgcctgcctgtcattcctgactcaccaccgtccccaggtgaaccattcctcccttctcctcagctgcagtcgaaggctttaactttgcacacttgggatcacagttgcgtcattgtgtattaaatacttggaataaatcaagcaggtctcaacgcctccacta

SEQ ID NO: 2339 - protein, 380 aa, Homosapiens
MRHGFSGIPITETGTMGSKLVGIVTSRDIDFLAEKDHTTLLSEVMTPRIELVVAPAGVTLKEANEILQRSKKGKLPIVNDCDELVAIIARTDLKKNRDYPLASKDSQKQLLCGAAVGTREDDKYRLDLLTQAGVDVIVLDSSQGNSVYQIAMVHYIKQKYPHLQVIGGNVVTAAQAKNLIDAGVDGLRVGMGCGSICITQEVMACGRPQGTAVYKVAEYARRFGVPIIADGGIQTVGHVVKALALGASTVMMGSLLAATTEAPGEYFFSDGVRLKKYRGMGSLDAMEKSSSSQKRYFSEGDKVKIAQGVSGSIQDKGSIQKFVPYLIAGIQHGCQDIGARSLSVLRSMMYSGELKFEKRTMSAQIEGGVHGLHSYEKRLY

SEQ ID NO: 2340 - DNA, 2404 bp, Homosapiens
agccctagattggacctcgctacacacccgacgacaccccgttcagaactatcttcagtggtcttactggcaggtgttggtgtccagatggatcgccttcgcagggctagcatggcggactacctgatcagcggcggcaccggctacgtgcccgaggatgggctcaccgcgcagcagctcttcgccagcgccgacggcctcacctacaacgacttcctgattctcccaggattcatagacttcatagctgatgaggtggacctgacctcagccctgacccggaagatcacgctgaagacgccactgatctcctcccccatggacactgtgacagaggctgacatggccattgccatggctctgatgggaggtattggtttcattcaccacaactgcaccccagagttccaggccaacgaggtgcggaaggtcaaggcaatttgaacagggcttcatcacggaccctgtggtgctgagcccctcgcacactgtgggcgatgtgctggaggccaagatgcggcatggcttctctggcatccccatcactgagacgggcaccatgggcagcaagctggtgggcatcgtcacctcccgagacatcgactttcttgctgagaaggaccacaccaccctcctcagtgaggtgatgacgccaaggattgaactggtggtggctccagcaggtgtgacgttgaaagaggcaaatgagatcctgcagcgtagcaagaaagggaagctgcctatcgtcaatgattgcgatgagctggtggccatcatcgcccgcaccgacctgaagaagaaccgagactaccctctggcctccaaggattcccagaagcagctgctctgtggggcagctgtgggcacccgtgaggatgacaaataccgtctggacctgctcacccaggcgggcgtcgacgtcatagtcttggactcgtcccaagggaattcggtgtatcagatcgccatggtgcattacatcaaacagaagtacccccacctccaggtgattggggggaacgtggtgacagcagcccaggccaagaacctgattgatgctggtgtggacgggctgcgcgtgggcatgggctgcggctccatctgcatcacccaggaagtgatggcctgtggtcggccccagggcactgctgtgtacaaggtggctgagtatgcccggcgctttggtgtgcccatcatagccgatggcggcatccagaccgtgggacacgtggtcaaggccctggcccttggagcctccacagtgatgatgggctccctgctggccgccactacggaggcccctggcgagtacttcttctcagacggggtgcggctcaagaagtaccggggcatgggctcactggatgccatggagaagagcagcagcagccagaaacgatacttcagcgagggggataaagtgaagatcgcgcagggtgtctcgggctccatccaggacaaaggatccattcagaagttcgtgccctacctcatagcaggcatccaacacggctgccaggatatcggggcccgcagcctgtctgtccttcggtccatgatgtactcaggagagctcaagtttgagaagcggaccatgtcggcccagattgagggtggtgtccatggcctgcactcctatacctttctgccgtttacgaaaagcggctgtactgaggacagcggtggaggccgaggtggtggaggggatgcaccccagtgtccacttttgggcacagcctccctccataactgagtggtccacagatttgcactacgggttctccagctcctttccaggcagagaggaggggaggtcctgaggggactgctgcccctcactcggcatcccctgcagagtcaggactgctcccggggccaggctgccctgggagcccccctccgagcccagccagccaggctctcaggccctgcgcctgcctcaggtctttcttgctgcagcctgctccagcctggcccccaccccaggggcaggcggcccctcctggcttctcctgtagggcacctccctgcccctagcctcccaggaaatggtgctctcctggccctgcctctggcccttcccgggccgctgcccctcagccatgtggcacttctgagctcctgacctaggccaaggggaggtctctgcccccttccccggccctgggctacccttgggtcctgctcctcaggccgctcccctgtccctggccatgggtaggagactgccctggtcatggccgcctgcctgtcattcctgactcaccaccgtccccaggtgaaccattcctcccttctcctcagctgcagtcgaaggctttaactttgcacacttgggatcacagttgcgtcattgtgtattaaatacttggaataaatcaagcaggtctcaacgcctccacta

SEQ ID NO: 2341 - protein, 412 aa, Homosapiens
MRHGFSGIPITETGTMGSKLVGIVTSRDIDFLAEKDHTTLLSEVMTPRIELVVAPAGVTLKEANEILQRSKKGKLPIVNDCDELVAIIARTDLKKNRDYPLASKDSQKQLLCGAAVGTREDDKYRLDLLTQAGVDVIVLDSSQGNSVYQIAMVHYIKQKYPHLQVIGGNVVTAAQAKNLIDAGVDGLRVGMGCGSICITQEVMACGRPQGTAVYKVAEYARRFGVPIIADGGIQTVGHVVKALALGASTVMMGSLLAATTEAPGEYFFSDGVRLKKYRGMGSLDAMEKSSSSQKRYFSEGDKVKIAQGVSGSIQDKGSIQKFVPYLIAGIQHGCQDIGARSLSVLRSMMYSGELKFEKRTMSAQIEGGVHGLHSYTFLPFTKSGCTEDSGGGRGGGGDAPQCPLLGTASLHN

SEQ ID NO: 2342 - DNA, 2583 bp, Homosapiens
gactcgaccgggctgcgctcactgcccagccggggccccgggagcctccaggctcccgcccgccctgagctgcggcctccgcatggaggggccactcactccaccaccgctgcagggaggcggagccgccgctgttccggagcccggagcccggcaacacccgggacacgagacggcggcgcagcggtacagcgcccgactgctgcaggccggctacgagcccgagagctgtttcctcctagaactatcttcagtggtcttactggcaggtgttggtgtccagatggatcgccttcgcagggctagcatggcggactacctgatcagcggcggcaccggctacgtgcccgaggatgggctcaccgcgcagcagctcttcgccagcgccgacggcctcacctacaacgacttcctgattctcccaggattcatagacttcatagctgatgaggtggacctgacctcagccctgacccggaagatcacgctgaagacgccactgatctcctcccccatggacactgtgacagaggctgacatggccattgccatggctctgatgggaggtattggtttcattcaccacaactgcaccccagagttccaggccaacgaggtgcggaaggtcaaggcaatttgaacagggcttcatcacggaccctgtggtgctgagcccctcgcacactgtgggcgatgtgctggaggccaagatgcggcatggcttctctggcatccccatcactgagacgggcaccatgggcagcaagctggtgggcatcgtcacctcccgagacatcgactttcttgctgagaaggaccacaccaccctcctcagtgaggtgatgacgccaaggattgaactggtggtggctccagcaggtgtgacgttgaaagaggcaaatgagatcctgcagcgtagcaagaaagggaagctgcctatcgtcaatgattgcgatgagctggtggccatcatcgcccgcaccgacctgaagaagaaccgagactaccctctggcctccaaggattcccagaagcagctgctctgtggggcagctgtgggcacccgtgaggatgacaaataccgtctggacctgctcacccaggcgggcgtcgacgtcatagtcttggactcgtcccaagggaattcggtgtatcagatcgccatggtgcattacatcaaacagaagtacccccacctccaggtgattggggggaacgtggtgacagcagcccaggccaagaacctgattgatgctggtgtggacgggctgcgcgtgggcatgggctgcggctccatctgcatcacccaggaagtgatggcctgtggtcggccccagggcactgctgtgtacaaggtggctgagtatgcccggcgctttggtgtgcccatcatagccgatggcggcatccagaccgtgggacacgtggtcaaggccctggcccttggagcctccacagtgatgatgggctccctgctggccgccactacggaggcccctggcgagtacttcttctcagacggggtgcggctcaagaagtaccggggcatgggctcactggatgccatggagaagagcagcagcagccagaaacgatacttcagcgagggggataaagtgaagatcgcgcagggtgtctcgggctccatccaggacaaaggatccattcagaagttcgtgccctacctcatagcaggcatccaacacggctgccaggatatcggggcccgcagcctgtctgtccttcggtccatgatgtactcaggagagctcaagtttgagaagcggaccatgtcggcccagattgagggtggtgtccatggcctgcactcttacgaaaagcggctgtactgaggacagcggtggaggccgaggtggtggaggggatgcaccccagtgtccacttttgggcacagcctccctccataactgagtggtccacagatttgcactacgggttctccagctcctttccaggcagagaggaggggaggtcctgaggggactgctgcccctcactcggcatcccctgcagagtcaggactgctcccggggccaggctgccctgggagcccccctccgagcccagccagccaggctctcaggccctgcgcctgcctcaggtctttcttgctgcagcctgctccagcctggcccccaccccaggggcaggcggcccctcctggcttctcctgtagggcacctccctgcccctagcctcccaggaaatggtgctctcctggccctgcctctggcccttcccgggccgctgcccctcagccatgtggcacttctgagctcctgacctaggccaaggggaggtctctgcccccttccccggccctgggctacccttgggtcctgctcctcaggccgctcccctgtccctggccatgggtaggagactgccctggtcatggccgcctgcctgtcattcctgactcaccaccgtccccaggtgaaccattcctcccttctcctcagctgcagtcgaaggctttaactttgcacacttgggatcacagttgcgtcattgtgtattaaatacttggaataaatcaagcaggtctcaacgcctccacta

SEQ ID NO: 2343 - protein, 380 aa, Homosapiens; identical to SEQ ID NO: 2339

SEQ ID NO: 2344 - DNA, 2509 bp, Homosapiens
tcgggactcgaccgggctgcgctcactgcccagccggggccccgggagcctccaggctcccgcccgccctgagctgcggcctccgcatggaggggccactcactccaccaccgctgcagggaggcggagccgccgctgttccggagcccggagcccggcaacacccgggacacgagacggcggcgcagcggtacagcgcccgactgctgcaggccggctacgagcccgagagcatggcggactacctgatcagcggcggcaccggctacgtgcccgaggatgggctcaccgcgcagcagctcttcgccagcgccgacggcctcacctacaacgacttcctgattctcccaggattcatagacttcatagctgatgaggtggacctgacctcagccctgacccggaagatcacgctgaagacgccactgatctcctcccccatggacactgtgacagaggctgacatggccattgccatggctctgatgggaggtattggtttcattcaccacaactgcaccccagagttccaggccaacgaggtgcggaaggtcaaggcaatttgaacagggcttcatcacggaccctgtggtgctgagcccctcgcacactgtgggcgatgtgctggaggccaagatgcggcatggcttctctggcatccccatcactgagacgggcaccatgggcagcaagctggtgggcatcgtcacctcccgagacatcgactttcttgctgagaaggaccacaccaccctcctcagtgaggtgatgacgccaaggattgaactggtggtggctccagcaggtgtgacgttgaaagaggcaaatgagatcctgcagcgtagcaagaaagggaagctgcctatcgtcaatgattgcgatgagctggtggccatcatcgcccgcaccgacctgaagaagaaccgagactaccctctggcctccaaggattcccagaagcagctgctctgtggggcagctgtgggcacccgtgaggatgacaaataccgtctggacctgctcacccaggcgggcgtcgacgtcatagtcttggactcgtcccaagggaattcggtgtatcagatcgccatggtgcattacatcaaacagaagtacccccacctccaggtgattggggggaacgtggtgacagcagcccaggccaagaacctgattgatgctggtgtggacgggctgcgcgtgggcatgggctgcggctccatctgcatcacccaggaagtgatggcctgtggtcggccccagggcactgctgtgtacaaggtggctgagtatgcccggcgctttggtgtgcccatcatagccgatggcggcatccagaccgtgggacacgtggtcaaggccctggcccttggagcctccacagtgatgatgggctccctgctggccgccactacggaggcccctggcgagtacttcttctcagacggggtgcggctcaagaagtaccggggcatgggctcactggatgccatggagaagagcagcagcagccagaaacgatacttcagcgagggggataaagtgaagatcgcgcagggtgtctcgggctccatccaggacaaaggatccattcagaagttcgtgccctacctcatagcaggcatccaacacggctgccaggatatcggggcccgcagcctgtctgtccttcggtccatgatgtactcaggagagctcaagtttgagaagcggaccatgtcggcccagattgagggtggtgtccatggcctgcactcttacgaaaagcggctgtactgaggacagcggtggaggccgaggtggtggaggggatgcaccccagtgtccacttttgggcacagcctccctccataactgagtggtccacagatttgcactacgggttctccagctcctttccaggcagagaggaggggaggtcctgaggggactgctgcccctcactcggcatcccctgcagagtcaggactgctcccggggccaggctgccctgggagcccccctccgagcccagccagccaggctctcaggccctgcgcctgcctcaggtctttcttgctgcagcctgctccagcctggcccccaccccaggggcaggcggcccctcctggcttctcctgtagggcacctccctgcccctagcctcccaggaaatggtgctctcctggccctgcctctggcccttcccgggccgctgcccctcagccatgtggcacttctgagctcctgacctaggccaaggggaggtctctgcccccttccccggccctgggctacccttgggtcctgctcctcaggccgctcccctgtccctggccatgggtaggagactgccctggtcatggccgcctgcctgtcattcctgactcaccaccgtccccaggtgaaccattcctcccttctcctcagctgcagtcgaaggctttaactttgcacacttgggatcacagttgcgtcattgtgtattaaatacttggaataaatcaagcaggtctcaacgcctccacta

SEQ ID NO: 2345 - protein, 380 aa, Homosapiens; identical to SEQ ID NO: 2339

SEQ ID NO: 2346 - DNA, 2882 bp, Homosapiens
tcggaaggggccaggagacactggaaggtccggacggcagggaaggggacggggttctttccagtcccacccgtgtagggacacctctccccctcatcccccgatgtaccctcgctgaatctgggatgggagagacgaaccgagtctaggcatctgcgtagcagcgccggggagagcggggagcccagggcggagcccagtcgactcccggattcccctgccccgcccccggcacgaggccccgccccggcggccccgcccctcctcgggactcgaccgggctgcgctcactgcccagccggggccccgggagcctccaggctcccgcccgccctgagctgcggcctccgcatggaggggccactcactccaccaccgctgcagggaggcggagccgccgctgttccggagcccggagcccggcaacacccgggacacgagacggcggcgcagcggtacagcgcccgactgctgcaggccggctacgagcccgagagccctagattggacctcgctacacacccgacgacaccccgttcagaactatcttcagtggtcttactggcaggtgttggtgtccagatggatcgccttcgcagggctagcatggcggactacctgatcagcggcggcaccggctacgtgcccgaggatgggctcaccgcgcagcagctcttcgccagcgccgacggcctcacctacaacgacttcctgattctcccaggattcatagacttcatagctgatgaggtggacctgacctcagccctgacccggaagatcacgctgaagacgccactgatctcctcccccatggacactgtgacagaggctgacatggccattgccatggctctgatgggaggtattggtttcattcaccacaactgcaccccagagttccaggccaacgaggtgcggaaggtcaaggcaatttgaacagggcttcatcacggaccctgtggtgctgagcccctcgcacactgtgggcgatgtgctggaggccaagatgcggcatggcttctctggcatccccatcactgagacgggcaccatgggcagcaagctggtgggcatcgtcacctcccgagacatcgactttcttgctgagaaggaccacaccaccctcctcagtgaggtgatgacgccaaggattgaactggtggtggctccagcaggtgtgacgttgaaagaggcaaatgagatcctgcagcgtagcaagaaagggaagctgcctatcgtcaatgattgcgatgagctggtggccatcatcgcccgcaccgacctgaagaagaaccgagactaccctctggcctccaaggattcccagaagcagctgctctgtggggcagctgtgggcacccgtgaggatgacaaataccgtctggacctgctcacccaggcgggcgtcgacgtcatagtcttggactcgtcccaagggaattcggtgtatcagatcgccatggtgcattacatcaaacagaagtacccccacctccaggtgattggggggaacgtggtgacagcagcccaggccaagaacctgattgatgctggtgtggacgggctgcgcgtgggcatgggctgcggctccatctgcatcacccaggaagtgatggcctgtggtcggccccagggcactgctgtgtacaaggtggctgagtatgcccggcgctttggtgtgcccatcatagccgatggcggcatccagaccgtgggacacgtggtcaaggccctggcccttggagcctccacagtgatgatgggctccctgctggccgccactacggaggcccctggcgagtacttcttctcagacggggtgcggctcaagaagtaccggggcatgggctcactggatgccatggagaagagcagcagcagccagaaacgatacttcagcgagggggataaagtgaagatcgcgcagggtgtctcgggctccatccaggacaaaggatccattcagaagttcgtgccctacctcatagcaggcatccaacacggctgccaggatatcggggcccgcagcctgtctgtccttcggtccatgatgtactcaggagagctcaagtttgagaagcggaccatgtcggcccagattgagggtggtgtccatggcctgcactcttacgaaaagcggctgtactgaggacagcggtggaggccgaggtggtggaggggatgcaccccagtgtccacttttgggcacagcctccctccataactgagtggtccacagatttgcactacgggttctccagctcctttccaggcagagaggaggggaggtcctgaggggactgctgcccctcactcggcatcccctgcagagtcaggactgctcccggggccaggctgccctgggagcccccctccgagcccagccagccaggctctcaggccctgcgcctgcctcaggtctttcttgctgcagcctgctccagcctggcccccaccccaggggcaggcggcccctcctggcttctcctgtagggcacctccctgcccctagcctcccaggaaatggtgctctcctggccctgcctctggcccttcccgggccgctgcccctcagccatgtggcacttctgagctcctgacctaggccaaggggaggtctctgcccccttccccggccctgggctacccttgggtcctgctcctcaggccgctcccctgtccctggccatgggtaggagactgccctggtcatggccgcctgcctgtcattcctgactcaccaccgtccccaggtgaaccattcctcccttctcctcagctgcagtcgaaggctttaactttgcacacttgggatcacagttgcgtcattgtgtattaaatacttggaataaatcaagcaggtctcaacgcctccacta

SEQ ID NO: 2347 - protein, 380 aa, Homosapiens; identical to SEQ ID NO: 2339

SEQ ID NO: 2348 - DNA, 688 bp, Homosapiens
ggggcttctcccacacttcttgctgccaccaggtgaagaaggatgtgtttgcttccccttccaccatgattgtaagtttcctgaggcctccacagccatgaggaactgtggccaggaggagggatgttagccacaaaggtttgtttttctgagacccttcaatcagttaccctcatgcttaattttcctacatggagctttaggggaagccatgaggaacatggtgtctgacgcatagtaagtgttcaataaatatttgctgaccagatgtagtggaagtgccttatcttccagtctgtttggtctcagctgcagaagtgagatgatgaagggaatctcatcgtttggaaagcatcacagtaagacacacacattgtgccaccactgtggctctaaggcccaccacctccagaagacgacctgtggcaaatgtggctaccctgccaaacacaagaggaaatataactgggtgccaaggctaaatggcgaaataccaccagaacttgttgaatgagacacctaaaaattgtttgccacagactgaggcacagattccgaaaaggaacacacctaaacccaagagggtagccgttgcagcatccagttcatcttaagaatttcagtgactagtcatgtgacaaatgttctagttttaaaaaataaataaataaatatttgctgaccgaaa

SEQ ID NO: 2349 - protein, 63 aa, Homosapiens
MMKGISSFGKHHSKTHTLCHHCGSKAHHLQKTTCGKCGYPAKHKRKYNWVPRLNGEIPPELVE

SEQ ID NO: 2350 - DNA, 903 bp, Homosapiens
ggggcgtgctcgcggctataaggggcggaggctgggcggcgttgctctgcgctctgcggctgacggcgcttttgtctccggtgagttttgtggcgggaagcttctgcgctggtgcttagtaaccgactttcctccggactcctgcacgacctgctcctacagccggcgatccactcccggctgttcccccggagggtccagaggcctttcagaaggagaaggcagctctgtttctctgcagaggagtagggtcctttcagccatgaagcatgtgttgaacctctacctgttaggtgtggtactgaccctactctccatcttcgttagagtgatggagtccctagagggcttactagagagcccatcgcctgggacctcctggaccaccagaagccaactagccaacacagagcccaccaagggccttccagaccatccatccagaagcatgtgataagacctccttccatactggccatattttggaacactgacctagacatgtccagatgggagtcccattcctagcagacaagctgagcaccgttgtaaccagagaactattactaggccttgaagaacctgtctaactggatgctcattgcctgggcaaggcctgtttaggccggttgcggtggctcatgcctgtaatcctagcactttgggaggctgaggtgggtggatcacctgaggtcaggagttcgagaccagcctcgccaacatggcgaaaccccatctctactaaaaatacaaaagttagctgggtgtggtggcagaggcctgtaatcccagctccttgggaggctgaggcgggagaattgcttgaacccggggacggaggttgcagtgagccgagatcgcactgctgtacccagcctgggccacagtgcaagactccatctc

SEQ ID NO: 2351 - protein, 86 aa, Homosapiens
MPVILALWEAEVGGSPEVRSSRPASPTWRNPISTKNTKVSWVWWQRPVIPAPWEAEAGELLEPGDGGCSEPRSHCCTQPGPQCKTP

SEQ ID NO: 2352 - DNA, 1411 bp, Homosapiens
ggggcgtgctcgcggctataaggggcggaggctgggcggcgttgctctgcgctctgcggctgacggcgcttttgtctccggtgagttttgtggcgggaagcttctgcgctggtgcttagtaaccgactttcctccggactcctgcacgacctgctcctacagccggcgatccactcccggctgttcccccggagggtccagaggcctttcagaaggagaaggcagctctgtttctctgcagaggagtagggtcctttcagccatgaagcatgtgttgaacctctacctgttaggtgtggtactgaccctactctccatcttcgttagagtgatggagtccctagagggcttactagagagcccatcgcctgggacctcctggaccaccagaagccaactagccaacacagagcccaccaagggccttccagaccatccatccagaagcatgtgataagacctccttccatactggccatattttggaacactgacctagacatgtccagatgggagtcccattcctagcagacaagctgagcaccgttgtaaccagagaactattactaggccttgaagaacctgtctaactggatgctcattgcctgggcaaggcctgtttaggccggttgcggtggctcatgcctgtaatcctagcactttgggaggctgaggtgggtggatcacctgaggtcaggagttcgagaccagcctcgccaacatggcgaaaccccatctctactaaaaatacaaaagttagctgggtgtggtggcagaggcctgtaatcccagctccttgggaggctgaggcgggagaattgcttgaacccggggacggaggttgcagtgagccgagatcgcactgctgtacccagcctgggccacagtgcaagactccatctcaaaaaaaaaagaaaagaaaaagcctgtttaatgcacaggtgtgagtggattgcttatggctatgagataggttgatctcgcccttaccccggggtctggtgtatgctgtgctttcctcagcagtatggctctgacatctcttagatgtcccaacttcagctgttgggagatggtgatattttcaaccctacttcctaaacatctgtctggggttcctttagtcttgaatgtcttatgctcaattatttggtgttgagcctctcttccacaagagctcctccatgtttggatagcagttgaagaggttgtgtgggtgggctgttgggagtgaggatggagtgttcagtgcccatttctcattttacattttaaagtcgttcctccaacatagtgtgtattggtctgaagggggtggtgggatgccaaagcctgctcaagttatggacattgtggccaccatgtggcttaaatgattttttctaactaataaagtggaatatatatttct

SEQ ID NO: 2353 - protein, 101 aa, Homosapiens [sequence omitted]

SEQ ID NO: 2354 - DNA, 2121 bp, Homosapiens
ggggcgtgctcgcggctataaggggcggaggctgggcggcgttgctctgcgctctgcggctgacggcgcttttgtctccggtgagttttgtggcgggaagcttctgcgctggtgcttagtaaccgactttcctccggactcctgcacgacctgctcctacagccggcgatccactcccggctgttcccccggagggtccagaggcctttcagaaggagaaggcagctctgtttctctgcagaggagtagggtcctttcagccatgaagcatgtgttgaacctctacctgttaggtgtggtactgaccctactctccatcttcgttagagtgatggagtccctagagggcttactagagagcccatcgcctgggacctcctggaccaccagaagccaactagccaacacagagcccaccaagggccttccagaccatccatccagaagcatgtgataagacctccttccatactggccatattttggaacactgacctagacatgtccagatgggagtcccattcctagcagacaagctgagcaccgttgtaaccagagaactattactaggccttgaagaacctgtctaactggatgctcattgcctgggcaaggcctgtttaggccggttgcggtggctcatgcctgtaatcctagcactttgggaggctgaggtgggtggatcacctgaggtcaggagttcgagaccagcctcgccaacatggcgaaaccccatctctactaaaaatacaaaagttagctgggtgtggtggcagaggcctgtaatcccagctccttgggaggctgaggcgggagaattgcttgaacccggggacggaggttgcagtgagccgagatcgcactgctgtacccagcctgggccacagtgcaagactccatctcaaaaaaaaaagaaaagaaaaagcctgtttaatgcacaggtgtgagtggattgcttatggctatgagataggttgatctcgcccttaccccggggtctggtgtatgctgtgctttcctcagcagtatggctctgacatctcttagatgtcccaacttcagctgttgggagatggtgatattttcaaccctacttcctaaacatctgtctggggttcctttagtcttgaatgtcttatgctcaattatttggtgttgagcctctcttccacaagagctcctccatgtttggatagcagttgaagaggttgtgtgggtgggctgttgggagtgaggatggagtgttcagtgcccatttctcattttacattttaaagtcgttcctccaacatagtgtgtattggtctgaagggggtggtgggatgccaaagcctgctcaagttatggacattgtggccaccatgtggcttaaatgattttttctaactaataaagtggaatatatatttctactgtgtgtcatgttgacttctgctcttgaaattcgtggtagggagggtcttaatttctagacctgaggtttaattttaacatctcaatactttggagcaggaaagtgcttaaatcactttgtttaaaacatagtatcagtagacttctgaatttgggggcagaggcagttgggtctgccatgtatcaaccagttatgtgagcctaggccacgattattgcaggcctgtcatgactagatctgtaaagaagaagaaaaatgatcaccacttccagcccctctccttgagtctctggggcaaagaggactatcagtccaggaggctgtgggctttttcttttgtactcttcagcgtgttttacttacccaccaaaaaggctgcttaattcagattgttctcaaagtcagttggtaaagtgtccacaccacacagatgattatatctgctctcccagatctaagcaacttggcctttactcaaaagttggaggggtttttttttcttgtatccatcactcttgtacttcctgtcccacgtacaattgtattcactcctttgcccttcagaatatatttatttacactcccatctgggcgtgtgcatcattttattaacttgactgacttttgctaaagcgcaacaatgaagtacagtgtcttctgttaagccagttttgcttcctgagtgttcttaaaatgtcactacccta

SEQ ID NO: 2355 - protein, 101 aa, Homosapiens [sequence omitted]

SEQ ID NO: 2356 - DNA, 770 bp, Homosapiens
aaggggcggaggctgggcggcgttgctctgcgctctgcggctgacggcgcttttgtctccgggtccagaggcctttcagaaggagaaggcagctctgtttctctgcagaggagtagggtcctttcagccatgaagcatgtgttgaacctctacctgttaggtgtggtactgaccctactctccatcttcgttagagtgatggagtccctagagggcttactagagagcccatcgcctgggacctcctggaccaccagaagccaactagccaacacagagcccaccaagggccttccagaccatccatccagaagcatgtgataagacctccttccatactggccatattttggaacactgacctagacatgtccagatgggagtcccattcctagcagacaagctgagcaccgttgtaaccagagaactattactaggccttgaagaacctgtctaactggatgctcattgcctgggcaaggcctgtttaggccggttgcggtggctcatgcctgtaatcctagcactttgggaggctgaggtgggtggatcacctgaggtcaggagttcgagaccagcctcgccaacatggcgaaaccccatctctactaaaaatacaaaagttagctgggtgtggtggcagaggcctgtaatcccagctccttgggaggctgaggcgggagaattgcttgaacccggggacggaggttgcagtgagccgagatcgcactgctgtacccagcctgggccacagtgcaagactccatctc

SEQ ID NO: 2357 - protein, 86 aa, Homosapiens; identical to SEQ ID NO: 2351

SEQ ID NO: 2358 - DNA, 1278 bp, Homosapiens
aaggggcggaggctgggcggcgttgctctgcgctctgcggctgacggcgcttttgtctccgggtccagaggcctttcagaaggagaaggcagctctgtttctctgcagaggagtagggtcctttcagccatgaagcatgtgttgaacctctacctgttaggtgtggtactgaccctactctccatcttcgttagagtgatggagtccctagagggcttactagagagcccatcgcctgggacctcctggaccaccagaagccaactagccaacacagagcccaccaagggccttccagaccatccatccagaagcatgtgataagacctccttccatactggccatattttggaacactgacctagacatgtccagatgggagtcccattcctagcagacaagctgagcaccgttgtaaccagagaactattactaggccttgaagaacctgtctaactggatgctcattgcctgggcaaggcctgtttaggccggttgcggtggctcatgcctgtaatcctagcactttgggaggctgaggtgggtggatcacctgaggtcaggagttcgagaccagcctcgccaacatggcgaaaccccatctctactaaaaatacaaaagttagctgggtgtggtggcagaggcctgtaatcccagctccttgggaggctgaggcgggagaattgcttgaacccggggacggaggttgcagtgagccgagatcgcactgctgtacccagcctgggccacagtgcaagactccatctcaaaaaaaaaagaaaagaaaaagcctgtttaatgcacaggtgtgagtggattgcttatggctatgagataggttgatctcgcccttaccccggggtctggtgtatgctgtgctttcctcagcagtatggctctgacatctcttagatgtcccaacttcagctgttgggagatggtgatattttcaaccctacttcctaaacatctgtctggggttcctttagtcttgaatgtcttatgctcaattatttggtgttgagcctctcttccacaagagctcctccatgtttggatagcagttgaagaggttgtgtgggtgggctgttgggagtgaggatggagtgttcagtgcccatttctcattttacattttaaagtcgttcctccaacatagtgtgtattggtctgaagggggtggtgggatgccaaagcctgctcaagttatggacattgtggccaccatgtggcttaaatgattttttctaactaataaagtggaatatatatttct

SEQ ID NO: 2359 - protein, 101 aa, Homosapiens [sequence omitted]

SEQ ID NO: 2360 - DNA, 1988 bp, Homosapiens
aaggggcggaggctgggcggcgttgctctgcgctctgcggctgacggcgcttttgtctccgggtccagaggcctttcagaaggagaaggcagctctgtttctctgcagaggagtagggtcctttcagccatgaagcatgtgttgaacctctacctgttaggtgtggtactgaccctactctccatcttcgttagagtgatggagtccctagagggcttactagagagcccatcgcctgggacctcctggaccaccagaagccaactagccaacacagagcccaccaagggccttccagaccatccatccagaagcatgtgataagacctccttccatactggccatattttggaacactgacctagacatgtccagatgggagtcccattcctagcagacaagctgagcaccgttgtaaccagagaactattactaggccttgaagaacctgtctaactggatgctcattgcctgggcaaggcctgtttaggccggttgcggtggctcatgcctgtaatcctagcactttgggaggctgaggtgggtggatcacctgaggtcaggagttcgagaccagcctcgccaacatggcgaaaccccatctctactaaaaatacaaaagttagctgggtgtggtggcagaggcctgtaatcccagctccttgggaggctgaggcgggagaattgcttgaacccggggacggaggttgcagtgagccgagatcgcactgctgtacccagcctgggccacagtgcaagactccatctcaaaaaaaaaagaaaagaaaaagcctgtttaatgcacaggtgtgagtggattgcttatggctatgagataggttgatctcgcccttaccccggggtctggtgtatgctgtgctttcctcagcagtatggctctgacatctcttagatgtcccaacttcagctgttgggagatggtgatattttcaaccctacttcctaaacatctgtctggggttcctttagtcttgaatgtcttatgctcaattatttggtgttgagcctctcttccacaagagctcctccatgtttggatagcagttgaagaggttgtgtgggtgggctgttgggagtgaggatggagtgttcagtgcccatttctcattttacattttaaagtcgttcctccaacatagtgtgtattggtctgaagggggtggtgggatgccaaagcctgctcaagttatggacattgtggccaccatgtggcttaaatgattttttctaactaataaagtggaatatatatttctactgtgtgtcatgttgacttctgctcttgaaattcgtggtagggagggtcttaatttctagacctgaggtttaattttaacatctcaatactttggagcaggaaagtgcttaaatcactttgtttaaaacatagtatcagtagacttctgaatttgggggcagaggcagttgggtctgccatgtatcaaccagttatgtgagcctaggccacgattattgcaggcctgtcatgactagatctgtaaagaagaagaaaaatgatcaccacttccagcccctctccttgagtctctggggcaaagaggactatcagtccaggaggctgtgggctttttcttttgtactcttcagcgtgttttacttacccaccaaaaaggctgcttaattcagattgttctcaaagtcagttggtaaagtgtccacaccacacagatgattatatctgctctcccagatctaagcaacttggcctttactcaaaagttggaggggtttttttttcttgtatccatcactcttgtacttcctgtcccacgtacaattgtattcactcctttgcccttcagaatatatttatttacactcccatctgggcgtgtgcatcattttattaacttgactgacttttgctaaagcgcaacaatgaagtacagtgtcttctgttaagccagttttgcttcctgagtgttcttaaaatgtcactacccta

SEQ ID NO: 2361 - protein, 101 aa, Homosapiens [sequence omitted]

SEQ ID NO: 2362 - DNA, 1673 bp, Homosapiens
gacggcgcttttgtctccggtgagttttgtggcgggaagcttctgcgctggtgcttagtaaccgactttcctccggactcctgcacgacctgctcctacagccggcgatccactcccggctgttcccccggaggtgagcggccctgtgggcttccccggctccccacccccatcgctagagtgctcgccgcgctagcagcctcgcgttccagggctgggggtgcgccgccgggatcctctctgatcgcccacgccccatctggggtccccattcagccgtcagccctgttttgtcctaaggtggtcctaactaggatccacgtggcccatcccacgcccacaggtgctgagttaggcatccctgccatgccctcccagagcaccttcacgatctccttgctgtcccaacacttagcgtgttgcgtgttaactaccctttgtctataaggtttgcaatgtggccctagtatcttccagggtacctaacacattgcagatattcatggtatgtttgttaaataaatgaacttgatagatttgaccctcatagagttatttggacttgcaaaaagtttgtagttaactccaatctgtgatgtgggagagacttctaggcaggttcctttctccagggcatgttcttatatttcccattacccaccacccccctgcaaaaggactgggcctatttcaggaaggtgactgatgcctgcactgtagcacaggggttgtgtattgtgccttgcaggaacaaaattttcaataaagtaaatgtttgtttgtttgtttttgagacggagttttgcttttgttgccgaggctggagtgcaatggcgcgatcttggctcactgcaacctctgcctcccgggttcaagcaattctgcctcagcctcccgagtagctgggattacaggcatgtgccactatgcccggctaatttttgtatttgtagtagagacagggtttcaccatcctcgccaacatggcgaaaccccatctctactaaaaatacaaaagttagctgggtgtggtggcagaggcctgtaatcccagctccttgggaggctgaggcgggagaattgcttgaacccggggacggaggttgcagtgagccgagatcgcactgctgtacccagcctgggccacagtgcaagactccatctcaaaaaaaaaagaaaagaaaaagcctgtttaatgcacaggtgtgagtggattgcttatggctatgagataggttgatctcgcccttaccccggggtctggtgtatgctgtgctttcctcagcagtatggctctgacatctcttagatgtcccaacttcagctgttgggagatggtgatattttcaaccctacttcctaaacatctgtctggggttcctttagtcttgaatgtcttatgctcaattatttggtgttgagcctctcttccacaagagctcctccatgtttggatagcagttgaagaggttgtgtgggtgggctgttgggagtgaggatggagtgttcagtgcccatttctcattttacattttaaagtcgttcctccaacatagtgtgtattggtctgaagggggtggtgggatgccaaagcctgctcaagttatggacattgtggccaccatgtggcttaaatgattttttctaactaataaagtggaatatatatttct

SEQ ID NO: 2363 - protein, 145 aa, Homosapiens
MFVCLFLRRSFAFVAEAGVQWRDLGSLQPLPPGFKQFCLSLPSSWDYRHVPLCPANFCICSRDRVSPSSPTWRNPISTKNTKVSWVWWQRPVIPAPWEAEAGELLEPGDGGCSEPRSHCCTQPGPQCKTPSQKKKKRKSLFNAQV

SEQ ID NO: 2364 - DNA, 2383 bp, Homosapiens
gacggcgcttttgtctccggtgagttttgtggcgggaagcttctgcgctggtgcttagtaaccgactttcctccggactcctgcacgacctgctcctacagccggcgatccactcccggctgttcccccggaggtgagcggccctgtgggcttccccggctccccacccccatcgctagagtgctcgccgcgctagcagcctcgcgttccagggctgggggtgcgccgccgggatcctctctgatcgcccacgccccatctggggtccccattcagccgtcagccctgttttgtcctaaggtggtcctaactaggatccacgtggcccatcccacgcccacaggtgctgagttaggcatccctgccatgccctcccagagcaccttcacgatctccttgctgtcccaacacttagcgtgttgcgtgttaactaccctttgtctataaggtttgcaatgtggccctagtatcttccagggtacctaacacattgcagatattcatggtatgtttgttaaataaatgaacttgatagatttgaccctcatagagttatttggacttgcaaaaagtttgtagttaactccaatctgtgatgtgggagagacttctaggcaggttcctttctccagggcatgttcttatatttcccattacccaccacccccctgcaaaaggactgggcctatttcaggaaggtgactgatgcctgcactgtagcacaggggttgtgtattgtgccttgcaggaacaaaattttcaataaagtaaatgtttgtttgtttgtttttgagacggagttttgcttttgttgccgaggctggagtgcaatggcgcgatcttggctcactgcaacctctgcctcccgggttcaagcaattctgcctcagcctcccgagtagctgggattacaggcatgtgccactatgcccggctaatttttgtatttgtagtagagacagggtttcaccatcctcgccaacatggcgaaaccccatctctactaaaaatacaaaagttagctgggtgtggtggcagaggcctgtaatcccagctccttgggaggctgaggcgggagaattgcttgaacccggggacggaggttgcagtgagccgagatcgcactgctgtacccagcctgggccacagtgcaagactccatctcaaaaaaaaaagaaaagaaaaagcctgtttaatgcacaggtgtgagtggattgcttatggctatgagataggttgatctcgcccttaccccggggtctggtgtatgctgtgctttcctcagcagtatggctctgacatctcttagatgtcccaacttcagctgttgggagatggtgatattttcaaccctacttcctaaacatctgtctggggttcctttagtcttgaatgtcttatgctcaattatttggtgttgagcctctcttccacaagagctcctccatgtttggatagcagttgaagaggttgtgtgggtgggctgttgggagtgaggatggagtgttcagtgcccatttctcattttacattttaaagtcgttcctccaacatagtgtgtattggtctgaagggggtggtgggatgccaaagcctgctcaagttatggacattgtggccaccatgtggcttaaatgattttttctaactaataaagtggaatatatatttctactgtgtgtcatgttgacttctgctcttgaaattcgtggtagggagggtcttaatttctagacctgaggtttaattttaacatctcaatactttggagcaggaaagtgcttaaatcactttgtttaaaacatagtatcagtagacttctgaatttgggggcagaggcagttgggtctgccatgtatcaaccagttatgtgagcctaggccacgattattgcaggcctgtcatgactagatctgtaaagaagaagaaaaatgatcaccacttccagcccctctccttgagtctctggggcaaagaggactatcagtccaggaggctgtgggctttttcttttgtactcttcagcgtgttttacttacccaccaaaaaggctgcttaattcagattgttctcaaagtcagttggtaaagtgtccacaccacacagatgattatatctgctctcccagatctaagcaacttggcctttactcaaaagttggaggggtttttttttcttgtatccatcactcttgtacttcctgtcccacgtacaattgtattcactcctttgcccttcagaatatatttatttacactcccatctgggcgtgtgcatcattttattaacttgactgacttttgctaaagcgcaacaatgaagtacagtgtcttctgttaagccagttttgcttcctgagtgttcttaaaatgtcactacccta

SEQ ID NO: 2365 - protein, 145 aa, Homosapiens; identical to SEQ ID NO: 2363

SEQ ID NO: 2366 - DNA, 1369 bp, Homosapiens
gtctccggtgagttttgtggcgggaagcttctgcgctggtgcttagtaaccgactttcctccggactcctgcacgacctgctcctacagccggcgatccactcccggctgttcccccggaggtgagcggccctgtgggcttccccggctccccacccccatcgctagagtgctcgccgcgctagcagcctcgcgttccagggctgggggtgcgccgccgggatcctctctgatcgcccacgccccatctggggtccccattcagccgtcagccctgttttgtcctaaggtggtcctaactaggatccacgtggcccatcccacgcccacaggtgctgagttaggcatccctgccatgccctcccagagcaccttcacgatctccttgctgtcccaacacttagcgtgttgcgtgttaactaccctttgtctataaggtttgcaatgtggccctagtatcttccagggtacctaacacattgcagatattcatggtatgtttgttaaataaatgaacttgatagatttgaccctcatagagttatttggacttgcaaaaagtttgtagttaactccaatctgtgatgtgggagagacttctaggcaggttcctttctccagggcatgttcttatatttcccattacccaccacccccctgcaaaaggactgggcctatttcaggaaggtgactgatgcctgcactgtagcacaggggttgtgtattgtgccttgcaggaacaaaattttcaataaagtaaatgtttgtttgtttgtttttgagacggagttttgcttttgttgcagtgagccgagatcgcactgctgtacccagcctgggccacagtgcaagactccatctcaaaaaaaaaagaaaagaaaaagcctgtttaatgcacaggtgtgagtggattgcttatggctatgagataggttgatctcgcccttaccccggggtctggtgtatgctgtgctttcctcagcagtatggctctgacatctcttagatgtcccaacttcagctgttgggagatggtgatattttcaaccctacttcctaaacatctgtctggggttcctttagtcttgaatgtcttatgctcaattatttggtgttgagcctctcttccacaagagctcctccatgtttggatagcagttgaagaggttgtgtgggtgggctgttgggagtgaggatggagtgttcagtgcccatttctcattttacattttaaagtcgttcctccaacatagtgtgtattggtctgaagggggtggtgggatgccaaagcctgctcaagttatggacattgtggccaccatgtggcttaaatgattttttctaactaataaagtggaatatatatttct

SEQ ID NO: 2367 - protein, 93 aa, Homosapiens
MFLYFPLPTTPLQKDWAYFRKVTDACTVAQGLCIVPCRNKIFNKVNVCLFVFETEFCFCCSEPRSHCCTQPGPQCKTPSQKKKKRKSLFNAQV

SEQ ID NO: 2368 - DNA, 2079 bp, Homosapiens
gtctccggtgagttttgtggcgggaagcttctgcgctggtgcttagtaaccgactttcctccggactcctgcacgacctgctcctacagccggcgatccactcccggctgttcccccggaggtgagcggccctgtgggcttccccggctccccacccccatcgctagagtgctcgccgcgctagcagcctcgcgttccagggctgggggtgcgccgccgggatcctctctgatcgcccacgccccatctggggtccccattcagccgtcagccctgttttgtcctaaggtggtcctaactaggatccacgtggcccatcccacgcccacaggtgctgagttaggcatccctgccatgccctcccagagcaccttcacgatctccttgctgtcccaacacttagcgtgttgcgtgttaactaccctttgtctataaggtttgcaatgtggccctagtatcttccagggtacctaacacattgcagatattcatggtatgtttgttaaataaatgaacttgatagatttgaccctcatagagttatttggacttgcaaaaagtttgtagttaactccaatctgtgatgtgggagagacttctaggcaggttcctttctccagggcatgttcttatatttcccattacccaccacccccctgcaaaaggactgggcctatttcaggaaggtgactgatgcctgcactgtagcacaggggttgtgtattgtgccttgcaggaacaaaattttcaataaagtaaatgtttgtttgtttgtttttgagacggagttttgcttttgttgcagtgagccgagatcgcactgctgtacccagcctgggccacagtgcaagactccatctcaaaaaaaaaagaaaagaaaaagcctgtttaatgcacaggtgtgagtggattgcttatggctatgagataggttgatctcgcccttaccccggggtctggtgtatgctgtgctttcctcagcagtatggctctgacatctcttagatgtcccaacttcagctgttgggagatggtgatattttcaaccctacttcctaaacatctgtctggggttcctttagtcttgaatgtcttatgctcaattatttggtgttgagcctctcttccacaagagctcctccatgtttggatagcagttgaagaggttgtgtgggtgggctgttgggagtgaggatggagtgttcagtgcccatttctcattttacattttaaagtcgttcctccaacatagtgtgtattggtctgaagggggtggtgggatgccaaagcctgctcaagttatggacattgtggccaccatgtggcttaaatgattttttctaactaataaagtggaatatatatttctactgtgtgtcatgttgacttctgctcttgaaattcgtggtagggagggtcttaatttctagacctgaggtttaattttaacatctcaatactttggagcaggaaagtgcttaaatcactttgtttaaaacatagtatcagtagacttctgaatttgggggcagaggcagttgggtctgccatgtatcaaccagttatgtgagcctaggccacgattattgcaggcctgtcatgactagatctgtaaagaagaagaaaaatgatcaccacttccagcccctctccttgagtctctggggcaaagaggactatcagtccaggaggctgtgggctttttcttttgtactcttcagcgtgttttacttacccaccaaaaaggctgcttaattcagattgttctcaaagtcagttggtaaagtgtccacaccacacagatgattatatctgctctcccagatctaagcaacttggcctttactcaaaagttggaggggtttttttttcttgtatccatcactcttgtacttcctgtcccacgtacaattgtattcactcctttgcccttcagaatatatttatttacactcccatctgggcgtgtgcatcattttattaacttgactgacttttgctaaagcgcaacaatgaagtacagtgtcttctgttaagccagttttgcttcctgagtgttcttaaaatgtcactacccta

SEQ ID NO: 2369 - protein, 93 aa, Homosapiens; identical to SEQ ID NO: 2367

SEQ ID NO: 2370 - DNA, 592 bp, Homosapiens
gctggtgcttagtaaccgactttcctccggactcctgcacgacctgctcctacagccggcgatccactcccggctgttcccccggagggtccagaggcctttcagaaggagaaggcagctctgtttctctgcagaggagtagggtcctttcagccatgaagcatgtgttgaacctctacctgttaggcagcaaatatgaagtctatggaccctgcctcaggttattcaaataacatcctcaccattgatcaaatgctcaagaaaaagcagacttgtatagtggccgatgcaactactattaaacaacatgtgaagagagctactgatacctataatttgggaattgcccttgaacaccgaaaagaaatgctaaacctctggcagaagatccgaggggatttgattgggatagactctagaaatgaggccttttatgacaccttttctacttatacatggtcctggaatgtttgccaagaattactttctcctaaggacttaaggttatatgatgcctatgtgaatagaaattcctcccataactgcagatcctcttcctcatcagataccagtgaatgtgacacagactcag

SEQ ID NO: 2371 - protein, 131 aa, Homosapiens
MKSMDPASGYSNNILTIDQMLKKKQTCIVADATTIKQHVKRATDTYNLGIALEHRKEMLNLWQKIRGDLIGIDSRNEAFYDTFSTYTWSWNVCQELLSPKDLRLYDAYVNRNSSHNCRSSSSSDTSECDTD

SEQ ID NO: 2372 - DNA, 1869 bp, Homosapiens
cttttttctcagggtccagaggcctttcagaaggagaaggcagctctgtttctctgcagaggagtagggtcctttcagccatgaagcatgtgttgaacctctacctgttaggtgtggtactgaccctactctccatcttcgttagagtgatggagtccctagagggcttactagagagcccatcgcctgggacctcctggaccaccagaagccaactagccaacacagagcccaccaagggccttccagaccatccatccagaagcatgtgataagacctccttccatactggccatattttggaacactgacctagacatgtccagatgggagtcccattcctagcagacaagctgagcaccgttgtaaccagagaactattactaggccttgaagaacctgtctaactggatgctcattgcctgggcaaggcctgtttaggccggttgcggtggctcatgcctgtaatcctagcactttgggaggctgaggtgggtggatcacctgaggtcaggagttcgagaccagcctcgccaacatggcgaaaccccatctctactaaaaatacaaaagttagctgggtgtggtggcagaggcctgtaatcccagctccttgggaggctgaggcgggagaattgcttgaacccggggacggaggttgcagtgagccgagatcgcactgctgtacccagcctgggccacagtgcaagactccatctcaaaaaaaaaagaaaagaaaaagcctgtttaatgcacaggtgtgagtggattgcttatggctatgagataggttgatctcgcccttaccccggggtctggtgtatgctgtgctttcctcagcagtatggctatctgtctggggttcctttagtcttgaatgtcttatgctcaattatttggtgttgagcctctcttccacaagagctcctccatgtttggatagcagttgaagaggttgtgtgggtgggctgttgggagtgaggatggagtgttcagtgcccatttctcattttacattttaaagtcgttcctccaacatagtgtgtattggtctgaagggggtggtgggatgccaaagcctgctcaagttatggacattgtggccaccatgtggcttaaatgattttttctaactaataaagtggaatatatatttctactgtgtgtcatgttgacttctgctcttgaaattcgtggtagggagggtcttaatttctagacctgaggtttaattttaacatctcaatactttggagcaggaaagtgcttaaatcactttgtttaaaacatagtatcagtagacttctgaatttgggggcagaggcagttgggtctgccatgtatcaaccagttatgtgagcctaggccacgattattgcaggcctgtcatgactagatctgtaaagaagaagaaaaatgatcaccacttccagcccctctccttgagtctctggggcaaagaggactatcagtccaggaggctgtgggctttttcttttgtactcttcagcgtgttttacttacccaccaaaaaggctgcttaattcagattgttctcaaagtcagttggtaaagtgtccacaccacacagatgattatatctgctctcccagatctaagcaacttggcctttactcaaaagttggaggggtttttttttcttgtatccatcactcttgtacttcctgtcccacgtacaattgtattcactcctttgcccttcagaatatatttatttacactcccatctgggcgtgtgcatcattttattaacttgactgacttttgctaaagcgcaacaatgaagtacagtgtcttctgttaagccagttttgcttcctgagtgttcttaaaatgtcactacccta

SEQ ID NO: 2373 - protein, 101 aa, Homosapiens [sequence omitted]

SEQ ID NO: 2374 - DNA, 464 bp, Homosapiens
gcactctgctgcccctacctggcttaagactgcctaagcctcatcaggaaggagaaaagttggcctgagctaagggccctccaagcaataaacctctgagtttatggtgagtgtaaactgggttaggttttcaattgtttgtgaaagagaccagagacagcagacgaggatgacctttcagtttcagggaataagatcagcaagccctaaagaaccttgattaaatttgggtattcccaaggctccttagctacacactgcactccatcctgggtgacagagcaagattctgtctcaaaacaagacaaacaaaatgaatagctgatcacatccattgtatttattgttgctgttctttaatgcatttaataaagaagcacatatataaccatattacaagtttgggggattataattttttattatggtaaaatatacattacataaaatttgccctttcaatc

SEQ ID NO: 2375 - protein, 38 aa, Homosapiens
MVSVNWVRFSIVCERDQRQQTRMTFQFQGIRSASPKEP

SEQ ID NO: 2376 - DNA, 1838 bp, Homosapiens
ggccgggcacggtggctcacacctgtaatcccagcactttgggagaccaaggcgggtggatcacgaggtcaggagttcgagaccagccagaccaagatggtgaaacccccatctctactaaaaatacaaaaattagccaggcgtggtggcacgcgcctgtagtcccagctacttaggaggctgaggcaggagaatcacttgaacctgggtgttggaggttgtagtgagccgagactgtgtcactgcacttcagcttgggcgacagagcgagactcctcacacaaaaaaaaaaaaaaaaagaaagaaaaaaaaattcaacatggtgtacatctttgtaatgaaataattttgtacattcatgattatttctttatgattaatttctagaagaggaattgccgagtcaatggttataattagctccatcactaagctccgtgaggttaagtcattttacttgtttgttaactgttatatgtccaggtcctagaactaggtctggcacacagtatgcaactcagtagataattgatgaatgaatggatgggtgtgtaccctcttgctataccatatttcagcacagagatgccaatttacactgtcatcaacagtgtgtgacaatttaatagaaagaatgtattgctgtacattttagattttccaggacagatcctactaaaaatattctgccctgttatctcactgatgcaaggaaatattccaggaattgtaacattttggcatccaaattatatctcctagattccctgttatacccacagccatatgaaaagtctcttgtcaagtcataaatcttgtttttagctagaaaatatggctgcttatctatctataaggttagttcttctctccaacattgtatctttataaataatagcaggtatatttagactcttttgactattcatggtaacactcacaaaattacctcaaggccatttcaataaacagttttgggggcactatcctcattgctttttcctggcattttataattttacagcagggcgcagtgactcatgcctgttatcccagcactttgggaggctgaggttgacagatcacctgagttcaggagtttgagactagcctgggcaacatggcgaaaccctatctctactaaaaatacaaaaattagctgggtgtggtggcatgcacctgtaatcccagctacttgggaggctgaggcaggtgaaacgcttgagcccggggaggtggaggttgcagcgaactgagatcacgttgctgcactgcagcctgggcaacagagtgagactctgtctcaattttttttttttttttttttttttacattatgaggcattgtccccatcaatattggacatatcttttcctttttctgggtcaaaatttttctagaacagtgatttaaaaaggatttgttctatatgttgagtgtgatggactggtttgcacccacacacctgcaaaccagcctctcggacaacatttacaaatagttgatctcatcccttacattttttttcatcccttacatttttagatcagaattgtcacaggaaataaaacactttgccatcctgacagtagatcagaaggttaatatagatttagtcttggtacatccagatttcctgagtccaaaagtggtctgtctctctgtgggcaacccttgagaaccacagaaaaataccccaatgggactgggcacagtagctcatacttgtaataacaacaatttgggaggctgaggtgggaggatcacttcagcccaggagtttgagaccagcctgagcaacatagggagtccgtgtctctacaaaaataaaaaaaaa

SEQ ID NO: 2377 - protein, 71 aa, Homosapiens [sequence omitted]

SEQ ID NO: 2378 - DNA, 828 bp, Homosapiens
gtttccggctccggtgtcatggccggctcctaccctgaaggtgcacctgcaatcctcgccgataagaggcagcagttcggaagccggttcctgagcgatccggcgcgcgtcttccaccacaatgcctgggacaatgtggagtggtcggaagagcaagccgcggcggcggagagaaaagtccaggagaacagtatccagcgggtgtgccaggagaaacaagttgattatgagatcaatgcccacaaatactggaatgacttctacaaaatccacgaaaatgggtttttcaaggatagacattggctttttaccgaattccctgagctggcacctagccaaaatcaaaatcatttgaaggattggttcttggagaacaagagtgaagtatgtgaatgtagaaacaatgaggatggacctggtttaataatggaagaacagcacaagtgttcttcgaagagccttgaacataaaacacagacacctcctgtggaggagaatgtaactcagaaaattagtgacctggaaatttgtgctgatgagtttcctggatcctcagccacctaccgaatactggaggttggctgtggtgtgggaaacacagtctttccaattttacaaacgaacaatgacccaggactctttgtttattgctgtgatttttcttccacagctatagaactggtccaggtgagtacgatgggaaattacctattggtaatttccactgattaaagggaaaaggttctcctaaaaatcaaggtctctggctgtgttcttatacggtctgtgttcttacggtctaaaagtaaaagatttactgataacgag

SEQ ID NO: 2379 - protein, 237 aa, Homosapiens
MAGSYPEGAPAILADKRQQFGSRFLSDPARVFHHNAWDNVEWSEEQAAAAERKVQENSIQRVCQEKQVDYEINAHKYWNDFYKIHENGFFKDRHWLFTEFPELAPSQNQNHLKDWFLENKSEVCECRNNEDGPGLIMEEQHKCSSKSLEHKTQTPPVEENVTQKISDLEICADEFPGSSATYRILEVGCGVGNTVFPILQTNNDPGLFVYCCDFSSTAIELVQVSTMGNYLLVISTD

SEQ ID NO: 2380 - DNA, 2162 bp, Homosapiens
gtttccggctccggtgtcatggccggctcctaccctgaaggtgcacctgcaatcctcgccgataagaggcagcagttcggaagccggttcctgagcgatccggcgcgcgtcttccaccacaatgcctgggacaatgtggagtggtcggaagagcaagccgcggcggcggagagaaaagtccaggagaacagtatccagcgggtgtgccaggagaaacaagttgattatgagatcaatgcccacaaatactggaatgacttctacaaaatccacgaaaatgggtttttcaaggatagacattggctttttaccgaattccctgagctggcacctagccaaaatcaaaatcatttgaaggattggttcttggagaacaagagtgaagtatgtgaatgtagaaacaatgaggatggacctggtttaataatggaagaacagcacaagtgttcttcgaagagccttgaacataaaacacagacacctcctgtggaggagaatgtaactcagaaaattagtgacctggaaatttgtgctgatgagtttcctggatcctcagccacctaccgaatactggaggttggctgtggtgtgggaaacacagtctttccaattttacaaacgaacaatgacccaggactctttgtttattgctgtgatttttcttccacagctatagaactggtccagacaaattcagaatatgatccttctcggtgttttgcctttgttcacgacctgtgtgatgaagagaagagttacccagtgcccaagggcagtcttgatattatcattctcatatttgttctttcagcagttgttccagacaagatgcagaaggctatcaacaggctgagcaggcttctgaaacctggggggatggtacttctgcgagattacggccgctatgacatggctcagcttcggtttaaaaaaggtcagtgtctatctggaaatttctatgtgagaggtgatggaaccagagtttacttcttcacacaagaggaactggacacgcttttcaccactgctggactggaaaaagttcagaatctggtggaccgccgactgcaggtgaaccgagggaagcaactgacaatgtaccgggtttggattcagtgcaaatactgcaagccccttctgtccagcaccagctaagaggcacctgctgccaacacgatgcaagcccgttgtgtttccgagcttttttaaaaaaaaatttgtagcaccgggcatggtgcatgcctgtaatcccagccactcaggaggctgaggcagggaggatccattgagcccaggagtccagcctgggcaaaatagcgagagaccctgaatctgaaagtaatgataaaataaaaagaatataaatgaggtctcgttgatgctggacaattcaagaattcagacttgaaccttaaacctaggaaaagttactttgtatcaggattctaacaattatgcttcatatttgtgaagtcctttaaaacataattttctcaagttctttctttgagacctcaatctgtcttagcattttgtaactaataactgaaattttattcaaaggaattgtaaaccttaaaccaccatttatttccatgtgaaaaagtgttatatatgacaagtgttttttgattgtaattgcgttaaatcttttgagagtgtaaatgccgggctaggcaattgcagttaatacatacaggggttagtgaagggcttattaagttgtaggggaagcaagctgggaagaatcagatcagatattttcctgacaagaaaaaaatgaccctgtagacagcatcaaaatgtggtgttcttgttaagtaattgatcgtggtctttgctttaatcttagttccgccaggcacggtggctcacacctgtaatcccagcactttgggaggccgaggcgggcagatcacctgaggtcaggagttcgagaccagcgtggccaacatggtgaaaccccgtctctactaaagataaaaaaattagctgggtgtgttggtgggtgcctgtaatccagctactcgggaggctgaggcaggagaatcacttgaacccaggaggcagaggttgcagtgagctgagattgcgccactgtactccagcctgggcaacaaagcaagactctgtctcaaaaaaataaaaataaaaaaaatctt

SEQ ID NO: 2381 - protein, 378 aa, Homosapiens
MAGSYPEGAPAILADKRQQFGSRFLSDPARVFHHNAWDNVEWSEEQAAAAERKVQENSIQRVCQEKQVDYEINAHKYWNDFYKIHENGFFKDRHWLFTEFPELAPSQNQNHLKDWFLENKSEVCECRNNEDGPGLIMEEQHKCSSKSLEHKTQTPPVEENVTQKISDLEICADEFPGSSATYRILEVGCGVGNTVFPILQTNNDPGLFVYCCDFSSTAIELVQTNSEYDPSRCFAFVHDLCDEEKSYPVPKGSLDIIILIFVLSAVVPDKMQKAINRLSRLLKPGGMVLLRDYGRYDMAQLRFKKGQCLSGNFYVRGDGTRVYFFTQEELDTLFTTAGLEKVQNLVDRRLQVNRGKQLTMYRVWIQCKYCKPLLSSTS

SEQ ID NO: 2382 - DNA, 3595 bp, Homosapiens
ggctccggtgtcatggccggctcctaccctgaaggtgcacctgcaatcctcgccgataagaggcagcagttcggaagccggttcctgagcgatccggcgcgcgtcttccaccacaatgcctgttgattatgagatcaatgcccacaaatactggaatgacttctacaaaatccacgaaaatgggtttttcaaggatagacattggctttttaccgaattccctgagctggcacctagccaaaatcaaaatcatttgaaggattggttcttggagaacaagagtgaagtatgtgaatgtagaaacaatgaggatggacctggtttaataatggaagaacagcacaagtgttcttcgaagagccttgaacataaaacacagacacctcctgtggaggagaatgtaactcagaaaattagtgacctggaaatttgtgctgatgagtttcctggatcctcagccacctaccgaatactggaggttggctgtggtgtgggaaacacagtctttccaattttacaaacgaacaatgacccaggactctttgtttattgctgtgatttttcttccacagctatagaactggtccagacaaattcagaatatgatccttctcggtgttttgcctttgttcacgacctgtgtgatgaagagaagagttacccagtgcccaagggcagtcttgatattatcattctcatatttgttctttcagcagttgttccagacaagatgcagaaggctatcaacaggctgagcaggcttctgaaacctggggggatggtacttctgcgagattacggccgctatgacatggctcagcttcggtttaaaaaaggtcagtgtctatctggaaatttctatgtgagaggtgatggaaccagagtttacttcttcacacaagaggaactggacacgcttttcaccactgctggactggaaaaagttcagaatctggtggaccgccgactgcaggtgaaccgagggaagcaactgacaatgtaccgggtttggattcagtgcaaatactgcaagccccttctgtccagcaccagctaagaggcacctgctgccaacacgatgcaagcccgttgtgtttccgagcttttttaaaaaaaaatttgtagcaccgggcatggtgcatgcctgtaatcccagccactcaggaggctgaggcagggaggatccattgagcccaggagtccagcctgggcaaaatagcgagagaccctgaatctgaaagtaatgataaaataaaaagaatataaatgaggtctcgttgatgctggacaattcaagaattcagacttgaaccttaaacctaggaaaagttactttgtatcaggattctaacaattatgcttcatatttgtgaagtcctttaaaacataattttctcaagttctttctttgagacctcaatctgtcttagcattttgtaactaataactgaaattttattcaaaggaattgtaaaccttaaaccaccatttatttccatgtgaaaaagtgttatatatgacaagtgttttttgattgtaattgcgttaaatcttttgagagtgtaaatgccgggctaggcaattgcagttaatacatacaggggttagtgaagggcttattaagttgtaggggaagcaagctgggaagaatcagatcagatattttcctgacaagaaaaaaatgaccctgtagacagcatcaaaatgtggtgttcttgttaagtaattgatcgtggtctttgctttaatcttagttccgccaggcacggtggctcacacctgtaatcccagcactttgggaggccgaggcgggcagatcacctgaggtcaggagttcgagaccagcgtggccaacatggtgaaaccccgtctctactaaagataaaaaaattagctgggtgtgttggtgggtgcctgtaatccagctactcgggaggctgaggcaggagaatcacttgaacccaggaggcagaggttgcagtgagctgagattgcgccactgtactccagcctgggcaacaaagcaagactctgtctcaaaaaaataaaaataaaaaaaatcttagttccatggaattttaagcactgttccccctctaacctatgtctaaagaattaaaagaatttggctgggtgcggtagctcatgcctgtaatcccaacactttgggaggctgaggcaggtggatcacgaggtcaggagatcgagaccatcctggctaacacggtgaaacctcgtctccactaaaaataccaaaaaaaatagctgggcatggtggcatgcgcctgtagtcccctgtagtcccagctactcgggaggctaaggcaggagaatcgtttgaacctgggaggcagaggttgcagtgagccgagatcatgtcactgcattccagcctgggcaacagaggaagactctgtctcaaaaaaataaaagaaaagaattttcactttttgcaaaattatctttttttactgcacccttaagtgtttgacacaaaaggaattgagagaacttcttaattttaaccacatcatcacttcacttctgaatgtgatcactgtcagtgttagatgctttttttttttttttttaggagacagggctctcactttgttgcccaggctggagttcagtggtgcaatgatagctcattatcacctcgaacttctggcttgagccatcgctccacctcagcctcctgagtagctaggactgcaggtgggcaccatcatgcctagctaattgttagatcctttttttttatgttctgcattttttcaattatttttacatatttctgtcttgatccatgcagttataggatatatccttaattttagaaagtaaggacttttcgaccaggcatggcggctcacgcctataatcccagcactttgggaggctgaggtgggcagatcacttgaggtcaggagttccagtccagcccggctaacatagtgaaaccccgtctccactaaaaaataaaaaatcagcccggcatggttgtgggcgcctgtaatcccagctactcaggaggctgaggtaggagaattgcttgaacctgggaggcggaggttgcagtgagctgagatggtgccattgcactccagcctgggcgacaagagcgaaactgcatctcaaaaacaaagatgcctagctttcaccttgttgatgtttttctaaattttggaataataaatttatataggaatactgcaagaatagtccatttttttctgatgtcccaacatcagcaaatatattaccaaatatatccatcacaagtaggaatacatggaaacattaatgccagccactaaccattcatgtttacccagtagtcccaataatagctttgtcacacaaaaacatgattatgttggctgggcacagtggctcctgtaatcttagcattttgggagcccaaggcaggaggatgacttgaggccaggagttcaagaccaggctgggtaatgtagcaagaccctgactttttttttttttttttttgagatggagtttcgctcttgttgcccaggctggagtacaatggcacgatctcggctcactgcaatctccacctcccaagtttaag

SEQ ID NO: 2383 - protein, 313 aa, Homosapiens
MPVDYEINAHKYWNDFYKIHENGFFKDRHWLFTEFPELAPSQNQNHLKDWFLENKSEVCECRNNEDGPGLIMEEQHKCSSKSLEHKTQTPPVEENVTQKISDLEICADEFPGSSATYRILEVGCGVGNTVFPILQTNNDPGLFVYCCDFSSTAIELVQTNSEYDPSRCFAFVHDLCDEEKSYPVPKGSLDIIILIFVLSAVVPDKMQKAINRLSRLLKPGGMVLLRDYGRYDMAQLRFKKGQCLSGNFYVRGDGTRVYFFTQEELDTLFTTAGLEKVQNLVDRRLQVNRGKQLTMYRVWIQCKYCKPLLSSTS

SEQ ID NO: 2384 - DNA, 376 bp, Homosapiens
tgcccacaaatactggaatgacttctacaaaatccacgaaaatgggtttttcaaggatagacattggctttttaccgaattccctgagctggcacctagccaaaatcaaaatcatttgaaggattggttcctgggcaacaagagtgaaactccgtctcaaaaaaaaaaaaaaaaaaaaattagctgggcatggtggtgggcgcctgtaatcccagctatctgggaggctgagtctagagaatcatttgaacctgggaggcggaggttgcagtgagccgagatcgcaccattgcactccagcctgggcaacagtgagactccgtctcaaaataaaaaaacaaaaaaaatgtaaaaaataaataattgtattgaattt

SEQ ID NO: 2385 - protein, 33 aa, Homosapiens
MTSTKSTKMGFSRIDIGFLPNSLSWHLAKIKII

SEQ ID NO: 2386 - DNA, 6981 bp, Homosapiens
acacaagctctccatgtgagctgacaggcgagtggaaacccctcgagtcacgctgcccggcggcggagggagcgctcgcccgcagtggcaacagctgcaccaccgtccccgtcgctctgccttcctcttctgcagcctctgctcttctgattacctccctcccccgtcctttggtgatttttttttttcaagaaggagagggcggggtaggtgtccgttccctcccctcttccccctcctttgccttcttggtttgaatttcctcccccggcgttgcactggcacacagtgcaagaggcaatacccgcacggagggagaacgaaggctgagactcccctgccgctccaagcccggaagaactggagcctggaggggggtgaggggagaagaggaagcgggaggggcttggcttcctcgcgtatttgaggacagcccatctcccttcaagaaccctacggagagtcggactgcatctccgcagcgagctcttggagcgccgccggccgggaggcgaaggatgcaggcggctccgcgcgccggctgcggggcagcgctcctgctgtggattgtcagcagctgcctctgcagagcctggacggctccctccacgtcccaaaaatgtgatgagccacttgtctctggactcccccatgtggctttcagcagctcctcctccatctctggtagctattctcccggctatgccaagataaacaagagaggaggtgctgggggatggtctccatcagacagcgaccattatcaatggcttcaggttgactttggcaatcggaagcagatcagtgccattgcaacccaaggaaggtatagcagctcagattgggtgacccaataccggatgctctacagcgacacagggagaaactggaaaccctatcatcaagatgggaatatctgggcatttcccggaaacattaactctgacggtgtggtccggcacgaattacagcatccgattattgcccgctatgtgcgcatagtgcctctggattggaatggagaaggtcgcattggactcagaattgaagtttatggctgttcttactgggctgatgttatcaactttgatggccatgttgtattaccatatagattcagaaacaagaagatgaaaacactgaaagatgtcattgccttgaactttaagacgtctgaaagtgaaggagtaatcctgcacggagaaggacagcaaggagattacattaccttggaactgaaaaaagccaagctggtcctcagtttaaacttaggaagcaaccagcttggccccatatatggccacacatcagtgatgacaggaagtttgctggatgaccaccactggcactctgtggtcattgagcgccaggggcggagcattaacctcactctggacaggagcatgcagcacttccgtaccaatggagagtttgactacctggacttggactatgagataacctttggaggcatccctttctctggcaagcccagctccagcagtagaaagaatttcaaaggctgcatggaaagcatcaactacaatggcgtcaacattactgatcttgccagaaggaagaaattagagccctcaaatgtgggaaatttgagcttttcttgtgtggaaccctatacggtgcctgtctttttcaacgctacaagttacctggaggtgcccggacggcttaaccaggacctgttctcagtcagtttccagtttaggacatggaaccccaatggtctcctggtcttcagtcactttgcggataatttgggcaatgtggagattgacctcactgaaagcaaagtgggtgttcacatcaacatcacacagaccaagatgagccaaatcgatatttcctcaggttctgggttgaatgatggacagtggcacgaggttcgcttcctagccaaggaaaattttgctattctcaccatcgatggagatgaagcatcagcagttcgaactaatagtccccttcaagttaaaactggcgagaagtacttttttggaggttttctgaaccagatgaataactcaagtcactctgtccttcagccttcattccaaggatgcatgcagctcattcaagtggacgatcaacttgtaaatttatacgaagtggcacaaaggaagccgggaagtttcgcgaatgtcagcattgacatgtgtgcgatcatagacagatgtgtgcccaatcactgtgagcatggtggaaagtgctcgcaaacatgggacagcttcaaatgcacttgtgatgagacaggatacagtggggccacctgccacaactctatctacgagccttcctgtgaagcctacaaacacctaggacagacatcaaattattactggatagatcctgatggcagcggacctctggggcctctgaaagtttactgcaacatgacagaggacaaagtgtggaccatagtgtctcatgacttgcagatgcagacgcctgtggtcggctacaacccagaaaaatactcagtgacacagctcgtttacagcgcctccatggaccagataagtgccatcactgacagtgccgagtactgcgagcagtatgtctcctatttctgcaagatgtcaagattgttgaacaccccagatggaagcccttacacttggtgggttggcaaagccaacgagaagcactactactggggaggctctgggcctggaatccagaaatgtgcctgcggcatcgaacgcaactgcacagatcccaagtactactgtaactgcgacgcggactacaagcaatggaggaaggatgctggtttcttatcatacaaagatcacctgccagtgagccaagtggtggttggagatactgaccgtcaaggctcagaagccaaattgagcgtaggtcctctgcgctgccaaggagacaggaattattggaatgccgcctctttcccaaacccatcctcctacctgcacttctctactttccaaggggaaactagcgctgacatttctttctacttcaaaacattaaccccctggggagtgtttcttgaaaatatgggaaaggaagatttcatcaagctggagctgaagtctgccacagaagtgtccttttcatttgatgtgggaaatgggccagtagagattgtagtgaggtcaccaacccctctcaacgatgaccagtggcaccgggtcactgcagagaggaatgtcaagcaggccagcctacaggtggaccggctaccgcagcagatccgcaaggccccaacagaaggccacacccgcctggagctctacagccagttatttgtgggtggtgctgggggccagcagggcttcctgggctgcatccgctccttgaggatgaatggggtgacacttgacctggaggaaagagcaaaggtcacatctgggttcatatccggatgctcgggccattgcaccagctatggaacaaactgtgaaaatggaggcaaatgcctagagagataccacggttactcctgcgattgctctaatactgcatatgatggaacattttgcaacaaagatgttggtgcattttttgaagaagggatgtggctacgatataactttcaggcaccagcaacaaatgccagagactccagcagcagagtagacaacgctcccgaccagcagaactcccacccggacctggcacaggaggagatccgcttcagcttcagcaccaccaaggcgccctgcattctcctctacatcagctccttcaccacagacttcttggcagtcctcgtcaaacccactggaagcttacagattcgatacaacctgggtggcacccgagagccatacaatattgacgtagaccacaggaacatggccaatggacagccccacagtgtcaacatcacccgccacgagaagaccatctttctcaagctcgatcattatccttctgtgagttaccatctgccaagttcatccgacaccctcttcaattctcccaagtcgctctttctgggaaaagttatagaaacagggaaaattgaccaagagattcacaaatacaacaccccaggattcactggttgcctctccagagtccagttcaaccagatcgcccctctcaaggccgccttgaggcagacaaacgcctcggctcacgtccacatccagggcgagctggtggagtccaactgcggggcctcgccgctgaccctctcccccatgtcgtccgccaccgacccctggcacctggatcacctggattcagccagtgcggattttccatataatccaggacaaggccaagctataagaaatggagtcaacagaaactcggctatcattggaggcgtcattgctgtggtgattttcaccatcctgtgcaccctggtcttcctgatccggtacatgttccgccacaagggcacctaccataccaacgaagcaaagggggcggagtcggcagagagcgcggacgccgccatcatgaacaacgaccccaacttcacagagaccattgatgaaagcaaaaaggaatggctcatttgaggggtggctacttggctatgggatagggaggagggaattactagggaggagagaaagggacaaaagcaccctgcttcatactcttgagcacatccttaaaatatcagcacaagttgggggaggcaggcaatggaatataatggaatattcttgagactgatcacaaaaaaaaaaacctttttaatatttctttatagctgagttttcccttctgtatcaaaacaaaataatacaaaaaatgcttttagagtttaagcaatggttgaaatttgtaggtactatctgtcttattttgtgtgtgtttagaggtgttctaaagacccgtggtaacagggcaagttttctacgtttttaagagcccttagaacgtgggtattttttttcttgagaaaagctaatgcacctacagatggcccccaacattctcttccttttgcttctagtcaaccttaatgggctgttacagaaactagttcgtgtttatatactatttcctttgatgtcctataagtcggaaaagaaaggggcaaagagaacctattatttgccagtttttaagcagagctcaatctatgccagctctctggcatctggggttcctgactgataccagcagttgaaggaagagagtgcatggcacctggtgtgtaacgacacaatcagcacaactggagagaggcattaaagaaccagggaaggtagtttgatttttcattgaattctacaagctaatattgttccacgtatgtagtcttagaccaatagctgtaactatcagctgcaataccatggtgaccagctgttacaaaagattttttcctgttttatctgaaacatactggatttatatatgtataagcgcctcaatggggaattagagccagatgttatgatttgtttgctctttttcttttatagtttagttatagcaaaaatatggataatttctagtgaatgcataaattaggttgcgtttcttattttgctttaaatctctggtagtttttccacccctgtgacacaatcctaatagacagtgtcctgtaaatggacacaacacaataaagtcaagttattattgctgttactctggatgatatggaaaacactgccatattttaaatcaactactccacgtgtttttccatccaatcacactgctgtgattcagggatctttcttctaagacggacacatttgaacctcaggttcatcacaaacctggtacctgttgcttcccagaggatggagaagtgtagttaatcacacctcttagtttaatctgaaatcttgacccagttatttaacaaataaatacctcattgattatatttaaaagtaatacacttcctgtaaacaaatggggacaatgcatccaaaaaatctttttaaacagattacacaaaaattatttccagaaaggctaccatttatcatcattatatttcaagcctcttatacttaataagcactttctaaaaagtcttgagatcccaccattctgaggaattcaatatgatcactttttccttctttgcctgggagaggttaagaggaggtttcgaaggtatagatgctattgttctgatggcccggctgaataaaatggaaattctagtttgttagaattatgcattctttttcaagattctcagtgtgcctaacttattggagcacatcagtttcttgggtaatggaaaacattacctagagttgccagtggcacattacaccagtacagagcacattccaaaggagacattggaccagttaattcccatacaagtcaaggtaacagaacaaaagggaatcctgatgcccttttaccattgctggttgagctcaggcactgtcatggacacccttaattttaaaaggttttaatcattcttctataaaatacatttaaaatggaaaaatacttaatatcactaaatatcagaacaatgtaacatttacaaatgacatattgaaagcaaaggctgttttatttagccaagatgattaccattaggagttactttatgtattgttgaaagcaaattttaaacatgatgttttagaagtgtttctgatttttaaacctggtttacaggtattacttctgcacttaccaaataatgccagatggaaatttattatttcttgcaattcccatgatagctctgttctttatgcattgtctcaacactttcccttttttcccaaaatgagtagagaattaaagccacccaaaacagcttctgctactaaaatgttctcatcctttctcctccctctccttttcctgccacaaaaggtgaaaaatgagatccaatcctctcaccaaaatttcaaacctaggacactggaatgactgcagggatcagtggttctcccatatcaccatcaattaagacatataggacactgtcttccttcaagagggttacaatgtggccatcagacaggaaaccaaacggtggat

SEQ ID NO: 2387 - protein, 1331 aa, Homosapiens; identical to SEQ ID NO: 280

SEQ ID NO: 2388 - DNA, 7881 bp, Homosapiens
acaagctctccatgtgagctgacaggcgagtggaaacccctcgagtcacgctgcccggcggcggagggagcgctcgcccgcagtggcaacagctgcaccaccgtccccgtcgctctgccttcctcttctgcagcctctgctcttctgattacctccctcccccgtcctttggtgatttttttttttcaagaaggagagggcggggtaggtgtccgttccctcccctcttccccctcctttgccttcttggtttgaatttcctcccccggcgttgcactggcacacagtgcaagaggcaatacccgcacggagggagaacgaaggctgagactcccctgccgctccaagcccggaagaactggagcctggaggggggtgaggggagaagaggaagcgggaggggcttggcttcctcgcgtatttgaggacagcccatctcccttcaagaaccctacggagagtcggactgcatctccgcagcgagctcttggagcgccgccggccgggaggcgaaggatgcaggcggctccgcgcgccggctgcggggcagcgctcctgctgtggattgtcagcagctgcctctgcagagcctggacggctccctccacgtcccaggtgctgggggatggtctccatcagacagcgaccattatcaatggcttcaggttgactttggcaatcggaagcagatcagtgccattgcaacccaaggaaggtatagcagctcagattgggtgacccaataccggatgctctacagcgacacagggagaaactggaaaccctatcatcaagatgggaatatctgggcatttcccggaaacattaactctgacggtgtggtccggcacgaattacagcatccgattattgcccgctatgtgcgcatagtgcctctggattggaatggagaaggtcgcattggactcagaattgaagtttatggctgttcttactgggctgatgttatcaactttgatggccatgttgtattaccatatagattcagaaacaagaagatgaaaacactgaaagatgtcattgccttgaactttaagacgtctgaaagtgaaggagtaatcctgcacggagaaggacagcaaggagattacattaccttggaactgaaaaaagccaagctggtcctcagtttaaacttaggaagcaaccagcttggccccatatatggccacacatcagtgatgacaggaagtttgctggatgaccaccactggcactctgtggtcattgagcgccaggggcggagcattaacctcactctggacaggagcatgcagcacttccgtaccaatggagagtttgactacctggacttggactatgagataacctttggaggcatccctttctctggcaagcccagctccagcagtagaaagaatttcaaaggctgcatggaaagcatcaactacaatggcgtcaacattactgatcttgccagaaggaagaaattagagccctcaaatgtgggaaatttgagcttttcttgtgtggaaccctatacggtgcctgtctttttcaacgctacaagttacctggaggtgcccggacggcttaaccaggacctgttctcagtcagtttccagtttaggacatggaaccccaatggtctcctggtcttcagtcactttgcggataatttgggcaatgtggagattgacctcactgaaagcaaagtgggtgttcacatcaacatcacacagaccaagatgagccaaatcgatatttcctcaggtaggttttctgaaccagatgaataactcaagtcactctgtccttcagccttcattccaaggatgcatgcagctcattcaagtggacgatcaacttgtaaatttatacgaagtggcacaaaggaagccgggaagtttcgcgaatgtcagcattgacatgtgtgcgatcatagacagacagaggacaaagtgtggaccatagtgtctcatgacttgcagatgcagacgcctgtggtcggctacaacccagaaaaatactcagtgacacagctcgtttacagcgcctccatggaccagataagtgccatcactgacagtgccgagtactgcgagcagtatgtctcctatttctgcaagatgtcaagattgttgaacaccccagatggaagcccttacacttggtgggttggcaaagccaacgagaagcactactactggggaggctctgggcctggaatccagaaatgtgcctgcggcatcgaacgcaactgcacagatcccaagtactactgtaactgcgacgcggactacaagcaatggggaattattggaatgccgcctctttcccaaacccatcctcctacctgcacttctctactttccaaggggaaactagcgctgacatttctttctacttcaaaacattaaccccctggggagtgtttcttgaaaatatgggaaaggaagatttcatcaagctggagctgaagtctgccacagaagtgtccttttcatttgatgtgggaaatgggccagtagagattgtagtgaggtcaccaacccctctcaacgatgaccagtggcaccgggtcactgcagagaggaatgtcaagcaggccagcctacaggtggaccggctaccgcagcagatccgcaaggccccaacagaaggccacacccgcctggagctctacagccagttatttgtgggtggtgctgggggccagcagggcttcctgggctgcatccgctccttgaggatgaatggggtgacacttgacctggaggaaagagcaaaggtcacatctgggttcatatccggatgctcgggccattgcaccagctatggaacaaactgtgaaaatggaggcaaatgcctagagagataccacggttactcctgcgattgctctaatactgcatatgatggaacattttgcaacaaagatgttggtgcattttttgaagaagggatgtggctacgatataactttcaggcaccagcaacaaatgccagagactccagcagcagagtagacaacgctcccgaccagcagaactcccacccggacctggcacaggaggagatccgcttcagcttcagcaccaccaaggcgccctgcattctcctctacatcagctccttcaccacagacttcttggcagtcctcgtcaaacccactggaagcttacagattcgatacaacctgggtggcacccgagagccatacaatattgacgtagaccacaggaacatggccaatggacagccccacagtgtcaacatcacccgccacgagaagaccatctttctcaagctcgatcattatccttctgtgagttaccatctgccaagttcatccgacaccctcttcaattctcccaagtcgctctttctgggaaaagttatagaaacagggaaaattgaccaagagattcacaaatacaacaccccaggattcactggttgcctctccagagtccagttcaaccagatcgcccctctcaaggccgccttgaggcagacaaacgcctcggctcacgtccacatccagggcgagctggtggagtccaactgcggggcctcgccgctgaccctctcccccatgtcgtccgccaccgacccctggcacctggatcacctggattcagccagtgcggattttccatataatccaggacaaggccaagctataagaaatggagtcaacagaaactcggctatcattggaggcgtcattgctgtggtgattttcaccatcctgtgcaccctggtcttcctgatccggtacatgttccgccacaagggcacctaccataccaacgaagcaaagggggcggagtcggcagagagcgcggacgccgccatcatgaacaacgaccccaacttcacagagaccattgatgaaagcaaaaaggaatggctcatttgaggggtggctacttggctatgggatagggaggagggaattactagggaggagagaaagggacaaaagcaccctgcttcatactcttgagcacatccttaaaatatcagcacaagttgggggaggcaggcaatggaatataatggaatattcttgagactgatcacaaaaaaaaaaacctttttaatatttctttatagctgagttttcccttctgtatcaaaacaaaataatacaaaaaatgcttttagagtttaagcaatggttgaaatttgtaggtactatctgtcttattttgtgtgtgtttagaggtgttctaaagacccgtggtaacagggcaagttttctacgtttttaagagcccttagaacgtgggtattttttttcttgagaaaagctaatgcacctacagatggcccccaacattctcttccttttgcttctagtcaaccttaatgggctgttacagaaactagttcgtgtttatatactatttcctttgatgtcctataagtcggaaaagaaaggggcaaagagaacctattatttgccagtttttaagcagagctcaatctatgccagctctctggcatctggggttcctgactgataccagcagttgaaggaagagagtgcatggcacctggtgtgtaacgacacaatcagcacaactggagagaggcattaaagaaccagggaaggtagtttgatttttcattgaattctacaagctaatattgttccacgtatgtagtcttagaccaatagctgtaactatcagctgcaataccatggtgaccagctgttacaaaagattttttcctgttttatctgaaacatactggatttatatatgtataagcgcctcaatggggaattagagccagatgttatgatttgtttgctctttttcttttatagtttagttatagcaaaaatatggataatttctagtgaatgcataaattaggttgcgtttcttattttgctttaaatctctggtagtttttccacccctgtgacacaatcctaatagacagtgtcctgtaaatggacacaacacaataaagtcaagttattattgctgttactctggatgatatggaaaacactgccatattttaaatcaactactccacgtgtttttccatccaatcacactgctgtgattcagggatctttcttctaagacggacacatttgaacctcaggttcatcacaaacctggtacctgttgcttcccagaggatggagaagtgtagttaatcacacctcttagtttaatctgaaatcttgacccagttatttaacaaataaatacctcattgattatatttaaaagtaatacacttcctgtaaacaaatggggacaatgcatccaaaaaatctttttaaacagattacacaaaaattatttccagaaaggctaccatttatcatcattatatttcaagcctcttatacttaataagcactttctaaaaagtcttgagatcccaccattctgaggaattcaatatgatcactttttccttctttgcctgggagaggttaagaggaggtttcgaaggtatagatgctattgttctgatggcccggctgaataaaatggaaattctagtttgttagaattatgcattctttttcaagattctcagtgtgcctaacttattggagcacatcagtttcttgggtaatggaaaacattacctagagttgccagtggcacattacaccagtacagagcacattccaaaggagacattggaccagttaattcccatacaagtcaaggtaacagaacaaaagggaatcctgatgcccttttaccattgctggttgagctcaggcactgtcatggacacccttaattttaaaaggttttaatcattcttctataaaatacatttaaaatggaaaaatacttaatatcactaaatatcagaacaatgtaacatttacaaatgacatattgaaagcaaaggctgttttatttagccaagatgattaccattaggagttactttatgtattgttgaaagcaaattttaaacatgatgttttagaagtgtttctgatttttaaacctggtttacaggtattacttctgcacttaccaaataatgccagatggaaatttattatttcttgcaattcccatgatagctctgttctttatgcattgtctcaacactttcccttttttcccaaaatgagtagagaattaaagccacccaaaacagcttctgctactaaaatgttctcatcctttctcctccctctccttttcctgccacaaaaggtgaaaaatgagatccaatcctctcaccaaaatttcaaacctaggacactggaatgactgcagggatcagtggttctcccatatcaccatcaattaagacatataggacactgtcttccttcaagagggttacaatgtggccatcagacaggaaaccaaacggtggataaagtattaagtaactaagtgccaaataaatgctggaaatcttgacctctccttgggattatgggtgtaacaaaaatccctacatctgtttatgaaggccatattcagtacattttaaatggtaaataatctgtttatgtgaagaaaaagaattaagtctttcttccaactctctccttggatagcctagcacagtgcagcctccataaccatgacattcccgcccaagctctcagtgcctaatcctgctttgtcattcacatctcacaaaatcttgacatcttacattccaatacattatcaagcaagcacaagtatgctggtagtagcctctttaaataatatgtatagacaacaacaacgacaaaaaatagactgttttaaagtttcagggaaagttggtggctgatttaaagttgtgcaggaaacatcttctgtgtatgaagcaaatgtcgatgttttgaaaaaagctaggagatgactttgaatgaatgcaaggttagtgagatcctaagctctcaaaatagcatattccctagagctcaagaaagctggtccaggaggttgaaaaagctattttgttgttaaattattttctggcccttcttaatatttaaaaatgtatttccccttgtggctttcaaccacctgctcaaaaaaagagacttgttacatgaaagttttcattaaagagctgaaaacaagaatttagagagccattcctagaaaatgtcctactgccctgcatttgacaaacaagcatcctttactaacaagagcaggaattcagaggcacaagaaaaagcattggcatgagccaaagagtctgtcttaatgttacttttgaaaatctgctgagcggccaccatatgcaggctgagagctgggcacaggcgaagccattggaagcacttcaggaacaagcacacagctgtgggacttgaacatgcaagtgttcaggttgtgtcaagaagcttttctttccttctatgatggaatctgttcttttctatcctacttttttctctcttcctctcctcaccacattataccctgctcttacgcagtaaacgttttaatggcccgtttatgtctcatgcctccaaacaacactgaatttgaaaccccccattttttcttttcaccaccctgttgagcaattttcccaaaaaaagggcagcaattattaaattgaattcaattctagattttactaagttttattttgtcaggttttttaaattttttcagtgagcgtggtgactgcagaggttagtgctgtgaaaagctgggctaaatattctttctgtaaagtcaaacaggattccatcccctgtgaaataacacaaaatttcactctctaaaagcaacagcatgtaaactagaatgaaagaaggaaattatgtacgtatgcctaatattctttgtgaatgtctttcatttaactaaaattatattagaaaccagattgataaataaaaaattcaaagtagttttaattatccta

SEQ ID NO: 2389 - protein, 538 aa, Homosapiens
MGNYWNAASFPNPSSYLHFSTFQGETSADISFYFKTLTPWGVFLENMGKEDFIKLELKSATEVSFSFDVGNGPVEIVVRSPTPLNDDQWHRVTAERNVKQASLQVDRLPQQIRKAPTEGHTRLELYSQLFVGGAGGQQGFLGCIRSLRMNGVTLDLEERAKVTSGFISGCSGHCTSYGTNCENGGKCLERYHGYSCDCSNTAYDGTFCNKDVGAFFEEGMWLRYNFQAPATNARDSSSRVDNAPDQQNSHPDLAQEEIRFSFSTTKAPCILLYISSFTTDFLAVLVKPTGSLQIRYNLGGTREPYNIDVDHRNMANGQPHSVNITRHEKTIFLKLDHYPSVSYHLPSSSDTLFNSPKSLFLGKVIETGKIDQEIHKYNTPGFTGCLSRVQFNQIAPLKAALRQTNASAHVHIQGELVESNCGASPLTLSPMSSATDPWHLDHLDSASADFPYNPGQGQAIRNGVNRNSAIIGGVIAVVIFTILCTLVFLIRYMFRHKGTYHTNEAKGAESAESADAAIMNNDPNFTETIDESKKEWLI

SEQ ID NO: 2390 - DNA, 2143 bp, Homosapiens
atagggaccgtttccctcatactgttctagtgggagtgaataagtctcacaacgtctgatggtttgataaagggaaacccgtttctcttggctctcattctttctcttgctgccgccatgttcaaggtcccctccaccttccgccatgatggtgaggcctccctagccatgaggaattatcactggaccagaggacaacttgtaaaaggatttcagaatggcataatgggaagaaacacgctaataaaacgatgagacatgaagagaatttaaaaatatacaatgatcagctgtgaagaattggccagacaagccttgattttactcattgggtgtccagtgtccatccagtcctcatataattcaagggaagcgactctcttttctctgcaagggagccagtcctgaactatccaagtcaaccgaggcaatcccatttccttgccgctacttggatgaaacatggggatgtgactcagctacagcgagagaggatgagaggcgtgctgagaacacctttgggaaggccgccgattcctgagaagaacatggcggcagagcagatggcctcaccctgcctctggaaattgcagtgtgtgtctgtgagaactgaaagggtgtggccatcttgaccccaagatgggagccaggctcaggacacgcagtgatgccggaatggctcccaaatggctcccaaagcatcaggtcagtgggtcaactaattcctgagatctgttccaccctgacacttccatcatataggaaactgaatttccttgctttttgaatcagtttgagtcagatcagaatttttagtaagaactaaagattaaaccttccttaaatgtatattttaaatttcctcttaaaaattatgacaattgtgatctttcaaagcacagaagaggaggaattctctcctccatttgtctaggggcgaggaagtaaatcgcacggcagagactgctagctgttcaatgaaagcgcaagcactcaatgaaaccattgtatttcctgcttgaacagaccaatgaataagtgatcaaggaccattctaaactgcagtcttccagttctataaacattattattcggatccaaaaaactattagctagagcctattgatcctctagctccctccttttcagagcaccagcatacaaatcgtctcatttgatttccttctagaagcacaagctgggcgtggaagactgtacagatgtagcaggaaggtatgaatggccaacggcacaagatgaaactgaaagtgacattcctgttttaatacttgctctttgaccaagcctttaagattaatgaatctcggccgggtgcggtggctcacgcctgtaatcccagcactttcagaggctgaggtgggcagatcacaaggtcaggagatcaatatcatcctggccaatatggtgaaaccccatctctattaaaaatacacacacacacacacacacacacacacacacacacacacacacaaattagccgggtgtggtggtgcgcctgtagtcccagctactcaggagtctgagggaggagaatcgcttgaacccgggaggcggagaaggtggtgagctgagattgcgccactgcactccagcctggcgacagagtgagactctgtctcagaaaaaaaaaaaaaaaagaatctcttagtttttaagtgatgagtggttgggattgccagttttggttttggcgtagactcaagagacaaaaatacaagctggcaggtcctatagtgaaatttggagtgaatcctgtagcagctgatgaggaactatgagacagtggcctgtgttgctggatagaggcatcccactgtccactcgttggtgtatgttctcataaattcacaatcattctttcaaatgtggctcaacaatccgatactaaggagcactacctgaaatcacaaagacagtttctttgtgaatattgcaccttcttcatagctgttggttcttagcactgttgtgtgttcaatctttcattagattatatactccttaagacaggatcaggagttatattttgttgaatatacactatgttgatgtcatatgaaataaaatttaagtgtatatttgtgtaccatatgaggagaaataaacaatattatgtgtg

SEQ ID NO: 2391 - protein, 45 aa, Homosapiens
MFKVPSTFRHDGEASLAMRNYHWTRGQLVKGFQNGIMGRNTLIKR

SEQ ID NO: 2392 - DNA, 511 bp, Homosapiens
tctgcaagatgtcaagattgttgaacaccccagatggaagcccttacacttggtgggttggcaaagccaacgagaagcactactactggggaggctctgggcctggaatccagaaatgtgcctgcggcatcgaacgcaactgcacagatcccaagtactactgtaactgcgacgcggactacaagcaatggaggaaggatgctggtttcttatcatacaaagatcacctgccagtgagccaagtggtggttggagatactgaccgtcaaggctcagaagccaaattgagcgtaggtcctctgcgctgccaaggagacagtaagtttgcatagcagctatggcttgcactttcttatcccatttaaatattgtttccaggctcctcagaagatgcctgcaatcagacttgctctcctgtagctcctacagaaacatcacacaacccaagcagagataacttagaggaggggaacagccataaagcctccagtacaggagccgagatttgggc

SEQ ID NO: 2393 - protein, 107 aa, Homosapiens
MSRLLNTPDGSPYTWWVGKANEKHYYWGGSGPGIQKCACGIERNCTDPKYYCNCDADYKQWRKDAGFLSYKDHLPVSQVVVGDTDRQGSEAKLSVGPLRCQGDSKFA

SEQ ID NO: 2394 - DNA, 792 bp, Homosapiens
gccagagatgtcttgtggggctcccaagtactctaacctcaaggtgcatgccctccactcactaattggctcctctggctgtgatcgagctccaaaaggagggcatgtggcaaagcatggcagggaattctttcaaaagtggaatccaggaagaaaattccttgggaaactttggactggattctcaacaaacccttcagagagacttaaagccggtaaaagaccttttgcaaaagtgatccggggggcctccactttgtttctctggatatttctctgttgaaatataggtgtcaagcacgtcccattttagatgctcttcagacttcaaaacattaccttcctgctttcagggagccatttcatcagcttttgtactgtgtattcactgcagaccctgctgttatgcaaggtaccaccatggctaaaaattcacaagacgattcttagttgcactgattttttttttatttgatctttcacaatgttgctgcttccgtttcaaaaacgtctcaaagctttgatttgattgcagctggattcaaggatacccaaagccaagtttgatcctgaattccccaaatcaaaagtatttcatttcagatgtatgttctatacctggccataataatgaacagcaaccattactggagcatgcttttgatttttttttcattaacagtcatttttatgatttggaaacataattagaagattcctattccagactacaaatcaatggatttgattctactacacatttgccaataaagagcaatggtatcaaatgaa

SEQ ID NO: 2395 - protein, 91 aa, Homosapiens
MSCGAPKYSNLKVHALHSLIGSSGCDRAPKGGHVAKHGREFFQKWNPGRKFLGKLWTGFSTNPSERLKAGKRPFAKVIRGASTLFLWIFLC

SEQ ID NO: 2396 - DNA, 1116 bp, Homosapiens
ctaacctcaaggtgcatgccctccactcactaattggctcctctggctgtgatcgagctccaaaagggaaggaggctaattcaaatgggatggccccaaaataagaggaatagtgtgcatttaaaccaggatatgggctatacctgcttacagtaccctttatgcaatctccagttcattaactctagtagatattgtgaagatactatcaaaaaaaggttatgttcccccaaattagggaagccctaagggattccgtatctcctttttgtacagagtttgttagaaaatcagatactggtctgagaaaaatgctgattcagatggtcaagagactaaaaaaaagtactttaaaacatcagaatgaaatcactgaaggcaatccttagctttatgatgtgctgtactcctggacaagatggtgagggcatgtggcaaagcatggcagggaattctttcaaaagtggaatccaggaagaaaattccttgggaaactttggactggattctcaacaaacccttcagagagacttaaagccggtaaaagaccttttgcaaaagtgatccggggggcctccactttgtttctctggatatttctctgttgaaatataggtgtcaagcacgtcccattttagatgctcttcagacttcaaaacattaccttcctgctttcagggagccatttcatcagcttttgtactgtgtattcactgcagaccctgctgttatgcaaggtaccaccatggctaaaaattcacaagacgattcttagttgcactgattttttttttatttgatctttcacaatgttgctgcttccgtttcaaaaacgtctcaaagctttgatttgattgcagctggattcaaggatacccaaagccaagtttgatcctgaattccccaaatcaaaagtatttcatttcagatgtatgttctatacctggccataataatgaacagcaaccattactggagcatgcttttgatttttttttcattaacagtcatttttatgatttggaaacataattagaagattcctattccagactacaaatcaatggatttgattctactacacatttgccaataaagagcaatggtatcaaatga

SEQ ID NO: 2397 - protein, 66 aa, Homosapiens
MKSLKAILSFMMCCTPGQDGEGMWQSMAGNSFKSGIQEENSLGNFGLDSQQTLQRDLKPVKDLLQK

SEQ ID NO: 2398 - DNA, 735 bp, Homosapiens
catgtgaggacactgctggaaggcaccatctatgaagcagagagtcggccctcatcagacaccaaatctactgctacctctgtctcgggcttcccagcctccagaactggaattattggaatgccgcctctttcccaaacccatcctcctacctgcacttctctactttccaaggggaaactagcgctgacatttctttctacttcaaaacattaaccccctggggagtgtttcttgaaaatatgggaaaggaagatttcatcaagctggagctgaagtctgccacagaagtgtccttttcatttgatgtgggaaatgggccagtagagattgtagtgaggtcaccaacccctctcaacgatgaccagtggcaccgggtcactgcagagaggaatgtcaagcaggccagcctacaggtggaccggctaccgcagcagatccgcaaggccccaacagaaggccacacccgcctggagctctacagccagttatttgtgggtggtgctgggggccagcagggcttcctgggctgcatccgctccttgaggatgaatggggtgacacttgacctggaggaaagagcaaaggtcacatctgggttcatatccggatgctcgggccattgcaccagctatggaacaaactgtgaaaatggaggcaaatgcctagagagataccacggttactcctgcgattgctctaatactgcatatgatggaacattttgcaacaaag

SEQ ID NO: 2399 - protein, 163 aa, Homosapiens
MGKEDFIKLELKSATEVSFSFDVGNGPVEIVVRSPTPLNDDQWHRVTAERNVKQASLQVDRLPQQIRKAPTEGHTRLELYSQLFVGGAGGQQGFLGCIRSLRMNGVTLDLEERAKVTSGFISGCSGHCTSYGTNCENGGKCLERYHGYSCDCSNTAYDGTFCN

SEQ ID NO: 2400 - DNA, 3160 bp, Homosapiens
gtggtgcggggtttgatcccgagagcggtggactcaaagctgcccgccgggactcgggctgccggccgacaaaggacggtcctcgggggttctgaagtctgacccggccagtgggaaagccacctgcatcacaaagcgaggggcacacctgaaccggggctggcgggaagagaaacagggaaaattgaccaagagattcacaaatacaacaccccaggattcactggttgcctctccagagtccagttcaaccagatcgcccctctcaaggccgccttgaggcagacaaacgcctcggctcacgtccacatccagggcgagctggtggagtccaactgcggggcctcgccgctgaccctctcccccatgtcgtccgccaccgacccctggcacctggatcacctggattcagccagtgcggattttccatataatccaggacaaggccaagctataagaaatggagtcaacagaaactcggctatcattggaggcgtcattgctgtggtgattttcaccatcctgtgcaccctggtcttcctgatccggtacatgttccgccacaagggcacctaccataccaacgaagcaaagggggcggagtcggcagagagcgcggacgccgccatcatgaacaacgaccccaacttcacagagaccattgatgaaagcaaaaaggaatggctcatttgaggggtggctacttggctatgggatagggaggagggaattactagggaggagagaaagggacaaaagcaccctgcttcatactcttgagcacatccttaaaatatcagcacaagttgggggaggcaggcaatggaatataatggaatattcttgagactgatcacaaaaaaaaaaacctttttaatatttctttatagctgagttttcccttctgtatcaaaacaaaataatacaaaaaatgcttttagagtttaagcaatggttgaaatttgtaggtactatctgtcttattttgtgtgtgtttagaggtgttctaaagacccgtggtaacagggcaagttttctacgtttttaagagcccttagaacgtgggtattttttttcttgagaaaagctaatgcacctacagatggcccccaacattctcttccttttgcttctagtcaaccttaatgggctgttacagaaactagttcgtgtttatatactatttcctttgatgtcctataagtcggaaaagaaaggggcaaagagaacctattatttgccagtttttaagcagagctcaatctatgccagctctctggcatctggggttcctgactgataccagcagttgaaggaagagagtgcatggcacctggtgtgtaacgacacaatcagcacaactggagagaggcattaaagaaccagggaaggtagtttgatttttcattgaattctacaagctaatattgttccacgtatgtagtcttagaccaatagctgtaactatcagctgcaataccatggtgaccagctgttacaaaagattttttcctgttttatctgaaacatactggatttatatatgtataagcgcctcaatggggaattagagccagatgttatgatttgtttgctctttttcttttatagtttagttatagcaaaaatatggataatttctagtgaatgcataaattaggttgcgtttcttattttgctttaaatctctggtagtttttccacccctgtgacacaatcctaatagacagtgtcctgtaaatggacacaacacaataaagtcaagttattattgctgttactctggatgatatggaaaacactgccatattttaaatcaactactccacgtgtttttccatccaatcacactgctgtgattcagggatctttcttctaagacggacacatttgaacctcaggttcatcacaaacctggtacctgttgcttcccagaggatggagaagtgtagttaatcacacctcttagtttaatctgaaatcttgacccagttatttaacaaataaatacctcattgattatatttaaaagtaatacacttcctgtaaacaaatggggacaatgcatccaaaaaatctttttaaacagattacacaaaaattatttccagaaaggctaccatttatcatcattatatttcaagcctcttatacttaataagcactttctaaaaagtcttgagatcccaccattctgaggaattcaatatgatcactttttccttctttgcctgggagaggttaagaggaggtttcgaaggtatagatgctattgttctgatggcccggctgaataaaatggaaattctagtttgttagaattatgcattctttttcaagattctcagtgtgcctaacttattggagcacatcagtttcttgggtaatggaaaacattacctagagttgccagtggcacattacaccagtacagagcacattccaaaggagacattggaccagttaattcccatacaagtcaaggtaacagaacaaaagggaatcctgatgcccttttaccattgctggttgagctcaggcactgtcatggacacccttaattttaaaaggttttaatcattcttctataaaatacatttaaaatggaaaaatacttaatatcactaaatatcagaacaatgtaacatttacaaatgacatattgaaagcaaaggctgttttatttagccaagatgattaccattaggagttactttatgtattgttgaaagcaaattttaaacatgatgttttagaagtgtttctgatttttaaacctggtttacaggtattacttctgcacttaccaaataatgccagatggaaatttattatttcttgcaattcccatgatagctctgttctttatgcattgtctcaacactttcccttttttcccaaaatgagtagagaattaaagccacccaaaacagcttctgctactaaaatgttctcatcctttctcctccctctccttttcctgccacaaaaggtgaaaaatgagatccaatcctctcaccaaaatttcaaacctaggacactggaatgactgcagggatcagtggttctcccatatcaccatcaattaagacatataggacactgtcttccttcaagagggttacaatgtggccatcagacaggaaaccaaacggtggat

SEQ ID NO: 2401 - protein, 108 aa, Homosapiens
MSSATDPWHLDHLDSASADFPYNPGQGQAIRNGVNRNSAIIGGVIAVVIFTILCTLVFLIRYMFRHKGTYHTNEAKGAESAESADAAIMNNDPNFTETIDESKKEWLI

SEQ ID NO: 2402 - DNA, 2819 bp, Homosapiens
cttcagcatgaccattctatcaactgtattaaatgctctgattgttcaatgaggtctcttcagtgtggttgttggactataaacatctcccagccctccgtgagctctggttttttgcctggcctgtggacttttattctgtacatgcacatgcgtcattgctgtggtgattttcaccatcctgtgcaccctggtcttcctgatccggtacatgttccgccacaagggcacctaccataccaacgaagcaaagggggcggagtcggcagagagcgcggacgccgccatcatgaacaacgaccccaacttcacagagaccattgatgaaagcaaaaaggaatggctcatttgaggggtggctacttggctatgggatagggaggagggaattactagggaggagagaaagggacaaaagcaccctgcttcatactcttgagcacatccttaaaatatcagcacaagttgggggaggcaggcaatggaatataatggaatattcttgagactgatcacaaaaaaaaaaacctttttaatatttctttatagctgagttttcccttctgtatcaaaacaaaataatacaaaaaatgcttttagagtttaagcaatggttgaaatttgtaggtactatctgtcttattttgtgtgtgtttagaggtgttctaaagacccgtggtaacagggcaagttttctacgtttttaagagcccttagaacgtgggtattttttttcttgagaaaagctaatgcacctacagatggcccccaacattctcttccttttgcttctagtcaaccttaatgggctgttacagaaactagttcgtgtttatatactatttcctttgatgtcctataagtcggaaaagaaaggggcaaagagaacctattatttgccagtttttaagcagagctcaatctatgccagctctctggcatctggggttcctgactgataccagcagttgaaggaagagagtgcatggcacctggtgtgtaacgacacaatcagcacaactggagagaggcattaaagaaccagggaaggtagtttgatttttcattgaattctacaagctaatattgttccacgtatgtagtcttagaccaatagctgtaactatcagctgcaataccatggtgaccagctgttacaaaagattttttcctgttttatctgaaacatactggatttatatatgtataagcgcctcaatggggaattagagccagatgttatgatttgtttgctctttttcttttatagtttagttatagcaaaaatatggataatttctagtgaatgcataaattaggttgcgtttcttattttgctttaaatctctggtagtttttccacccctgtgacacaatcctaatagacagtgtcctgtaaatggacacaacacaataaagtcaagttattattgctgttactctggatgatatggaaaacactgccatattttaaatcaactactccacgtgtttttccatccaatcacactgctgtgattcagggatctttcttctaagacggacacatttgaacctcaggttcatcacaaacctggtacctgttgcttcccagaggatggagaagtgtagttaatcacacctcttagtttaatctgaaatcttgacccagttatttaacaaataaatacctcattgattatatttaaaagtaatacacttcctgtaaacaaatggggacaatgcatccaaaaaatctttttaaacagattacacaaaaattatttccagaaaggctaccatttatcatcattatatttcaagcctcttatacttaataagcactttctaaaaagtcttgagatcccaccattctgaggaattcaatatgatcactttttccttctttgcctgggagaggttaagaggaggtttcgaaggtatagatgctattgttctgatggcccggctgaataaaatggaaattctagtttgttagaattatgcattctttttcaagattctcagtgtgcctaacttattggagcacatcagtttcttgggtaatggaaaacattacctagagttgccagtggcacattacaccagtacagagcacattccaaaggagacattggaccagttaattcccatacaagtcaaggtaacagaacaaaagggaatcctgatgcccttttaccattgctggttgagctcaggcactgtcatggacacccttaattttaaaaggttttaatcattcttctataaaatacatttaaaatggaaaaatacttaatatcactaaatatcagaacaatgtaacatttacaaatgacatattgaaagcaaaggctgttttatttagccaagatgattaccattaggagttactttatgtattgttgaaagcaaattttaaacatgatgttttagaagtgtttctgatttttaaacctggtttacaggtattacttctgcacttaccaaataatgccagatggaaatttattatttcttgcaattcccatgatagctctgttctttatgcattgtctcaacactttcccttttttcccaaaatgagtagagaattaaagccacccaaaacagcttctgctactaaaatgttctcatcctttctcctccctctccttttcctgccacaaaaggtgaaaaatgagatccaatcctctcaccaaaatttcaaacctaggacactggaatgactgcagggatcagtggttctcccatatcaccatcaattaagacatataggacactgtcttccttcaagagggttacaatgtggccatcagacaggaaaccaaacggtggat

SEQ ID NO: 2403 - protein, 91 aa, Homosapiens
MRSLQCGCWTINISQPSVSSGFLPGLWTFILYMHMRHCCGDFHHPVHPGLPDPVHVPPQGHLPYQRSKGGGVGRERGRRHHEQRPQLHRDH

SEQ ID NO: 2404 - DNA, 2234 bp, Homosapiens
attccaatacattatcaagcaagcacaagtatgctggtagtagcctctttaaataatatgtatagacaacaacaacgacaaaaaatagactgttttaaagtttcagggaaagttggtggctgatttaaagttgtgcaggaaacatcttctgtgtatgaagcaaatgtcgatgttttgaaaaaagctaggagatgactttgaatgaatgcaaggttagtgagatcctaagctctcaaaatagcatattccctagagctcaagaaagctggtccaggaggttgaaaaagctattttgttgttaaattattttctggcccttcttaatatttaaaaatgtatttccccttgtggctttcaaccacctgctcaaaaaaagagacttgttacatgaaagttttcattaaagagctgaaaacaagaatttagagagccattcctagaaaatgtcctactgccctgcatttgacaaacaagcatcctttactaacaagagcaggaattcagaggcacaagaaaaagcattggcatgagccaaagagtctgtcttaatgttacttttgaaaatctgctgagcggccaccatatgcaggctgagagctgggcacaggcgaagccattggaagcacttcaggaacaagcacacagctgtgggacttgaacatgcaagtgttcaggttgtgtcaagaagcttttctttccttctatgatggaatctgttcttttctatcctacttttttctctcttcctctcctcctcctcccacattgaggcgattctcctgcctcagcctcccaagtagctgggattacaggcacccgccatcacacccagctaatttttttttttttttgtattattagtagaagccaggtttcaccatgttggccagggtggtctcgaactcctgacctcaagtgatccgtccacctcggccttgcaaattgctgggattacaggtgtgagccaccgtgccgagccagccccattttttaaatgatgttttggttaagagtggaccatgagaattagctgacagcatcccctttctctctccctgccttggtgggaccctccctgtgtgaccttggtcaagtcctcgaacttttgtcccgtatttaagatggagctgttttacctacttcataagacagttgcgaggtgccattgattcttgactgcaaaataccttgaaacccttatataaagactgaagtcaacggagcctagtgaaagacttactttgtggcttgtggttgaaagtcacatcaaaagacaaatgtggccacgttcaggaattggagacttactggcatggctctacagctgctcagttattaatcatgcagactaacctgtcaacactgggagatgcaacatagcaaaaggacagagaaattagaattttttgtgcagaaagccctaaattcccacctgaatgtaacttacagctcccttacctactctcacacatgccctcaaacatgctagattggcttatacataggccaacacaaaatacaaacgtgacgtgttcatgtagcctagtggctatatgcctattctccatgtaccctgcatggtagtgctgcaaactttaaagtacatttctttcacagcagtattttttttcataagtggcatataaatgtcattcaatgaaatggggaaatcacgttgagaagttggtctgtcatctcccattgagcaaagactggcaggagataataaaaataaatatgggcacacatgtattaatatacagcacgcatttacaagtttattttccagataaaattgtgctataagaacagctctaccaagacagtctgcaccatttccaagtctcagttaatttacagcaactgctgctttcggagatggctgtgaaaatatggaagttcctctcaagtaggccaagaaacagttctagattttactaagttttattttgtcaggttttttaaattttttcagtgagcgtggtgactgcagaggttagtgctgtgaaaagctgggctaaatattctttctgtaaagtcaaacaggattccatcccctgtgaaataacacaaaatttcactctctaaaagcaacagcatgtaaactagaatgaaagaaggaaattatgtacgtatgcctaatattctttgtgaatgtctttcatttaactaaaattatattagaaaccagattgataaataaaaaattcaaagtagttttaattatcctaaaa

SEQ ID NO: 2405 - protein, 66 aa, Homosapiens
MQVFRLCQEAFLSFYDGICSFLSYFFLSSSPPPPTLRRFSCLSLPSSWDYRHPPSHPANFFFFLYY

SEQ ID NO: 2406 - DNA, 525 bp, Homosapiens; identical to SEQ ID NO: 281

SEQ ID NO: 2407 - protein, 174 aa, Homosapiens; identical to SEQ ID NO: 282

SEQ ID NO: 2408 - DNA, 2011 bp, Homosapiens
caggaagcaagagagagagacagaggggaggtaacaggctccttttagccatcagctctcatgggaattgacagaacgagaattcactcacccccacccacctcctggaggggattaatctattcatgagggatccacccccatgacccaaacacctcccattaggcctcacctccaacactggagatcagactccaacattagatttggaagggacaagcatccaagctgtagcatggttccaggttggaaatcattttcccttcaacattcgaaggcagtgcactcagtgttgctgttgagaaatctgaagccgtgcagattcccatctccgggttgtatctgtttgctcgggatgccataacaaaggaccacagactggggggtttaaacagcagaagtttactttctcacagtactggaggctggaagtctgaggtcaaggtgctggcggtgtcggtttctcctgagccctctctcttttgccggggctgttctgcttgctggattggaaatgattttagcccctcatgccaggaagaaaacataggcagatttctcaccagctaaaaaggaaggaaaaattgtgaagtgaaattttctactggctgtggtttatccatgttaaattgtaaagcatataacacagatggaatccggcacatgcaaaacactcacaaaacctagttactactactgctggcgctgcggctacacgactacaactactactacagccactactctcctcctactgctactgctgctgctgctagtgtttcgtaaagtggagctacagaaatcaacattttttttcttagctgcacagtgaattcgttttttggactccagtattcttcctgaaggtctgtttcatcctagtatgactctcacttttttttcaaaattttattttattttatttttgaaatggagcctcactctgttgcccaggctggagtgcagtggcgtgatctcggctcactacaacctccgcctctgggttcaagagattctcctgcctcggcctactgagtagctgggattacaggcacgcgccaccacgcccagctaatttttgtattttcagaagagatggggtttcaccatgttggccaggagggtctcaatctcctgacctcatgatccgcctgcctcggcttcccaaagtgctgggattgcaggcgtgagccaccatgcctctacattttaattttttaaaacttaccatctttatcatttttaagtgtacagttaagtggtaataaatacatatgtatctcctatctcatttccttattttcatcccccatcccatttctggactctggctaatagcagtctactcggtatcatcacgagatccacgtttttagtttccacatatgaatgagaacatgcgatatttgtctttctgtgcttggcttatttcacttaacataatggcctctggttccatccatgctgctgcaagtgacaggatttcactctttttatagctgaataatattccattgtgtaaatataacacatttcctttattcatctgttgatgggtacttacgttgattctatattttgaatagtgctgcagtaaacatgggagggagatatctctttaatatactgatttcctttcttttgagtatatacccagcagtgaaattgctagaccaaatggtagttctatttttagtttttttgcagaacctccatactgttctaatttacattcccaccaacagcgtatgaggattcccctttctccacatcttcgccagatctgttatcgcctgcctttatttacttatttttatttttaattcttgtgggtacgtagtaggtatatatgggatacattagctgttttgatatagacatgcaatctgtaataatcatatcatggaaaatggggtatccgtcccctcaagcatttattctttgtgttaccaacaattcaattatactctttcagttattttgaaatgtataattaaattattattgatgt

SEQ ID NO: 2409 - protein, 73 aa, Homosapiens
MTQTPPIRPHLQHWRSDSNIRFGRDKHPSCSMVPGWKSFSLQHSKAVHSVLLLRNLKPCRFPSPGCICLLGMP

SEQ ID NO: 2410 - DNA, 281 bp, Homosapiens
tccagggaactgacttcttcctcctcatggtccacttgaaattccaggaaaaggaacagatgtgcaaggaattgcagcctggagaaacatagtgtatttggagacttgcatgtaaatggataaaatgtcaatcaaccttcatgttgtgtctacgctcaatcatccctgatgaccctacgctgactacagatgcagaattcagcaaaaaccaatgaaagcattcggtgagaatcaatggctatatggagcttacaataaaccgtattgtgtattttattatt

SEQ ID NO: 2411 - DNA, 399 bp, Homosapiens; identical to SEQ ID NO: 710

SEQ ID NO: 2412 - protein, 132 aa, Homosapiens; identical to SEQ ID NO: 711

SEQ ID NO: 2413 - DNA, 717 bp, Homosapiens
gtgagatttccgcacgttgtagctgagaggccggctgctgagacgaccccttagggaaaagtggaaaactctgcctccagaatggagatctggctttctcttcccctgctcaacctgagctcagggattctgtgcccctcgctctccggacagtttttacaccagattatcttctaattgctgtgaatgcagccgcatcagcaagtccccatctggggacattatcaatttcaaaccttggtcagtcatgaagccccattgaaggacttcatcctgaaatccacgaacaaagaacgagatcccgcaatgctgtcatctaaaatgcctgaaaatgccagtgctgcgacagatggccctgctcggtaaaaagcctaattatttggtattgtatgctacaaaagagaaatgccataattcccagtgggggctgtggatactggacccccataaccaggtgccagagatcacgtggtgttcaaagtccaaattataagcatagtgccgaggactctgaggatgacttctgcacatcttccgaaaagggatggaacagcagaatgagtgccatcatggcttggatggttggaggtgctttgggcatgaagaccctctaactgtgaagttagaggcttccaatgttagctctgttttaagtatatgcacaaagtcacagtctcatagctgagctattaaaaataaaatcaacaccaagatata

SEQ ID NO: 2414 - protein, 53 aa, Homosapiens
MPVLRQMALLGKKPNYLVLYATKEKCHNSQWGLWILDPHNQVPEITWCSKSKL

SEQ ID NO: 2415 - DNA, 1353 bp, Homosapiens
gagctgcaggcaacgtgatctgaattacatggaggacaagctccagctgactttccgtaaactcgcattaggattctaataggagacgacaggagcaggtggggataatgagctggcggaaggggctgcctatcacactgctcggtggcccctctttcacccccactttgcctcaggcattttctactcagctgtgaccttacttatggtgatgccaatccagtggtcaggagcgaggcgcccagcctgtgtctgaatcctcctactgaccctggggatccgtgcgacttgatcttagatattggtggtgaagcgccgctctccttgacagcatccaggaaaggtaattacctttgccaaaatgcaagtggaagttcaaagcctcagccttgaagagtgtccctggagacttccaggcccccaatgtgaatgtgaagccctcctgcccagtggggcaaggcgccggattgaccttcgcctgagtgggagggcagtcgctgtttgggtccacgttaggggcggtccaggtcaatttaacttgtcatatgccacgggaagacataagaagccaaacccacaccaaaacatgaaccgggggatggaatttattgctcctgtatcagctcccaccaaatctggtgccccgtggcattttctttctcaaggtcccacggatgcccagagagcagtcagaatcaggccaggcaccaggatgggcttgtcctcagatccagttgtcggcaccttgtcttccagttacctagatctgctaactctctcttacaagcctgggaggacagtgacaagttcatacctaaacgtacgtgggcatgaagtaagaaagctccagaattctgttgaggccacaaggatttccagaactgacagcagttaagaattttgcagaatctaagagtcacatctctaaatttgtgtagattgtgaaatctcttcttgcaagaaaaaagagaaatagctgaagttctggaaataacagttgatgaaaacttggtaatctgaagtctgaactttgaacaccagcagacaggctgagaattctctttgatcatgagcccaagttccacgtgtacctgcaggaatctgtgtggcatttgtgcactggtgtggggcccaggagaggaccacggagtgacaagccaccaggttctaaagggagacgaagatccccagaggacctggatagagatgtttccctgaccattgtctgctgtgtgctcccgatgatgagactctagagtttacaactgaaacacactgtcatttatgatattatttgtaatatctggtatgtctaagtaaaacatgcattcagtaaaactcgcgatgaaactt

SEQ ID NO: 2416 - protein, 177 aa, Homosapiens; identical to SEQ ID NO: 284

SEQ ID NO: 2417 - DNA, 306 bp, Homosapiens; identical to SEQ ID NO: 712

SEQ ID NO: 2418 - protein, 101 aa, Homosapiens; identical to SEQ ID NO: 713

SEQ ID NO: 2419 - DNA, 5654 bp, Homosapiens
agtccccgcttacctgaggggtggagccggcagcctgcggagccactggccaagctgggaagtccggcgcaactccgcaccgcagagccggcgcctcctcggcaggcagaaggttatgtaattggaagctgcatcaaacacatcccgattgcaggtagagatattacgtatttcattcaacagctgctaagggagagggaggtgggaatccctcctgagcagtcactggagaccgcaaaagccattaaggagaaatactgttacatttgccccgatatagtcaaggaatttgccaagtatgatgtggatccccagaagtggatcaaacagtacacgggtatcaatgcgatcaaccagaagaagtttgttatagacgttggttacgaaagattcctgggacctgaaatattctttcacccggagtttgccaacccagactctatggagtccatctcagatgttgttgatgaagtaatacagaactgccccatcgatgtgcggcgtccgctgtataagatggaacaaattccactgagctatcctcaaggtcacggattccatcctctgtcacctccatttcattgagatgatatattgagcccatgcgtagccttttatttgaggtattctcatgattttcatttttaattctaggctctacttttgctgaaattttctatttttttcatttgtttcaagagaacccataattgcttattgaagcatttttatgacaattattctaaaattctttgcaggtaatcccagcacctgagtcatctttatgttggagtctcaatcgactcttcattcatttgtgatttttctggttcttgctatgataagtggttttttattgtattctggacattttgataagattgtgaatcctatttactttttttttttttgagacggagtctagctctatctccaggctggagtgcagtggtgcgatctcagctcactgcaacctctgcctcctgggttcaatcgattctcctgccacagcctcctgagtagctgggattgcaaacatgcgccaccacacccagctcatttttgtatttttagtagagatggggtttcaccatgttggccaggatgttctcgatctcctgatctcgtgatctgcccacctcggcctcccaaagtgttgggattacaggtgcgagccaccgcacccggcctactcttttttttttttaatagccagcttctctgttgagatgtagcaccagggctgtgtatctgttcagtctcctttgggcccagggccagtacgggagggaagggagagcagaacgcggaccactctaccttgagttgcctcattctgtatcatcgatgcctggtggaagtgggcttactctgcatcctgctgacaccgcagagaaactggagcccatggcctgcttccctgggacaggagctagggtggaaaatcagcttccagcttggccctgctgaaaccctggcaggggcaggttccattgtagtttggctggaatcgagcaggtattgccaacagcatcgtctattgttggagtacctttgccccagatcctgagatggggtaatttttaaagaaaagaggttcaattggctcacaagcctgaaggctgtaccagcatggtgcccagcttctggggagggctcagggagctttgactcacagaggaaggtgaagtgggagcaggcacttcacatggcaaaagcaagaacaaaagagtgggaggcagttgccacacacttctacatgaccagatctcttgtgaactcagagctcactcatcacccaagagatggcccacgccatccatgaggaatgcactcccatgatataaacacccccaccaggccccgcctccaagagtggagattacagttcaacacgagatttggtgggggcatatcaaaactacattaaccttaaattatgaagacggtaaactaaataatctgctttctttcctttcctgttttgtgtctgtttttcagatttccaaggccagcaatgttctcttcctctcccttttctttgtataaaaattcattctcaagaaaaactctcatatcaattgtttacatgtcactatggctaagacactaaaagccctctccctgcaaaactggtggcaaagctctctagagaaccacaaactgttgcatccttactacgtggggcagcagcaagcccaggtgaagatgtgcatgttcttggagaaagtattaataacataccgacacttacatctgggtgaataatttcatcaaatctcttaactcacgcttgcacaaacttcacctggagagagagagggaaagctgtgccagaaataaatggttattgaggtcactgtttgtttgtttttctcaggagtggaaggagattaaccagggtggcaataaacaaaattacttgctgttttaaaacttaatgacaaccctataggttattagcaatgccaaagttgcagggtgcggtggctcacgcctgtaatcccagcactttgggaggccgaggcgggcagatcatctgaggtcgggagttcgagaccagcctgaccaacatggagaaaccccgtctttactaaaaatacaaaaaaaattaaccgggtgtggtggtgcatacctgtaaccccagctactcaagaagtggaggcgggagaattgcttgaacacaggaggcggaggttgcgatgagccgagatcacgccattgtactccagcctgggcagcaagagtgaaactcagtctcaaaaaatacaaaacaaaacaaaacaaaaagccaaagtggaaaagcaaaaattttgtggtatttgcattcaattattatgctttaattcaaccattcacaatttctagggaacattaactttattgcaatcccaggtaaatttaggataatttaacaataatcgttggtgttctactcatctacttgtctttaaaatccacatatattttttaaaagatgacatcctttaaaaatattatattcagtgaattttcaatattattttaaatattatcatggacagttgttattggaaatgacagttcaccattgcaaatcaatgcagtggctacaagtcccccgtgtcacacaaaaatagacggggtagctctgacagcatgcatccttatgccctgttctattaatgatgcactgcaccccatcagggtctgcagctgtatcattactcacagagacggttctgcctttggctttccctggtcctccatggctaggaacatcatttaacagggttttgtagaattcactgggtggttagtcttagaaaacccaaggcagaaacacacagccaactatcccccaagtgcttgtgcttgaactttcagaacataagaaaattgtgttaagctggatctgcaagtacaaatggagagtgaaatgggttctatagaatccaaatgacacaatctttcctcctgctaagaattactggctattgaaccaattcctgcctattaactgtgaggtgaagtccaagatccacagtcaagcattcaaagatccaacctgatttttctctgcataactgttttactaggagtaagactgacttgcctggtttaccaagacaggctgtgagaattcttcccacttacctttactgagtcaatgtggacagtttgaaataacttgaaccattcttcttacatttttaaatcctacacaagcctcaaaacaaaatccaagtcacttttcctctgtgggatcttcactgagccccccagcaggcattcctcttgctatctcctgtgcgaatagctctgaaggtctgtattgcaaatatgacagtcaacacaccggctaaggtagaacaaaaagtggcattattaagctgaaaaaagcccggaccaaaatgaaagattcttattgtgggagcaattgctcacactcaccaatagctgcttgtttccttcttgggcacacagaaattacaattcccaactttcctgcagttggatagagccatgtgagtaattccagcctggggactctgactagagatgaaaatcccctccatggtggagcaaaatcccctgagtggccctccggccttctgttctccagctgtgctaacctggaagccacacattgagatgacagagcagcaaagtggagacaggccatgtctctgagtcaccatgtgacccacaggagattttgagtaaattaaaatacaaatctttgtcataataaaccacagatatttcagcaatgatttgcaaccatagcgtaagataacctatcatggctaatgctcctaggttctcaacctgtatccaccagtaactaggtagcttgggcaaattatcttctatgcaacctctggttgataatgaattccttttataagtaagagaatgagctggaacccaaatgtgtacagaggaaatctgaatgaagtgggaagggtaagatgcagagtgagtggagacttcactcattgttgaaagagggcagttgctactcggttattactgatgcttacatgaagaaatccagttttaatataaccacatcttgccatttctcaagggaagtcatgtactatctgtgtgtctgtccttcatatagctccatcaatattctcctcttaaatcttggagactgtgctggatgttttccaaatgtctctcctgatccagcctgcagtcttctctaccctggtttgggtatctggagccagacctgtatgtactgcatcagcaggttctcttcccttcgctttctgcatggtttccaccaccatgaggtcctggtgggagatcagaggctgggaagagcagaggctgggaagagcagaggcaggagaggcactgcataactcctctcaggccgtcctctctctctggctctctgtaggtttgggcaactgctccttccatccatatattcaggctgaggtgtggaaaaggctcccaaatggcattagctccagagtgatgcaccttccatatccttttattttcattatttctcctcctttgaagaagttgagtatttttgcaagaacattgactaacaggaactaatcaattattcttaaatttaaaaaattgaatgaatcaaatgttcaacaaaggatacacacacagactgaatgacaactaagttattttacagttccacaaacctagagagatctatcaatgaatggggtattacattctaatatttctaagactatattgaatattgaatattcaatattctaagactatattgaatattcaatattctaagactatattgaatattcaatattctaagactatattgaatattcaatattctaagactatattgaatattcaatattctaagactatattgaatattcaatattctaagactatattgaatattcaatattctaagactatattgaatattcaatattctaagactatattgaatattcaatattctaagactatattgaatattcaatattctaagactatactgaatactgaatgactacatcacctacaagaatacaatgagagtactaaactaacactcagtactaaacatttgtcctacactcagaggtaggcaccaggttctggtgtcaatgtatgatatgcctgtctctaaataaacattttatcag

SEQ ID NO: 2420 - protein, 47 aa, Homosapiens
MESISDVVDEVIQNCPIDVRRPLYKMEQIPLSYPQGHGFHPLSPPFH

SEQ ID NO: 2421 - DNA, 1969 bp, Homosapiens
catgccttcagcacacaaaaacttcagaacaaccaaaccacagcctccagctactcctttaaatcctcctcatggaccttgattcaagtgccgcaaaactggccactagaccaagaaatgcccacagcccaggattcttcctaagccgtgtcccacctgtgcgggaccccactggaaatcggactgtccaactaatatcacagccacttctagggcccctggagctctggatcaaagctctctggctgactgcttctcagatctcggctttgcggctgaagactgatgctgcccgatcacctgggaaagccccctggaccatcatggacgccgagcttcgggtaacttttacagtggaggattcatttggattcaaggttggctctcaacagtgccagctgcactgtcatcctaaagtacttctgtggaagagaacatggtggtgtcactgttgtaccagtgatgacacaaaatcccagatctacctgacgggcctgcgagggttgaagattgtgaagcaatagcctaagggactggctggcttcgagcagggcatcggaaccaggcctcctggcactggcctgggtagagccagggcgagcaccagctgacccccagtggaaccctgtgacagtcctgccagggcccaggccatcccaaccgacttccatctcatggaccctccagcggagaagccgggagaggctggcggactgcagatcacaccccagctgctgaagtcacgcacaggcgagttctccctggagtccatcctgctactgaagctgcgtggcttgggactggctgacctgggctgcctgggagagtgcctgggcctggagtggctggacctatcaggcaacgcgctcacccacctgggcccgctggcctccttgcgccagctagctgtgctcaatgtctccaacaatcggctgacgggcctggagccactggccacctgtgagaacttgcagagtctcaatgccgcaggcaacctactggccaccccgggccagctgcagtgtctggctgggctaccgtgcctggagtacctgcggctccgagaccctttggcccggctcagcaacccgctctgtgccaacccctcctactgggctgcagtccgggagctgctgcctggcctgaaagtcatcgacggtgagcgtgtgattgggcgtggtagtgagttctaccagctgtgccgagacctggacagctccttgcgtcccagctccagtccaggccccagagccaccgaggcccagccctgggtggagccaggctactgggagtcctggcccagccggagcagctccatcctggaggaggcctgccggcagttccaggacacactgcaggagtgctgggacctggaccgccaggccagcgacagcctggcccaggcggagcaggtactcagctctgcgggccccacctcttccttcgtcttctgaacgtggcctatggcccaggacagcctggcaggtggcctcgctgcccccagttcccctctctgcccccacactcgtcttagttgcttcacactggtcactggccctgcacactgggctattgctttatccctatcctgagagcagcccctccccaccatccctccacatgctgcaaggacagactgaagggctgtgagcaggtgtaagggctcccacatccgtgagcctgtgtccgcagctgctgccactctgggctgctccagcctgcaacttagtggaaggaattacttcctcctgaggctacaggcgagaaaggtagggatgggccagcctcccgtctcagctgttgggagacagtaggcaggctgagtggcccagagcactcctggaagtgggactcccctgccttgcaaatgtgcctctccagactgctcctgcacttaccccctccccgcagcaccttctctgcccgttcttgtccacacatctattaaatgcttctgttttcatttgca

SEQ ID NO: 2422 - protein, 150 aa, Homosapiens
MDLDSSAAKLATRPRNAHSPGFFLSRVPPVRDPTGNRTVQLISQPLLGPLELWIKALWLTASQISALRLKTDAARSPGKAPWTIMDAELRVTFTVEDSFGFKVGSQQCQLHCHPKVLLWKRTWWCHCCTSDDTKSQIYLTGLRGLKIVKQ

SEQ ID NO: 2423 - DNA, 1123 bp, Homosapiens
caggtaggaggaacgtaccaactgcgaggcggggggtgcgcgcgaagacccccgcaggctgcgcttccggaagtaacccctggcgcatcccggaatccagagcgcccactacggcctttggccaggccccctgggcgcgttccgggagctcaggcctgcggcgctgggagaagcacgctggccaacaagttgggtggtgggcacgcggcccaggggtcaggggccgccaggcggcgggcggcggggctgcggctcttacctgccgaggaggcgccggctctgcggtgcggagttgcgccggacttcccagcttggccagtggctccgcaggctgccggctccacccctcagattcatttggattcaaggttggctctcaacagtgccagctgcactgtcatcctaaagtacttctgtggaagagaacatggtggtgtcactgttgtaccagtgatgacacaaaatcccagatctacctgacgggcctgcgagggttgaagattgtgaagcaatagcctaagttaccgtgatgctgaatcagcgctgcagcagggcaggacgctggctgtgcacaccacatgaagaggccctctcttacggggctcccttgaacccaagaatttggaaacgttaagaattttagttcttgcttcatatatccttccctggacagcacaggatgggtacaggggcactggtcttaaaatttagcgttcccaagtcacgtcttttacgaatacacacgcataccctctgttgtggatggtaggcctagcacagtccagtgaaggacggacctggtgtgtgaagcaagtcccatgccctaggattaggaaaccctcacctaaccgtggtgtcccttggtgtctctgcaccttagtctaattttcaatcttccactagccagagatcaagtcttgatgctatccagttgaaacctagtctcccgtgaaacattttcaaggtcggggggtttcaggaggacactgtggcagaaaagccaagtctctggcaaacatgaggtagttcaataggctgggtcctccatatagttgctcttcgtggttagaaaaacaaccagaagtattcctgctatgcaggcctggagcttctgccgacttat

SEQ ID NO: 2424 - protein, 40 aa, Homosapiens
MVGLAQSSEGRTWCVKQVPCPRIRKPSPNRGVPWCLCTLV

SEQ ID NO: 2425 - DNA, 1959 bp, Homosapiens
aggtaggaggaacgtaccaactgcgaggcggggggtgcgcgcgaagacccccgcaggctgcgcttccggaagtaacccctggcgcatcccggaatccagagcgcccactacggcctttggccaggccccctgggcgcgttccgggagctcaggcctgcggcgctgggagaagcacgctggccaacaagttgggtggtgggcacgcggcccaggggtcaggggccgccaggcggcgggcggcggggctgcggctcttacctgccgaggaggcgccggctctgcggtgcggagttgcgccggacttcccagcttggccagtggctccgcaggctgccggctccacccctcagattcatttggattcaaggttggctctcaacagtgccagctgcactgtcatcctaaagtacttctgtggaagagaacatggtggtgtcactgttgtaccagtgatgacacaaaatcccagatctacctgacgggcctgcgagggttgaagattgtgaagcaatagcctaagggactggctggcttcgagcagggcatcggaaccaggcctcctggcactggcctgggtagagccagggcgagcaccagctgacccccagtggaaccctgtgacagtcctgccagggcccaggccatcccaaccgacttccatctcatggaccctccagcggagaagccgggagaggctggcggactgcagatcacaccccagctgctgaagtcacgcacaggcgagttctccctggagtccatcctgctactgaagctgcgtggcttgggactggctgacctgggctgcctgggagagtgcctgggcctggagtggctggacctatcaggcaacgcgctcacccacctgggcccgctggcctccttgcgccagctagctgtgctcaatgtctccaacaatcggctgacgggcctggagccactggccacctgtgagaacttgcagagtctcaatgccgcaggcaacctactggccaccccgggccagctgcagtgtctggctgggctaccgtgcctggagtacctgcggctccgagaccctttggcccggctcagcaacccgctctgtgccaacccctcctactgggctgcagtccgggagctgctgcctggcctgaaagtcatcgacggtgagcgtgtgattgggcgtggtagtgagttctaccagctgtgccgagacctggacagctccttgcgtcccagctccagtccaggccccagagccaccgaggcccagccctgggtggagccaggctactgggagtcctggcccagccggagcagctccatcctggaggaggcctgccggcagttccaggacacactgcaggagtgctgggacctggaccgccaggccagcgacagcctggcccaggcggagcaggtactcagctctgcgggccccacctcttccttcgtcttctgaacgtggcctatggcccaggacagcctggcaggtggcctcgctgcccccagttcccctctctgcccccacactcgtcttagttgcttcacactggtcactggccctgcacactgggctattgctttatccctatcctgagagcagcccctccccaccatccctccacatgctgcaaggacagactgaagggctgtgagcaggtgtaagggctcccacatccgtgagcctgtgtccgcagctgctgccactctgggctgctccagcctgcaacttagtggaaggaattacttcctcctgaggctacaggcgagaaaggtagggatgggccagcctcccgtctcagctgttgggagacagtaggcaggctgagtggcccagagcactcctggaagtgggactcccctgccttgcaaatgtgcctctccagactgctcctgcacttaccccctccccgcagcaccttctctgcccgttcttgtccacacatctattaaatgcttctgttttcatttgca

SEQ ID NO: 2426 - protein, 259 aa, Homosapiens; identical to SEQ ID NO: 286

SEQ ID NO: 2427 - DNA, 1701 bp, Homosapiens
ccggaatccagagcgcccactacggcctttggccaggccccctgggcgcgttccgggagctcaggcctgcggcgctgggagaagcacgctggccaacaagttgggtggtgggcacgcggcccaggggtcaggggccgccaggcggcgggcggcggggctgcggctcttacctgccgaggaggcgccggctctgcggtgcggagttgcgccggacttcccagcttggccagtggctccgcaggctgccggctccacccctcagggactggctggcttcgagcagggcatcggaaccaggcctcctggcactggcctgggtagagccagggcgagcaccagctgacccccagtggaaccctgtgacagtcctgccagggcccaggccatcccaaccgacttccatctcatggaccctccagcggagaagccgggagaggctggcggactgcagatcacaccccagctgctgaagtcacgcacaggcgagttctccctggagtccatcctgctactgaagctgcgtggcttgggactggctgacctgggctgcctgggagagtgcctgggcctggagtggctggacctatcaggcaacgcgctcacccacctgggcccgctggcctccttgcgccagctagctgtgctcaatgtctccaacaatcggctgacgggcctggagccactggccacctgtgagaacttgcagagtctcaatgccgcaggcaacctactggccaccccgggccagctgcagtgtctggctgggctaccgtgcctggagtacctgcggctccgagaccctttggcccggctcagcaacccgctctgtgccaacccctcctactgggctgcagtccgggagctgctgcctggcctgaaagtcatcgacggtgagcgtgtgattgggcgtggtagtgagttctaccagctgtgccgagacctggacagctccttgcgtcccagctccagtccaggccccagagccaccgaggcccagccctgggtggagccaggctactgggagtcctggcccagccggagcagctccatcctggaggaggcctgccggcagttccaggacacactgcaggagtgctgggacctggaccgccaggccagcgacagcctggcccaggcggagcaggtactcagctctgcgggccccacctcttccttcgtcttctgaacgtggcctatggcccaggacagcctggcaggtggcctcgctgcccccagttcccctctctgcccccacactcgtcttagttgcttcacactggtcactggccctgcacactgggctattgctttatccctatcctgagagcagcccctccccaccatccctccacatgctgcaaggacagactgaagggctgtgagcaggtgtaagggctcccacatccgtgagcctgtgtccgcagctgctgccactctgggctgctccagcctgcaacttagtggaaggaattacttcctcctgaggctacaggcgagaaaggtagggatgggccagcctcccgtctcagctgttgggagacagtaggcaggctgagtggcccagagcactcctggaagtgggactcccctgccttgcaaatgtgcctctccagactgctcctgcacttaccccctccccgcagcaccttctctgcccgttcttgtccacacatctattaaatgcttctgttttcatttgca

SEQ ID NO: 2428 - protein, 259 aa, Homosapiens; identical to SEQ ID NO: 286

SEQ ID NO: 2429 - DNA, 1823 bp, Homosapiens
ggctgccggctccacccctcaggtaagcggggactgggccgccgaggttcagggaagggggcggctgtcggggcccgtgccggccccggggggccacctgctgggccagcggtgccctcgcgccgaaacacactgggagaggccagaatcttccggaacagccagcccttacccatctctccctctgtgccgagaactgccctgaaatactgtgattcatttggattcaaggttggctctcaacagtgccagctgcactgtcatcctaaagtacttctgtggaagagaacatggtggtgtcactgttgtaccagtgatgacacaaaatcccagatctacctgacgggcctgcgagggttgaagattgtgaagcaatagcctaagggactggctggcttcgagcagggcatcggaaccaggcctcctggcactggcctgggtagagccagggcgagcaccagctgacccccagtggaaccctgtgacagtcctgccagggcccaggccatcccaaccgacttccatctcatggaccctccagcggagaagccgggagaggctggcggactgcagatcacaccccagctgctgaagtcacgcacaggcgagttctccctggagtccatcctgctactgaagctgcgtggcttgggactggctgacctgggctgcctgggagagtgcctgggcctggagtggctggacctatcaggcaacgcgctcacccacctgggcccgctggcctccttgcgccagctagctgtgctcaatgtctccaacaatcggctgacgggcctggagccactggccacctgtgagaacttgcagagtctcaatgccgcaggcaacctactggccaccccgggccagctgcagtgtctggctgggctaccgtgcctggagtacctgcggctccgagaccctttggcccggctcagcaacccgctctgtgccaacccctcctactgggctgcagtccgggagctgctgcctggcctgaaagtcatcgacggtgagcgtgtgattgggcgtggtagtgagttctaccagctgtgccgagacctggacagctccttgcgtcccagctccagtccaggccccagagccaccgaggcccagccctgggtggagccaggctactgggagtcctggcccagccggagcagctccatcctggaggaggcctgccggcagttccaggacacactgcaggagtgctgggacctggaccgccaggccagcgacagcctggcccaggcggagcaggtactcagctctgcgggccccacctcttccttcgtcttctgaacgtggcctatggcccaggacagcctggcaggtggcctcgctgcccccagttcccctctctgcccccacactcgtcttagttgcttcacactggtcactggccctgcacactgggctattgctttatccctatcctgagagcagcccctccccaccatccctccacatgctgcaaggacagactgaagggctgtgagcaggtgtaagggctcccacatccgtgagcctgtgtccgcagctgctgccactctgggctgctccagcctgcaacttagtggaaggaattacttcctcctgaggctacaggcgagaaaggtagggatgggccagcctcccgtctcagctgttgggagacagtaggcaggctgagtggcccagagcactcctggaagtgggactcccctgccttgcaaatgtgcctctccagactgctcctgcacttaccccctccccgcagcaccttctctgcccgttcttgtccacacatctattaaatgcttctgttttcatttgca

SEQ ID NO: 2430 - protein, 259 aa, Homosapiens; identical to SEQ ID NO: 286

SEQ ID NO: 2431 - DNA, 2936 bp, Homosapiens
gtaggctcctgagtgatttcccccagctgccctcgtttgcatttggatagagcttggttggagttccaagggctgatgctgggaaccttgctctggatgcgaggcctgcccctggagggagccgcggaggactggcagctgcagatgctggagcaggccagcctgtggctgggccgtagcttcctgctggcaggcttcctggtatcgagcagctgccccagcctggagcaggcggccaagggtgagggctgttcccccatcccttgtttcgcccactgcctcgactccctggtgagaaactttctgtgtcaccctcacagtgtccagatcatcctgggcactgccagggccacctgcagccatttctaaggctctgtggaggcccagggactcctcacccagctccagcgccagcgcagcctcctagcccaccagccctttgaggagctcttggaccactgggtctcggcctaccacctgctggagtggctggtggagcagcagcagccccttcaagagtacaagggcaggcaccagctggggaaggctggtgttgccttgtcggccacattctggagcccggcagacagcctcagcaagctcctgtagcccttccagatggtggtccgcgaggcgagtgcggcacaggcctctctgagccaggtgctgccccagctgcgctacctgcacatcttcctggagcaggttcacacacactttcaggagcagagtgtcggggagaggggcgcagccatccagctggctgaggggttggcccggcagctctgcaccgactgtcagctcaacaagctcttctaccgcgaggagtttgtgctggccaccttgctggacccttgcttcaaggggaagattgaggccatcctgccatgggggccgaccgacattgaccactggaagcaagtcctcgtgtacaaggtgaaggagattagagtgtctgaatactctttgaactccccaagtcccctgcaaagccccaggggtctgtgcgtggaccccaccagggtagccaagagctccggggtggaggggagaagccagggggagcctctgcagagcagcagccactctggggccttcctgctggcccagagggagaagggcttgctggagagcatggggctgctggcctctgagagaagcgggggctcgctgtccaccaagagccactgggccagcatcattgtcaagaagtatctgtgggagaatgagaccgttggagcccaggatgaccccctggcttactgggagaagaagcgagaagcctggccaccatctatctgtcttaccccccacaggagccttctctgaaagcatctttgcctccctgaacagccccacccttgtagagcaaaactcttctctcaaggtggaagccattgagcatctcctcttcttgaaggccaacctggagcagttccccaactacaccccgcctcccctcatctgctctagtggtgacctggccaaggggatacagaccctgcagtccgctcagggtgggatggcagacatggcaggtgccggtgctcaccctgcccgtgaactcctagagagcccctgcctgtaataggtcaaagcagagagctgggtgttgcatcctgggcgccacatgctcatggccagaatcttaaacctatttggtaggaaagggtcagtttctcacttgacagattgccatatttttttttctgggagatgtcattttccatctcccgattacttcctttacgtctagcagtatgtgccgagaagaggcttactctcttcgtaggtgactgtgaattttgtactacgtggctttgtacatgtgatgctctgttaaaacataagtgggtatgaaggtccttgcatacaccttgtctgtgtggataagtggacacatgcccttaagaggcttgctttctcaaaaagtggccaaggatgtggagtgggcatgtgctggcaggtgggatatgtcctcagcctttgggggcctggataagctattgcagcactttctgaggctttcactgtagggagaaggaaaccccaagggtagaatagccatttccagagggaagtacacacatacccccacacaccagtctttttgggggtttcagagtggccggagaaaccgactgaagggactgaccagctagctaggagagctgagacgccagtcctcaaatggcgttcttaccaatagtctatttccagactactggaaacgttggggtttcttcctccagtgacagcagcctcagtagctttcctgggctccaggcggctggctgcacaccctgcctgccatcacccttgcccctgcttgtcctggaccacttttaaaggggaagtcccttatttggaagagagaaaggatgtgtgtagcacacactcatcatggattgctcagagttcctttagggcagagctgagggcctgggatccaggaaccagtgggattggatgggagaagaaggaagggggtggcccgtcacccccgcaagacttgcatccaggtagcctaaggactcctggtcactgggtagggtggctgctgagatgcaggtcggaagaggcaggggaaggctccaggcctaacttggagcatgtcactggccatgggggtgaggggacagactctgctctcactggctggcagccccaggagcctgttcccttgcctctcctggatgggttgtcagccctgtgtttcactgtgaccaattcattataacatttggatattactgaaaatgtaaggaagcaggaaaaattaactactttcattcagagatagcctctatcaatagtttgacatttttccctcttttacattgagatcataccctaggtactgtttagtatgcaatattttcattttcgcagtataataattgcacctgttaaataaagttttgtaaacatttaat

SEQ ID NO: 2432 - protein, 236 aa, Homosapiens; identical to SEQ ID NO: 288

SEQ ID NO: 2433 - DNA, 505 bp, Homosapiens
gtgtgcagccagccgcctggagcccaggaaagctactgaggctgctgtcactggaggaagaaacagtgaaagcctcagaaagtgctgcaatagcttatccaggcccccaaaggctgaggacatatcccacctgccagcacatgcccactccacatccttggccactttttgagaaagcaagcctcttaagggcatgtgtccacttatccacacagacaaggtgtatgcaaggaccttcatacccacttatgttttaacagagcatcacatgtacaaagccacgtagtacaaaattcacagtcacctacgaagagagtaagcctcttctcggcacatactgctagacgtaaaggaagtaatcgggagatggaaaatgacatctcccagaaaaaaaaatatggcaatctgtcaagtgagaaactgaccctttcctaccaaataggtttaagattctggccatgagcatgtggcgcccaggatgcaacacccagctctctgctttgac

SEQ ID NO: 2434 - protein, 38 aa, Homosapiens
MPTPHPWPLFEKASLLRACVHLSTQTRCMQGPSYPLMF

SEQ ID NO: 2435 - DNA, 1056 bp, Homosapiens
tggcttcgagcagggcatcggaaccaggcctcctggcactggcctgggtagagccagggcgagcaccagctgacccccagtggaaccctgtgacagtcctgccagggcccaggccatcccaaccgacttccatctcatggaccctccagcggagaagccgggagaggctggcggactgcagatcacaccccagctgctgaagtcacgcacaggcgagttctccctggagtccatcctgctactgaagctgcgtggcttgggactggctgacctgggctgcctgggagagtgcctgggcctggagtggctggacctatcaggcaacgcgctcacccacctgggcccgctggcctccttgcgccagctagctgtgctcaatgtctccaacaatcggctgacgggcctggagccactggccacctgtgagaacttgcagagtctcaatgccgcaggcaacctactggccaccccgggccagctgcagtgtctggctgggctaccgtgcctggagtacctgcggctccgagaccctttggcccggctcagcaacccgctctgtgccaacccctcctactgggctgcagtccgggagctgctgcctggcctgaaagtcatcgacggtgagcgtgtgattgggcgtggtagtgagttctaccagctgtgccgagacctggacagctccttgcgtcccagctccagtccaggccccagagccaccgaggcccagccctgggtggagccaggctactgggagtcctggcccagccggagcagctccatcctggaggaggcctgccggcagttccaggacacactgcaggagtgctgggacctggaccgccaggccagcgacagcctggcccaggcggagcaggtactcagctctgcgggccccacctcttccttcgtcttctgaacgtggcctatggcccaggacagctcccctgccttgcaaatgtgcctctccagactgctcctgcacttaccccctccccgcagcaccttctctgcccgttcttgtccacacatctattaaatgcttctgttttcatttgc

SEQ ID NO: 2436 - protein, 36 aa, Homosapiens
MAQDSSPALQMCLSRLLLHLPPPRSTFSARSCPHIY

SEQ ID NO: 2437 - DNA, 1308 bp, Homosapiens
tggcttcgagcagggcatcggaaccaggcctcctggcactggcctgggtagagccagggcgagcaccagctgacccccagtggaaccctgtgacagtcctgccagggcccaggccatcccaaccgacttccatctcatggaccctccagcggagaagccgggagaggctggcggactgcagatcacaccccagctgctgaagtcacgcacaggcgagttctccctggagtccatcctgctactgaagctgcgtggcttgggactggctgacctgggctgcctgggagagtgcctgggcctggagtggctggacctatcaggcaacgcgctcacccacctgggcccgctggcctccttgcgccagctagctgtgctcaatgtctccaacaatcggctgacgggcctggagccactggccacctgtgagaacttgcagagtctcaatgccgcaggcaacctactggccaccccgggccagctgcagtgtctggctgggctaccgtgcctggagtacctgcggctccgagaccctttggcccggctcagcaacccgctctgtgccaacccctcctactgggctgcagtccgggagctgctgcctggcctgaaagtcatcgacggtgagcgtgtgattgggcgtggtagtgagttctaccagctgtgccgagacctggacagctccttgcgtcccagctccagtccaggccccagagccaccgaggcccagccctgggtggagccaggctactgggagtcctggcccagccggagcagctccatcctggaggaggcctgccggcagttccaggacacactgcaggagtgctgggacctggaccgccaggccagcgacagcctggcccaggcggagcaggtactcagctctgcgggccccacctcttccttcgtcttctgaacgtggcctatggcccaggacagcctggcaggtggcctcgctgcccccagttcccctctctgcccccacactcgtcttagttgcttcacactggtcactggccctgcacactgggctattgctttatccctatcctgagagcagcccctccccaccatccctccacatgctgcaaggacagactgaagggctgtgagcaggtgtaagggctcccgtctcagctgttgggagacagtaggcaggctgagtggcccagagcactcctggaagtgggactcccctgccttgcaaatgtgcctctccagactgctcctgcacttaccccctccccgcagcaccttctctgcccgttcttgtccacacatctattaaatgcttctgttttcatttgc

SEQ ID NO: 2438 - protein, 259 aa, Homosapiens; identical to SEQ ID NO: 286

SEQ ID NO: 2439 - DNA, 1356 bp, Homosapiens
tggcttcgagcagggcatcggaaccaggcctcctggcactggcctgggtagagccagggcgagcaccagctgacccccagtggaaccctgtgacagtcctgccagggcccaggccatcccaaccgacttccatctcatggaccctccagcggagaagccgggagaggctggcggactgcagatcacaccccagctgctgaagtcacgcacaggcgagttctccctggagtccatcctgctactgaagctgcgtggcttgggactggctgacctgggctgcctgggagagtgcctgggcctggagtggctggacctatcaggcaacgcgctcacccacctgggcccgctggcctccttgcgccagctagctgtgctcaatgtctccaacaatcggctgacgggcctggagccactggccacctgtgagaacttgcagagtctcaatgccgcaggcaacctactggccaccccgggccagctgcagtgtctggctgggctaccgtgcctggagtacctgcggctccgagaccctttggcccggctcagcaacccgctctgtgccaacccctcctactgggctgcagtccgggagctgctgcctggcctgaaagtcatcgacggtgagcgtgtgattgggcgtggtagtgagttctaccagctgtgccgagacctggacagctccttgcgtcccagctccagtccaggccccagagccaccgaggcccagccctgggtggagccaggctactgggagtcctggcccagccggagcagctccatcctggaggaggcctgccggcagttccaggacacactgcaggagtgctgggacctggaccgccaggccagcgacagcctggcccaggcggagcaggtactcagctctgcgggccccacctcttccttcgtcttctgaacgtggcctatggcccaggacagcctggcaggtggcctcgctgcccccagttcccctctctgcccccacaccctccccaccatccctccacatgctgcaaggacagactgaagggctgtgagcaggtgtaagggctcccacatccgtgagcctgtgtccgcagctgctgccactctgggctgctccagcctgcaacttagtggaaggaattacttcctcctgaggctacaggcgagaaaggtagggatgggccagcctcccgtctcagctgttgggagacagtaggcaggctgagtggcccagagcactcctggaagtgggactcccctgccttgcaaatgtgcctctccagactgctcctgcacttaccccctccccgcagcaccttctctgcccgttcttgtccacacatctattaaatgcttctgttttcatttgca

SEQ ID NO: 2440 - protein, 33 aa, Homosapiens
MAQDSLAGGLAAPSSPLCPHTLPTIPPHAARTD

SEQ ID NO: 2441 - DNA, 1265 bp, Homosapiens
ttcgagcagggcatcggaaccaggcctcctggcactggcctgggtagagccagggcgagcaccagctgacccccagtggaaccctgtgacagtcctgccagggcccaggccatcccaaccgacttccatctcatggaccctccagcggagaagccgggagaggctggcggactgcagatcacaccccagctgctgaagtcacgcacaggcgagttctccctggagtccatcctgctactgaagctgcgtggcttgggactggctgacctgggctgcctgggagagtgcctgggcctggagtggctggacctatcaggcaacgcgctcacccacctgggcccgctggcctccttgcgccagctagctgtgctcaatgtctccaacaatcggctgacgggcctggagccactggccacctgtgagaacttgcagagtctcaatgccgcaggcaacctactggccaccccgggccagctgcagtgtctggctgggctaccgtgcctggagtacctgcggctccgagaccctttggcccggctcagcaacccgctctgtgccaacccctcctactgggctgcagtccgggagctgctgcctggcctgaaagtcatcgacggtgagcgtgtgattgggcgtggtagtgagttctaccagctgtgccgagacctggaccgccaggccagcgacagcctggcccaggcggagcaggtactcagctctgcgggccccacctcttccttcgtcttctgaacgtggcctatggcccaggacagcctggcaggtggcctcgctgcccccagttcccctctctgcccccacactcgtcttagttgcttcacactggtcactggccctgcacactgggctattgctttatccctatcctgagagcagcccctccccaccatccctccacatgctgcaaggacagactgaagggctgtgagcaggtgtaagggctcccacatccgtgagcctgtgtccgcagctgctgccactctgggctgctccagcctgcaacttagtggaaggaattacttcctcctgaggctacaggcgagaaaggtagggatgggccagcctcccgtctcagctgttgggagacagtaggcaggctgagtggcccagagcactcctggaagtgggactcccctgccttgcaaatgtgcctctccagactgctcctgcacttaccccctccccgcagcaccttctctgcccgttcttgtccacacatctattaaatgcttctgttttcatttgca

SEQ ID NO: 2442 - protein, 205 aa, Homosapiens
MDPPAEKPGEAGGLQITPQLLKSRTGEFSLESILLLKLRGLGLADLGCLGECLGLEWLDLSGNALTHLGPLASLRQLAVLNVSNNRLTGLEPLATCENLQSLNAAGNLLATPGQLQCLAGLPCLEYLRLRDPLARLSNPLCANPSYWAAVRELLPGLKVIDGERVIGRGSEFYQLCRDLDRQASDSLAQAEQVLSSAGPTSSFVF

SEQ ID NO: 2443 - DNA, 911 bp, Homosapiens
agctgacccccagtggaaccctgtgacagtcctgccagggcccaggccatcccaaccgacttccatctcatggaccctccagcggagaagccgggagaggctggcggactgcagatcacaccccagctgctgaagtcacgcacaggcgagttctccctggagtccatcctgctactgaagctgcgtggcttgggactggctgacctgggctgcctgggagagtgcctgggcctggagtggctggacctatcaggcaacgcgctcacccacctgggcccgctggcctccttgcgccagctagctgtgctcaatgtctccaacaatcggctgacgggcctggagccactggccacctgtgagaacttgcagagtctcaatgccgcaggcaacctactggccaccccgggccagctgcagtgtctggctgggctaccgtgcctggagtacctgcggctccgagaccctttggcccggctcagcaacccgctctgtgccaacccctcctactgggctgcagtccgggagctgctgcctggcctgaaagtcatcgacggtgagcgtgtgattgggcgtggtagtgagttctaccagctgtgccgagacctggacagctccttgcgtcccagctccagtccaggccccagagccaccgaggcccagccctgggtggagccaggctactgggagtcctggcccagccggagcgagaaaggtagggatgggccagcctcccgtctcagctgttgggagacagtaggcaggctgagtggcccagagcactcctggaagtgggactcccctgccttgcaaatgtgcctctccagactgctcctgcacttaccccctccccgcagcaccttctctgcccgttcttgtccacacatctattaaatgcttctgttttcatttgc

SEQ ID NO: 2444 - protein, 273 aa, Homosapiens
MDPPAEKPGEAGGLQITPQLLKSRTGEFSLESILLLKLRGLGLADLGCLGECLGLEWLDLSGNALTHLGPLASLRQLAVLNVSNNRLTGLEPLATCENLQSLNAAGNLLATPGQLQCLAGLPCLEYLRLRDPLARLSNPLCANPSYWAAVRELLPGLKVIDGERVIGRGSEFYQLCRDLDSSLRPSSSPGPRATEAQPWVEPGYWESWPSRSEKGRDGPASRLSCWETVGRLSGPEHSWKWDSPALQMCLSRLLLHLPPPRSTFSARSCPHIY

SEQ ID NO: 2445 - DNA, 722 bp, Homosapiens
tactggccaccccgggccagctgcagtgtctggctgggctaccgtgcctggagtacctgcggctccgagaccctttggcccggctcagcaacccgctctgtgccaacccctcctactgggctgcagtccgggagctgctgcctggcctgaaagtcatcgacggtgagcgtgtgattgggcgtggtagtgagttctaccagctgtgccgagacctggacagctccttgcgtcccagctccagtccaggccccagagccaccgaggcccagccctgggtggagccaggctactgggagtcctggcccagccggagcagctccatcctggaggaggcctgccggcagttccaggacacactgcaggagtgctgggacctggaccgccaggccagcgacagcctggcccaggcggagcaggtactcagctctgcgggccccacctcttccttcgtcttctgaacgtggcctatggcccaggacagcctggcaggtggcctcgctgcccccagttcccctctctgcccccacactcgtcttagttgcttcacactggtcactggccctgcacactgggctattgctttatccctatcctgagagcagccctcccctgccttgcaaatgtgcctctccagactgctcctgcacttaccccctccccgcagcaccttctctgcccgttcttgtccacacatctattaaatgcttctgttttcatttgca

SEQ ID NO: 2446 - protein, 42 aa, Homosapiens
MAQDSLAGGLAAPSSPLCPHTRLSCFTLVTGPAHWAIALSLS

SEQ ID NO: 2447 - DNA, 827 bp, Homosapiens
tactggccaccccgggccagctgcagtgtctggctgggctaccgtgcctggagtacctgcggctccgagaccctttggcccggctcagcaacccgctctgtgccaacccctcctactgggctgcagtccgggagctgctgcctggcctgaaagtcatcgacggtgagcgtgtgattgggcgtggtagtgagttctaccagctgtgccgagacctggacagctccttgcgtcccagctccagtccaggccccagagccaccgaggcccagccctgggtggagccaggctactgggagtcctggcccagccggagcagctccatcctggaggaggcctgccggcagttccaggacacactgcaggagtgctgggacctggaccgccaggccagcgacagcctggcccaggcggagcaggtactcagctctgcgggccccacctcttccttcgtcttctgaacgtggcctatggcccaggacagcctggcaggtggcctcgctgcccccagttcccctctctggctcccacatccgtgagcctgtgtccgcagctgctgccactctgggctgctccagcctgcaacttagtggaaggaattacttcctcctgaggctacaggcgagaaaggtagggatgggccagcctcccgtctcagctgttgggagacagtaggcaggctgagtggcccagagcactcctggaagtgggactcccctgccttgcaaatgtgcctctccagactgctcctgcacttaccccctccccgcagcaccttctctgcccgttcttgtccacacatctattaaatgcttctgttttcatttgca

SEQ ID NO: 2448 - protein, 139 aa, Homosapiens
VLPAVPRPGQLLASQLQSRPQSHRGPALGGARLLGVLAQPEQLHPGGGLPAVPGHTAGVLGPGPPGQRQPGPGGAGTQLCGPHLFLRLLNVAYGPGQPGRWPRCPQFPSLAPTSVSLCPQLLPLWAAPACNLVEGITSS

SEQ ID NO: 2449 - DNA, 1662 bp, Homosapiens
gaggcggacagcgaggccaagatttcagctgcgggacggtcaggggagacctccaggcgcagggaaggacgtgaggaggggaagcgggctggggcggcagccgggcggaggggcagctgcgcaggcggaatgaggaacgcctttgctctaaggcgaccaccctggcagctcttcactgaggggcctcggtttccacatctgtcgctctccggtcccaagaccaccaggaccgacggggctctccgggagggtcagcccctccggtggccccagtcatgcatcaggggacggatcagaagggctaggaagaggggtcgtggggaaggccccagaaaaaagaggaaggagggaagattttgcctgaagcgggaaagccaagggctgggcggcgcgagacccccattcctagcgactggggctggctggtggcccgcggcagcccccgcgccgggaggattaggcctcccgccgctcccacccgtccggaccctcccacgtgtttaggtcctcccaaaagtattcggcctccggcccctgccccttcccccggctggcctggacctcggggacgtggggggaaccccgtgggagcagggggattctggacggggagggagtagcggttggggagaaggctgagcggggaaaggagagaggggctccggggacggcagggaggagagtgggtcgtgccggagacccagggagagacacaatgggcaagattaggggtgtagggtgggagtgcgaactgactgattcctagcgtgggcagggaactttgctaaaactgcaggccccagggaacagcgcgggcagggtgggagggaacggagagggccaggcggaccctaaggtcaatttggagaaagggccatttccaggctccttcacctgtgcccagcgttctacaggcctggaccccgcccccgctccccaccctccccccagagcagggcgcgggaggaggcggctcgggctggctcggagagctgaggggcgcacacccgcttcgcagggccagggtgacacggaagcatgcgacggctgctgatccctctggccctgtggctgggtgcggtgggcgtgggcgtcgccgagctcacggaagcccagcgccggggcctgcaggtggccctggaggaatttcacaagcacccgcccgtgcagtgggccttccaggagaccagtgtggagagcgccgtggacacgcccttcccagctggaatatttgtgaggctggaatttaagctgcagcagacaagctgccggaagagggactggaagaaacccgagtgcaaagtcaggcccaatgggaggaaacggaaatgcctggcctgcatcaaactgggctctgaggacaaagttctgggccggttggtccactgccccatagagacccaagttctgcgggaggctgaggagcaccaggagacccagtgcctcagggtgcagcgggctggtgaggacccccacagcttctacttccctggacagttcgccttctccaaggccctgccccgcagctaagccagcactgagatgcgtggtgcctccaggaccgctgcgggtggtaaccagtggaagaccccagcccccagggagaggaacccgttctatccccagccatgataataaagctgctctcccagctgcctctca

SEQ ID NO: 2450 - protein, 163 aa, Homosapiens; identical to SEQ ID NO: 290

SEQ ID NO: 2451 - DNA, 1906 bp, Homosapiens
agaagagcgggaagaggcggacagcgaggccaagatttcagctgcgggacggtcaggggagacctccaggcgcagggaaggacgtgaggaggggaagcgggctggggcggcagccgggcggaggggcagctgcgcaggcggaatgaggaacgcctttgctctaaggcgaccaccctggcagctcttcactgaggggcctcggtttccacatctgtcgctctccggtcccaagaccaccaggaccgacggggctctccgggagggtcagcccctccggtggccccagtcatgcatcaggggacggatcagaagggctaggaagaggggtcgtggggaaggccccagaaaaaagaggaaggagggaagattttgcctgaagcgggaaagccaagggctgggcggcgcgagacccccattcctagcgactggggctggctggtggcccgcggcagcccccgcgccgggaggattaggcctcccgccgctcccacccgtccggaccctcccacgtgtttaggtcctcccaaaagtattcggcctccggcccctgccccttcccccggctggcctggacctcggggacgtggggggaaccccgtgggagcagggggattctggacggggagggagtagcggttggggagaaggctgagcggggaaaggagagaggggctccggggacggcagggaggagagtgggtcgtgccggagacccagggagagacacaatgggcaagattaggggtgtagggtgggagtgcgaactgactgattcctagcgtgggcagggaactttgctaaaactgcaggccccagggaacagcgcgggcagggtgggagggaacggagagggccaggcggaccctaaggtcaatttggagaaagggccatttccaggctccttcacctgtgcccagcgttctacaggcctggaccccgcccccgctccccaccctccccccagagcagggcgcgggaggaggcggctcgggctggctcggagagctgaggggcgcacacccgcttcgcagggccagggtgacacggaagcatgcgacggctgctgatccctctggccctgtggctgggtgcggtgggcgtgggcgtcgccgagctcacggaagcccagcgccggggcctgcaggtggccctggaggaatttcacaagcacccgcccgtgcagtgggccttccaggagaccagtgtggagagcgccgtggacacggtgagtagcatggcccgggcaggagcggggagggtcgtaccccaggagaccagcgcattcccacgaagggggacagaagtgcttgggctctgagccccagccctttggagaaaaggccactgtccagcctgctggaatgtgactgcgtgagggaggtgcggatcacaccagggcttgctctgcaccctcagctggctaccggccatcctctgcctgcctgtctgtccgcagcccttcccagctggaatatttgtgaggctggaatttaagctgcagcagacaagctgccggaagagggactggaagaaacccgagtgcaaagtcaggcccaatgggaggaaacggaaatgcctggcctgcatcaaactgggctctgaggacaaagttctgggccggttggtccactgccccatagagacccaagttctgcgggaggctgaggagcaccaggagacccagtgcctcagggtgcagcgggctggtgaggacccccacagcttctacttccctggacagttcgccttctccaaggccctgccccgcagctaagccagcactgagatgcgtggtgcctccaggaccgctgcgggtggtaaccagtggaagaccccagcccccagggagaggaacccgttctatccccagccatgataataaagctgctctcccagctgcctctca

SEQ ID NO: 2452 - protein, 124 aa, Homosapiens
MRNAFALRRPPWQLFTEGPRFPHLSLSGPKTTRTDGALREGQPLRWPQSCIRGRIRRARKRGRGEGPRKKRKEGRFCLKRESQGLGGARPPFLATGAGWWPAAAPAPGGLGLPPLPPVRTLPRV

SEQ ID NO: 2453 - DNA, 630 bp, Homosapiens
ggaggtgggggccgccccgcgagaagaagagcgggaagaggcggacagcgaggccaagatttcagctgcgggacggtcaggggagacctccaggcgcaggtggccctggaggaatttcacaagcacccgcccgtgcagtgggccttccaggagaccagtgtggagagcgccgtggacacgcccttcccagctggaatatttgtgaggctggaatttaagctgcagcagacaagctgccggaagagggactggaagaaacccgagtgcaaagtcaggcccaatgggaggaaacggaaatgcctggcctgcatcaaactgggctctgaggacaaagttctgggccggttggtccactgccccatagagacccaagttctgcgggaggctgaggagcaccaggagacccagtgcctcagggtgcagcgggctggtgaggacccccacagcttctacttccctggacagttcgccttctccaaggccctgccccgcagctaagccagcactgagatgcgtggtgcctccaggaccgctgcgggtggtaaccagtggaagaccccagcccccagggagaggaacccgttctatccccagccatgataataaagctgctctcccagctgcctctca

SEQ ID NO: 2454 - protein, 165 aa, Homosapiens
GGGGRPARRRAGRGGQRGQDFSCGTVRGDLQAQVALEEFHKHPPVQWAFQETSVESAVDTPFPAGIFVRLEFKLQQTSCRKRDWKKPECKVRPNGRKRKCLACIKLGSEDKVLGRLVHCPIETQVLREAEEHQETQCLRVQRAGEDPHSFYFPGQFAFSKALPRS

SEQ ID NO: 2455 - DNA, 755 bp, Homosapiens
gggaggaggtgggggccgccccgcgagaagaagagcgggaagaggcggacagcgaggccaagatttcagctgcgggacggtcaggggagacctccaggcgcagggaaggacggccagggtgacacggaagcatgcgacggctgctgatccctctggccctgtggctgggtgcggtgggcgtgggcgtcgccgagctcacggaagcccagcgccggggcctgcaggtggccctggaggaatttcacaagcacccgcccgtgcagtgggccttccaggagaccagtgtggagagcgccgtggacacgcccttcccagctggaatatttgtgaggctggaatttaagctgcagcagacaagctgccggaagagggactggaagaaacccgagtgcaaagtcaggcccaatgggaggaaacggaaatgcctggcctgcatcaaactgggctctgaggacaaagttctgggccggttggtccactgccccatagagacccaagttctgcgggaggctgaggagcaccaggagacccagtgcctcagggtgcagcgggctggtgaggacccccacagcttctacttccctggacagttcgccttctccaaggccctgccccgcagctaagccagcactgagatgcgtggtgcctccaggaccgctgcgggtggtaaccagtggaagaccccagcccccagggagaggaacccgttctatccccagccatgataataaagctgctctcccagctgcctctca

SEQ ID NO: 2456 - protein, 163 aa, Homosapiens; identical to SEQ ID NO: 290

SEQ ID NO: 2457 - DNA, 614 bp, Homosapiens
gctcaccccatgctccccgctcccccacagaggaaacggaaatgcctggcctgcatcaaactgggctctgaggacaaagttctgggccggttggtccactgccccatagagacccaagttctgcgggtaagaaggggcaagggtgcacaggtggtgacagggctgggaagatggatggaagctgagcctatgggctggtctcgaggctaaagcttggccaagcaggagggagggcagtgggggctagaaagcgctgtgcctgtttggacattctccaagggatgtggaggggatgtggaggatgctggcagccctccactggcactgcccacccctcctacactgcctgaacagttttgggcactggcaggaggctgaggagcaccaggagacccagtgcctcagggtgcagcgggctggtgaggacccccacagcttctacttccctggacagttcgccttctccaaggccctgccccgcagctaagccagcactgagatgcgtggtgcctccaggaccgctgcgggtggtaaccagtggaagaccccagcccccagggagaggaacccgttctatccccagccatgataataaagctgctctcccagctgcc

SEQ ID NO: 2458 - protein, 66 aa, Homosapiens
MLPAPPQRKRKCLACIKLGSEDKVLGRLVHCPIETQVLRVRRGKGAQVVTGLGRWMEAEPMGWSRG

SEQ ID NO: 2459 - DNA, 2152 bp, Homosapiens
ggggggaggttggggacgggcctggcagttgtgaactcgaacctgccgctgtcgccgcggcggggcggggagcgagagtgggccgcggaggccggccttcgggctccatggacgggcgccgcgtccctgcacagcccgccgcagagcagaggaagaaccgatgctggaacgtcgttgcaggggccccctggccatgggcctggcccagccccgactcctttctgggccctcccaggagtcaccccagaccctggggaaggagtcccgcgggctgaggcaacaaggcacgtcagtggcccagtctggtgcccaagccccaggcagggcccatcgctgtgcccactgtcgaaggcacttccctggctgggtggctctgtggcttcacacccgccggtgccaggcccggctgcccttgccctgccctgagtgtggccgtcgctttcgccatgcccccttcttagcactgcaccgccaggtccatgctgctgccaccccagacctgggctttgcctgccacctctgtgggcagagcttccgaggctgggtggccctggttctgcatctgcgggcccattcagctgcaaagcggcccatcgcttgtcccaaatgcgagagacgcttctggcgacgaaagcagcttcgagctcatctgcggcggtgccaccctcccgccccggagccatctggcggcgcatcggcgcgaccacgcccccgatcggcccttcgtgtgtcccgactgcggcaaggccttccgccacaaaccctacctggcggcgcaccggcgcatccacaccggcgagaagccctacgtctgccccgactgcggcaaagccttcagccagaagtccaacctggtgtcgcaccggcgcatccacacgggcgagcggccctacgcctgtcccgactgcgaccgcagcttcagccagaagtccaacctcatcacccaccgcaagagccacatccgggacggcgccttctgctgtgccatctgtggccagaccttcgacgacgaggagagactcctggcccaccagaagaagcacgatgtctgagacggtgggcggggccgtgttggctgagagagggctggggtccttcgtggtgggagtcgcagtgggctgggggtgcctgcctagtgctggagtaggggacaatgggaatcctagaggggatggaagacgcggggagtgagctgggtgggccctgctagcgagagaggtcaaccccggtggccagggaacccacttccaagcgcagggacgccggcctccagctggtgtgtgctaaggctccgtcctgactgccctgtgccctggaaaagcagcaatagcatccgccccttagagccctctggctagaggagccaccagtggaaaggaagaccctccatcctctggtattaacgccttaatgcccctgtcttttactgtaagttacttaagatcatttttggaagcaggcgtggtagagtcctgtaaatgaatgctctgggctagatacagcttggagaacctgctggccttgttagacagcacttgggcctttgccagcagcaagaggtgaagcgaagccactcttacctctcccttcccctcccacctgccccctgcgtaggcacccagacttggagagacccgtctgctgttaatacttccatcctcttccttcccaaagagcagatcccaaggcatttactccttggtctgtctcgctttatctgtcgcccctcccagcgctgagagcctcccctggctgtcagcagcactgtgtccaggctcttgtctgaacaccgcagcccctccttcgctccttccagagctcagcatgtcacggcaaggactgccgcattggtgatggagggccagctgaggggaagttgctggtgagtttccttttctccatttctagcatatggacacctggcctctgcttgagcacttaggtgacaggaacttccgcacctcctgaggccctggatgattctaattgttagaaattctaattgttagaaatccttccttataatgaatgaattctgctttcctataatttctacctattgggccttgttctgttctctggaactaaacagaacaaccatttacccctccttttcaaactagagaataaagatttggttttagaactggtg

SEQ ID NO: 2460 - protein, 328 aa, Homosapiens
MLERRCRGPLAMGLAQPRLLSGPSQESPQTLGKESRGLRQQGTSVAQSGAQAPGRAHRCAHCRRHFPGWVALWLHTRRCQARLPLPCPECGRRFRHAPFLALHRQVHAAATPDLGFACHLCGQSFRGWVALVLHLRAHSAAKRPIACPKCERRFWRRKQLRAHLRRCHPPAPEPSGGASARPRPRSALRVSRLRQGLPPQTLPGGAPAHPHRREALRLPRLRQSLQPEVQPGVAPAHPHGRAALRLSRLRPQLQPEVQPHHPPQEPHPGRRLLLCHLWPDLRRRGETPGPPEEARCLRRWAGPCWLREGWGPSWWESQWAGGACLVLE

SEQ ID NO: 2461 - DNA, 2954 bp, Homosapiens
tggggacgggcctggcagttgtgaactcgaacctgccgctgtcgccgcggcggggcggggagcgagagtgggccgcggaggccggccttcgggctccatggacgggcgccgcgtccctgcacagcccgccgcagagcagaggaagaaccgatgctggaacgtcgttgcaggggccccctggccatgggcctggcccagccccgactcctttctgggccctcccaggagtcaccccagaccctggggaaggagtcccgcgggctgaggcaacaaggcacgtcagtggcccagtctggtgcccaagccccaggcagggcccatcgctgtgcccactgtcgaaggcacttccctggctgggtggctctgtggcttcacacccgccggtgccaggcccggctgcccttgccctgccctgagtgtggccgtcgctttcgccatgcccccttcttagcactgcaccgccaggtccatgctgctgccaccccagacctgggctttgcctgccacctctgtgggcagagcttccgaggctgggtggccctggttctgcatctgcgggcccattcagctgcaaagcggcccatcgcttgtcccaaatgcgagagacgcttctggcgacgaaagcagcttcgagctcatctgcggcggtgccaccctcccgccccggaggcccggcccttcatatgcggcaactgtggccggagctttgcccagtgggaccagctagttgcccacaagcgggtgcacgtagctgaggccctggaggaggccgcagccaaggctctggggccccggcccaggggccgccccgcggtgaccgccccccggcccggtggagatgccgtcgaccgccccttccagtgtgcctgttgtggcaagcgcttccggcacaagcccaacttgatcgctcaccgccgcgtgcacacgggcgagcggccccaccagtgccccgagtgcgggaagcgctttaccaataagccctatctgacttcgcaccggcgcatccacaccggcgagaagccctacccgtgcaaagagtgcggccgccgcttccggcacaaacccaacctgctgtctcacagcaagattcacaagcgatccgaggggtcggcccaggccgcccccggcccggggagcccccagctgccagccggcccccaggagtccgcggccgagcccaccccggcggtacctctgaaaccggcccaggagccgccgccaggggccccgccagagcacccgcaggacccgatcgaagcccccccctccctctacagctgcgacgactgcggcaggagcttccggctggagcgcttcctgcgggcccaccagcggcagcacaccggggagcggcccttcacctgcgccgagtgcgggaagaacttcggcaagaagacgcacctggtggcgcactcgcgcgtgcactccggcgagcggcccttcgcctgcgaggagtgcggccgccgcttctcccagggcagccatctggcggcgcatcggcgcgaccacgcccccgatcggcccttcgtgtgtcccgactgcggcaaggccttccgccacaaaccctacctggcggcgcaccggcgcatccacaccggcgagaagccctacgtctgccccgactgcggcaaagccttcagccagaagtccaacctggtgtcgcaccggcgcatccacacgggcgagcggccctacgcctgtcccgactgcgaccgcagcttcagccagaagtccaacctcatcacccaccgcaagagccacatccgggacggcgccttctgctgtgccatctgtggccagaccttcgacgacgaggagagactcctggcccaccagaagaagcacgatgtctgagacggtgggcggggccgtgttggctgagagagggctggggtccttcgtggtgggagtcgcagtgggctgggggtgcctgcctagtgctggagtaggggacaatgggaatcctagaggggatggaagacgcggggagtgagctgggtgggccctgctagcgagagaggtcaaccccggtggccagggaacccacttccaagcgcagggacgccggcctccagctggtgtgtgctaaggctccgtcctgactgccctgtgccctggaaaagcagcaatagcatccgccccttagagccctctggctagaggagccaccagtggaaaggaagaccctccatcctctggtattaacgccttaatgcccctgtcttttactgtaagttacttaagatcatttttggaagcaggcgtggtagagtcctgtaaatgaatgctctgggctagatacagcttggagaacctgctggccttgttagacagcacttgggcctttgccagcagcaagaggtgaagcgaagccactcttacctctcccttcccctcccacctgccccctgcgtaggcacccagacttggagagacccgtctgctgttaatacttccatcctcttccttcccaaagagcagatcccaaggcatttactccttggtctgtctcgctttatctgtcgcccctcccagcgctgagagcctcccctggctgtcagcagcactgtgtccaggctcttgtctgaacaccgcagcccctccttcgctccttccagagctcagcatgtcacggcaaggactgccgcattggtgatggagggccagctgaggggaagttgctggtgagtttccttttctccatttctagcatatggacacctggcctctgcttgagcacttaggtgacaggaacttccgcacctcctgaggccctggatgattctaattgttagaaattctaattgttagaaatccttccttataatgaatgaattctgctttcctataatttctacctattgggccttgttctgttctctggaactaaacagaacaaccatttacccctccttttcaaactagagaataaagatttggttttagaactggtg

SEQ ID NO: 2462 - protein, 55 aa, Homosapiens
MDGRRVPAQPAAEQRKNRCWNVVAGAPWPWAWPSPDSFLGPPRSHPRPWGRSPAG

SEQ ID NO: 2463 - DNA, 1842 bp, Homosapiens
ggggacgggcctggcagttgtgaactcgaacctgccgctgtcgccgcggcggggcggggagcgagagtgggccgcggaggccggccttcgggctccatggacgggcgccgcgtccctgcacagcccgccgcagagcagaggaagaaccgatgctggaacgtcgttgcaggggccccctggccatgggcctggcccagccccgactcctttctgggccctcccaggagtcaccccagaccctggggaaggagtcccgcgggctgaggcaacaaggcacgtcagtggcccagtctggtgcccaagccccaggcagggcccatcgctgtgcccactgtcgaaggcacttccctggctgggtggctctgtggcttcacacccgccggtgccaggcccggctgcccttgccctgccctgagtgtggccgtcgctttcgccatgcccccttcttagcactgcaccgccaggtccatgctgctgccaccccagacctgggctttgcctgccacctctgtgggcagagcttccgaggctgggtggccctggttctgcatctgcgggcccattcagctgcaaagcggcccatcgcttgtcccaaatgcgagagacgttcagccagaagtccaacctcatcacccaccgcaagagccacatccgggacggcgccttctgctgtgccatctgtggccagaccttcgacgacgaggagagactcctggcccaccagaagaagcacgatgtctgagacggtgggcggggccgtgttggctgagagagggctggggtccttcgtggtgggagtcgcagtgggctgggggtgcctgcctagtgctggagtaggggacaatgggaatcctagaggggatggaagacgcggggagtgagctgggtgggccctgctagcgagagaggtcaaccccggtggccagggaacccacttccaagcgcagggacgccggcctccagctggtgtgtgctaaggctccgtcctgactgccctgtgccctggaaaagcagcaatagcatccgccccttagagccctctggctagaggagccaccagtggaaaggaagaccctccatcctctggtattaacgccttaatgcccctgtcttttactgtaagttacttaagatcatttttggaagcaggcgtggtagagtcctgtaaatgaatgctctgggctagatacagcttggagaacctgctggccttgttagacagcacttgggcctttgccagcagcaagaggtgaagcgaagccactcttacctctcccttcccctcccacctgccccctgcgtaggcacccagacttggagagacccgtctgctgttaatacttccatcctcttccttcccaaagagcagatcccaaggcatttactccttggtctgtctcgctttatctgtcgcccctcccagcgctgagagcctcccctggctgtcagcagcactgtgtccaggctcttgtctgaacaccgcagcccctccttcgctccttccagagctcagcatgtcacggcaaggactgccgcattggtgatggagggccagctgaggggaagttgctggtgagtttccttttctccatttctagcatatggacacctggcctctgcttgagcacttaggtgacaggaacttccgcacctcctgaggccctggatgattctaattgttagaaattctaattgttagaaatccttccttataatgaatgaattctgctttcctataatttctacctattgggccttgttctgttctctggaactaaacagaacaaccatttacccctccttttcaaactagagaataaagatttggttttagaactggtg

SEQ ID NO: 2464 - protein, 243 aa, Homosapiens
MLERRCRGPLAMGLAQPRLLSGPSQESPQTLGKESRGLRQQGTSVAQSGAQAPGRAHRCAHCRRHFPGWVALWLHTRRCQARLPLPCPECGRRFRHAPFLALHRQVHAAATPDLGFACHLCGQSFRGWVALVLHLRAHSAAKRPIACPKCERRSARSPTSSPTARATSGTAPSAVPSVARPSTTRRDSWPTRRSTMSETVGGAVLAERGLGSFVVGVAVGWGCLPSAGVGDNGNPRGDGRRGE

SEQ ID NO: 2465 - DNA, 4507 bp, Homosapiens
gacgggcctggcagttgtgaactcgaacctgccgctgtcgccgcggcggggcggggagcgagagtgggccgcggaggccggccttcgggctccatggacgggcgccgcgtccctgcacagcccgccgcagaggtaaggctggcctctctgcagtcagaggtctgagctctgccatggggataggggtgtctttattactgcagttttctctaacacctgggggctaccggagtgtgggccgaagcaggcgctgcagccgcggaagtatccccaggaacatccccaagaggagctggaaaaagcctcatccccagctctgcagtctccagggtagagtctggcctttgctgtgctcccaaaccacgccacaacaggggtgcacgggcgtccccatcccggcggaaggaaatggccctttctcatatcctggggtcttccctgtgcacagtctgacactgggaatgagtgacctttgtgttccctgagaagagagagtgcgctctagggaatttagaaggatgtgtctggagcttgtgagcaggcacagaagggcccttaggagcctaactgcttccttcctccttccgcggaggaggctcctgtgcaggaatctgggctcccctgagctgtggaagagctgaacatggggcagcccctggcgaggttggggcaggaccgggcaggggactgagattgcagtctcatcttccctccccttctattgccccagtaatctccagcaccccgagggaggcagagccggtgatcaggccccgagggcagcaggctgtgggtgttccttggattcagggagagccttccttcctgcaatgtcctaatttgtgtgggtggaagagggcaggcgggcagaatgggggcacagtctgggcaggcggtggtctggcgttagactgccgggagtagcacccagggctctgctcctgttccccgagaagggctgttctcacttgtcctccagcctcctacggagactgcagttagtgatgctgaaagtgcctcccctgtggggctaggaatgaaaagctatagacacctttttctctgagatctttgcaaacccaggcgctttagaggaaagaacactggcctgggagtttaaagacctgttccctagtcttgattctgctgttggcttactgtgtcaccttgggcaggtctcgtcatctttgatgtctcacagttgcttcatctgttaaacagggagctcagtgtctgtttgtccagcttctcagagttgctgtgcagctcggatgtggcataggaaacagcagacacagggagagggcagcataaggcactgtagggagcagtggccacattttctggtgagtcctgtggcaggaatgtttgtgcattcagcactggagcatttactccctgtctgacactggggtagctgccatgagggggattctagtatcagagtccctcccttctggaagtttccagggcaacaaagacataagacaaacatccttgaaatgttatctaaaaacccaagattgaaataatacataccacacaaggaaacaggagagtagtctagctccatgtccggggctctaggggttcatagatggcagctcctgtccggggctgaggttgggaggggagaaacaggggcagagtgagttggtctctggagtgactgtgcttttccaccctcagcagaggaagaaccgatgctggaacgtcgttgcaggggccccctggccatgggcctggcccagccccgactcctttctgggccctcccaggagtcaccccagaccctggggaaggagtcccgcgggctgaggcaacaaggcacgtcagtggcccagtctggtgcccaagccccaggcagggcccatcgctgtgcccactgtcgaaggcacttccctggctgggtggctctgtggcttcacacccgccggtgccaggcccggctgcccttgccctgccctgagtgtggccgtcgctttcgccatgcccccttcttagcactgcaccgccaggtccatgctgctgccaccccagacctgggctttgcctgccacctctgtgggcagagcttccgaggctgggtggccctggttctgcatctgcgggcccattcagctgcaaagcggcccatcgcttgtcccaaatgcgagagacgcttctggcgacgaaagcagcttcgagctcatctgcggcggtgccaccctcccgccccggaggcccggcccttcatatgcggcaactgtggccggagctttgcccagtgggaccagctagttgcccacaagcgggtgcacgtagctgaggccctggaggaggccgcagccaaggctctggggccccggcccaggggccgccccgcggtgaccgccccccggcccggtggagatgccgtcgaccgccccttccagtgtgcctgttgtggcaagcgcttccggcacaagcccaacttgatcgctcaccgccgcgtgcacacgggcgagcggccccaccagtgccccgagtgcgggaagcgctttaccaataagccctatctgacttcgcaccggcgcatccacaccggcgagaagccctacccgtgcaaagagtgcggccgccgcttccggcacaaacccaacctgctgtctcacagcaagattcacaagcgatccgaggggtcggcccaggccgcccccggcccggggagcccccagctgccagccggcccccaggagtccgcggccgagcccaccccggcggtacctctgaaaccggcccaggagccgccgccaggggccccgccagagcacccgcaggacccgatcgaagcccccccctccctctacagctgcgacgactgcggcaggagcttccggctggagcgcttcctgcgggcccaccagcggcagcacaccggggagcggcccttcacctgcgccgagtgcgggaagaacttcggcaagaagacgcacctggtggcgcactcgcgcgtgcactccggcgagcggcccttcgcctgcgaggagtgcggccgccgcttctcccagggcagccatctggcggcgcatcggcgcgaccacgcccccgatcggcccttcgtgtgtcccgactgcggcaaggccttccgccacaaaccctacctggcggcgcaccggcgcatccacaccggcgagaagccctacgtctgccccgactgcggcaaagccttcagccagaagtccaacctggtgtcgcaccggcgcatccacacgggcgagcggccctacgcctgtcccgactgcgaccgcagcttcagccagaagtccaacctcatcacccaccgcaagagccacatccgggacggcgccttctgctgtgccatctgtggccagaccttcgacgacgaggagagactcctggcccaccagaagaagcacgatgtctgagacggtgggcggggccgtgttggctgagagagggctggggtccttcgtggtgggagtcgcagtgggctgggggtgcctgcctagtgctggagtaggggacaatgggaatcctagaggggatggaagacgcggggagtgagctgggtgggccctgctagcgagagaggtcaaccccggtggccagggaacccacttccaagcgcagggacgccggcctccagctggtgtgtgctaaggctccgtcctgactgccctgtgccctggaaaagcagcaatagcatccgccccttagagccctctggctagaggagccaccagtggaaaggaagaccctccatcctctggtattaacgccttaatgcccctgtcttttactgtaagttacttaagatcatttttggaagcaggcgtggtagagtcctgtaaatgaatgctctgggctagatacagcttggagaacctgctggccttgttagacagcacttgggcctttgccagcagcaagaggtgaagcgaagccactcttacctctcccttcccctcccacctgccccctgcgtaggcacccagacttggagagacccgtctgctgttaatacttccatcctcttccttcccaaagagcagatcccaaggcatttactccttggtctgtctcgctttatctgtcgcccctcccagcgctgagagcctcccctggctgtcagcagcactgtgtccaggctcttgtctgaacaccgcagcccctccttcgctccttccagagctcagcatgtcacggcaaggactgccgcattggtgatggagggccagctgaggggaagttgctggtgagtttccttttctccatttctagcatatggacacctggcctctgcttgagcacttaggtgacaggaacttccgcacctcctgaggccctggatgattctaattgttagaaattctaattgttagaaatccttccttataatgaatgaattctgctttcctataatttctacctattgggccttgttctgttctctggaactaaacagaacaaccatttacccctccttttcaaactagagaataaagatttggttttagaactggtg

SEQ ID NO: 2466 - protein, 567 aa, Homosapiens
MLERRCRGPLAMGLAQPRLLSGPSQESPQTLGKESRGLRQQGTSVAQSGAQAPGRAHRCAHCRRHFPGWVALWLHTRRCQARLPLPCPECGRRFRHAPFLALHRQVHAAATPDLGFACHLCGQSFRGWVALVLHLRAHSAAKRPIACPKCERRFWRRKQLRAHLRRCHPPAPEARPFICGNCGRSFAQWDQLVAHKRVHVAEALEEAAAKALGPRPRGRPAVTAPRPGGDAVDRPFQCACCGKRFRHKPNLIAHRRVHTGERPHQCPECGKRFTNKPYLTSHRRIHTGEKPYPCKECGRRFRHKPNLLSHSKIHKRSEGSAQAAPGPGSPQLPAGPQESAAEPTPAVPLKPAQEPPPGAPPEHPQDPIEAPPSLYSCDDCGRSFRLERFLRAHQRQHTGERPFTCAECGKNFGKKTHLVAHSRVHSGERPFACEECGRRFSQGSHLAAHRRDHAPDRPFVCPDCGKAFRHKPYLAAHRRIHTGEKPYVCPDCGKAFSQKSNLVSHRRIHTGERPYACPDCDRSFSQKSNLITHRKSHIRDGAFCCAICGQTFDDEERLLAHQKKHDV

SEQ ID NO: 2467 - DNA, 3141 bp, Homosapiens
ctggcagttgtgaactcgaacctgccgctgtcgccgcggcggggcggggagcgagagtgggccgcggaggccggccttcgggctccatggacgggcgccgcgtccctgcacagcccgccgcagaggtaaggctggcctctctgcagtcagaggtctgagctctgccatggggataggggtgtctttattactgcagttttctctaacacctgggggctaccggagtgtgggccgaagcaggcgctgcagccgcggaagtatccccaggaacatccccaagaggagctggaaaaagcctcatccccagctctgcagtctccaggcagaggaagaaccgatgctggaacgtcgttgcaggggccccctggccatgggcctggcccagccccgactcctttctgggccctcccaggagtcaccccagaccctggggaaggagtcccgcgggctgaggcaacaaggcacgtcagtggcccagtctggtgcccaagccccaggcagggcccatcgctgtgcccactgtcgaaggcacttccctggctgggtggctctgtggcttcacacccgccggtgccaggcccggctgcccttgccctgccctgagtgtggccgtcgctttcgccatgcccccttcttagcactgcaccgccaggtccatgctgctgccaccccagacctgggctttgcctgccacctctgtgggcagagcttccgaggctgggtggccctggttctgcatctgcgggcccattcagctgcaaagcggcccatcgcttgtcccaaatgcgagagacgcttctggcgacgaaagcagcttcgagctcatctgcggcggtgccaccctcccgccccggaggcccggcccttcatatgcggcaactgtggccggagctttgcccagtgggaccagctagttgcccacaagcgggtgcacgtagctgaggccctggaggaggccgcagccaaggctctggggccccggcccaggggccgccccgcggtgaccgccccccggcccggtggagatgccgtcgaccgccccttccagtgtgcctgttgtggcaagcgcttccggcacaagcccaacttgatcgctcaccgccgcgtgcacacgggcgagcggccccaccagtgccccgagtgcgggaagcgctttaccaataagccctatctgacttcgcaccggcgcatccacaccggcgagaagccctacccgtgcaaagagtgcggccgccgcttccggcacaaacccaacctgctgtctcacagcaagattcacaagcgatccgaggggtcggcccaggccgcccccggcccggggagcccccagctgccagccggcccccaggagtccgcggccgagcccaccccggcggtacctctgaaaccggcccaggagccgccgccaggggccccgccagagcacccgcaggacccgatcgaagcccccccctccctctacagctgcgacgactgcggcaggagcttccggctggagcgcttcctgcgggcccaccagcggcagcacaccggggagcggcccttcacctgcgccgagtgcgggaagaacttcggcaagaagacgcacctggtggcgcactcgcgcgtgcactccggcgagcggcccttcgcctgcgaggagtgcggccgccgcttctcccagggcagccatctggcggcgcatcggcgcgaccacgcccccgatcggcccttcgtgtgtcccgactgcggcaaggccttccgccacaaaccctacctggcggcgcaccggcgcatccacaccggcgagaagccctacgtctgccccgactgcggcaaagccttcagccagaagtccaacctggtgtcgcaccggcgcatccacacgggcgagcggccctacgcctgtcccgactgcgaccgcagcttcagccagaagtccaacctcatcacccaccgcaagagccacatccgggacggcgccttctgctgtgccatctgtggccagaccttcgacgacgaggagagactcctggcccaccagaagaagcacgatgtctgagacggtgggcggggccgtgttggctgagagagggctggggtccttcgtggtgggagtcgcagtgggctgggggtgcctgcctagtgctggagtaggggacaatgggaatcctagaggggatggaagacgcggggagtgagctgggtgggccctgctagcgagagaggtcaaccccggtggccagggaacccacttccaagcgcagggacgccggcctccagctggtgtgtgctaaggctccgtcctgactgccctgtgccctggaaaagcagcaatagcatccgccccttagagccctctggctagaggagccaccagtggaaaggaagaccctccatcctctggtattaacgccttaatgcccctgtcttttactgtaagttacttaagatcatttttggaagcaggcgtggtagagtcctgtaaatgaatgctctgggctagatacagcttggagaacctgctggccttgttagacagcacttgggcctttgccagcagcaagaggtgaagcgaagccactcttacctctcccttcccctcccacctgccccctgcgtaggcacccagacttggagagacccgtctgctgttaatacttccatcctcttccttcccaaagagcagatcccaaggcatttactccttggtctgtctcgctttatctgtcgcccctcccagcgctgagagcctcccctggctgtcagcagcactgtgtccaggctcttgtctgaacaccgcagcccctccttcgctccttccagagctcagcatgtcacggcaaggactgccgcattggtgatggagggccagctgaggggaagttgctggtgagtttccttttctccatttctagcatatggacacctggcctctgcttgagcacttaggtgacaggaacttccgcacctcctgaggccctggatgattctaattgttagaaattctaattgttagaaatccttccttataatgaatgaattctgctttcctataatttctacctattgggccttgttctgttctctggaactaaacagaacaaccatttacccctccttttcaaactagagaataaagatttggttttagaactggtg

SEQ ID NO: 2468 - protein, 624 aa, Homosapiens
MGIGVSLLLQFSLTPGGYRSVGRSRRCSRGSIPRNIPKRSWKKPHPQLCSLQAEEEPMLERRCRGPLAMGLAQPRLLSGPSQESPQTLGKESRGLRQQGTSVAQSGAQAPGRAHRCAHCRRHFPGWVALWLHTRRCQARLPLPCPECGRRFRHAPFLALHRQVHAAATPDLGFACHLCGQSFRGWVALVLHLRAHSAAKRPIACPKCERRFWRRKQLRAHLRRCHPPAPEARPFICGNCGRSFAQWDQLVAHKRVHVAEALEEAAAKALGPRPRGRPAVTAPRPGGDAVDRPFQCACCGKRFRHKPNLIAHRRVHTGERPHQCPECGKRFTNKPYLTSHRRIHTGEKPYPCKECGRRFRHKPNLLSHSKIHKRSEGSAQAAPGPGSPQLPAGPQESAAEPTPAVPLKPAQEPPPGAPPEHPQDPIEAPPSLYSCDDCGRSFRLERFLRAHQRQHTGERPFTCAECGKNFGKKTHLVAHSRVHSGERPFACEECGRRFSQGSHLAAHRRDHAPDRPFVCPDCGKAFRHKPYLAAHRRIHTGEKPYVCPDCGKAFSQKSNLVSHRRIHTGERPYACPDCDRSFSQKSNLITHRKSHIRDGAFCCAICGQTFDDEERLLAHQKKHDV

SEQ ID NO: 2469 - DNA, 3265 bp, Homosapiens
tggcagttgtgaactcgaacctgccgctgtcgccgcggcggggcggggagcgagagtgggccgcggaggccggccttcgggctccatggacgggcgccgcgtccctgcacagcccgccgcagaggtaaggctggcctctctgcagtcagaggtctgagctctgccatggggataggggtgtctttattactgcagttttctctaacacctgggggctaccggagtgtgggccgaagcaggcgctgcagccgcggaagtatccccaggaacatccccaagaggagctggaaaaagcctcatccccagctctgcagtctccaggggagctcagtgtctgtttgtccagcttctcagagttgctgtgcagctcggatgtggcataggaaacagcagacacagggagagggcagcataaggcactgtagggagcagtggccacattttctgcagaggaagaaccgatgctggaacgtcgttgcaggggccccctggccatgggcctggcccagccccgactcctttctgggccctcccaggagtcaccccagaccctggggaaggagtcccgcgggctgaggcaacaaggcacgtcagtggcccagtctggtgcccaagccccaggcagggcccatcgctgtgcccactgtcgaaggcacttccctggctgggtggctctgtggcttcacacccgccggtgccaggcccggctgcccttgccctgccctgagtgtggccgtcgctttcgccatgcccccttcttagcactgcaccgccaggtccatgctgctgccaccccagacctgggctttgcctgccacctctgtgggcagagcttccgaggctgggtggccctggttctgcatctgcgggcccattcagctgcaaagcggcccatcgcttgtcccaaatgcgagagacgcttctggcgacgaaagcagcttcgagctcatctgcggcggtgccaccctcccgccccggaggcccggcccttcatatgcggcaactgtggccggagctttgcccagtgggaccagctagttgcccacaagcgggtgcacgtagctgaggccctggaggaggccgcagccaaggctctggggccccggcccaggggccgccccgcggtgaccgccccccggcccggtggagatgccgtcgaccgccccttccagtgtgcctgttgtggcaagcgcttccggcacaagcccaacttgatcgctcaccgccgcgtgcacacgggcgagcggccccaccagtgccccgagtgcgggaagcgctttaccaataagccctatctgacttcgcaccggcgcatccacaccggcgagaagccctacccgtgcaaagagtgcggccgccgcttccggcacaaacccaacctgctgtctcacagcaagattcacaagcgatccgaggggtcggcccaggccgcccccggcccggggagcccccagctgccagccggcccccaggagtccgcggccgagcccaccccggcggtacctctgaaaccggcccaggagccgccgccaggggccccgccagagcacccgcaggacccgatcgaagcccccccctccctctacagctgcgacgactgcggcaggagcttccggctggagcgcttcctgcgggcccaccagcggcagcacaccggggagcggcccttcacctgcgccgagtgcgggaagaacttcggcaagaagacgcacctggtggcgcactcgcgcgtgcactccggcgagcggcccttcgcctgcgaggagtgcggccgccgcttctcccagggcagccatctggcggcgcatcggcgcgaccacgcccccgatcggcccttcgtgtgtcccgactgcggcaaggccttccgccacaaaccctacctggcggcgcaccggcgcatccacaccggcgagaagccctacgtctgccccgactgcggcaaagccttcagccagaagtccaacctggtgtcgcaccggcgcatccacacgggcgagcggccctacgcctgtcccgactgcgaccgcagcttcagccagaagtccaacctcatcacccaccgcaagagccacatccgggacggcgccttctgctgtgccatctgtggccagaccttcgacgacgaggagagactcctggcccaccagaagaagcacgatgtctgagacggtgggcggggccgtgttggctgagagagggctggggtccttcgtggtgggagtcgcagtgggctgggggtgcctgcctagtgctggagtaggggacaatgggaatcctagaggggatggaagacgcggggagtgagctgggtgggccctgctagcgagagaggtcaaccccggtggccagggaacccacttccaagcgcagggacgccggcctccagctggtgtgtgctaaggctccgtcctgactgccctgtgccctggaaaagcagcaatagcatccgccccttagagccctctggctagaggagccaccagtggaaaggaagaccctccatcctctggtattaacgccttaatgcccctgtcttttactgtaagttacttaagatcatttttggaagcaggcgtggtagagtcctgtaaatgaatgctctgggctagatacagcttggagaacctgctggccttgttagacagcacttgggcctttgccagcagcaagaggtgaagcgaagccactcttacctctcccttcccctcccacctgccccctgcgtaggcacccagacttggagagacccgtctgctgttaatacttccatcctcttccttcccaaagagcagatcccaaggcatttactccttggtctgtctcgctttatctgtcgcccctcccagcgctgagagcctcccctggctgtcagcagcactgtgtccaggctcttgtctgaacaccgcagcccctccttcgctccttccagagctcagcatgtcacggcaaggactgccgcattggtgatggagggccagctgaggggaagttgctggtgagtttccttttctccatttctagcatatggacacctggcctctgcttgagcacttaggtgacaggaacttccgcacctcctgaggccctggatgattctaattgttagaaattctaattgttagaaatccttccttataatgaatgaattctgctttcctataatttctacctattgggccttgttctgttctctggaactaaacagaacaaccatttacccctccttttcaaactagagaataaagatttggttttagaactggtg

SEQ ID NO: 2470 - protein, 136 aa, Homosapiens
MGIGVSLLLQFSLTPGGYRSVGRSRRCSRGSIPRNIPKRSWKKPHPQLCSLQGSSVSVCPASQSCCAARMWHRKQQTQGEGSIRHCREQWPHFLQRKNRCWNVVAGAPWPWAWPSPDSFLGPPRSHPRPWGRSPAG

SEQ ID NO: 2471 - DNA, 4563 bp, Homosapiens
gtgaactcgaacctgccgctgtcgccgcggcggggcggggagcgagagtgggccgcggaggccggccttcgggctccatggacgggcgccgcgtccctgcacagcccgccgcagaggtacggccggggcaggggcgcggggccaccgcgggcccgcggggggccgctccacctgcggggcgcgtgaccgtaaggctggcctctctgcagtcagaggtctgagctctgccatggggataggggtgtctttattactgcagttttctctaacacctgggggctaccggagtgtgggccgaagcaggcgctgcagccgcggaagtatccccaggaacatccccaagaggagctggaaaaagcctcatccccagctctgcagtctccagggtagagtctggcctttgctgtgctcccaaaccacgccacaacaggggtgcacgggcgtccccatcccggcggaaggaaatggccctttctcatatcctggggtcttccctgtgcacagtctgacactgggaatgagtgacctttgtgttccctgagaagagagagtgcgctctagggaatttagaaggatgtgtctggagcttgtgagcaggcacagaagggcccttaggagcctaactgcttccttcctccttccgcggaggaggctcctgtgcaggaatctgggctcccctgagctgtggaagagctgaacatggggcagcccctggcgaggttggggcaggaccgggcaggggactgagattgcagtctcatcttccctccccttctattgccccagtaatctccagcaccccgagggaggcagagccggtgatcaggccccgagggcagcaggctgtgggtgttccttggattcagggagagccttccttcctgcaatgtcctaatttgtgtgggtggaagagggcaggcgggcagaatgggggcacagtctgggcaggcggtggtctggcgttagactgccgggagtagcacccagggctctgctcctgttccccgagaagggctgttctcacttgtcctccagcctcctacggagactgcagttagtgatgctgaaagtgcctcccctgtggggctaggaatgaaaagctatagacacctttttctctgagatctttgcaaacccaggcgctttagaggaaagaacactggcctgggagtttaaagacctgttccctagtcttgattctgctgttggcttactgtgtcaccttgggcaggtctcgtcatctttgatgtctcacagttgcttcatctgttaaacagggagctcagtgtctgtttgtccagcttctcagagttgctgtgcagctcggatgtggcataggaaacagcagacacagggagagggcagcataaggcactgtagggagcagtggccacattttctggtgagtcctgtggcaggaatgtttgtgcattcagcactggagcatttactccctgtctgacactggggtagctgccatgagggggattctagtatcagagtccctcccttctggaagtttccagggcaacaaagacataagacaaacatccttgaaatgttatctaaaaacccaagattgaaataatacataccacacaaggaaacaggagagtagtctagctccatgtccggggctctaggggttcatagatggcagctcctgtccggggctgaggttgggaggggagaaacaggggcagagtgagttggtctctggagtgactgtgcttttccaccctcagcagaggaagaaccgatgctggaacgtcgttgcaggggccccctggccatgggcctggcccagccccgactcctttctgggccctcccaggagtcaccccagaccctggggaaggagtcccgcgggctgaggcaacaaggcacgtcagtggcccagtctggtgcccaagccccaggcagggcccatcgctgtgcccactgtcgaaggcacttccctggctgggtggctctgtggcttcacacccgccggtgccaggcccggctgcccttgccctgccctgagtgtggccgtcgctttcgccatgcccccttcttagcactgcaccgccaggtccatgctgctgccaccccagacctgggctttgcctgccacctctgtgggcagagcttccgaggctgggtggccctggttctgcatctgcgggcccattcagctgcaaagcggcccatcgcttgtcccaaatgcgagagacgcttctggcgacgaaagcagcttcgagctcatctgcggcggtgccaccctcccgccccggaggcccggcccttcatatgcggcaactgtggccggagctttgcccagtgggaccagctagttgcccacaagcgggtgcacgtagctgaggccctggaggaggccgcagccaaggctctggggccccggcccaggggccgccccgcggtgaccgccccccggcccggtggagatgccgtcgaccgccccttccagtgtgcctgttgtggcaagcgcttccggcacaagcccaacttgatcgctcaccgccgcgtgcacacgggcgagcggccccaccagtgccccgagtgcgggaagcgctttaccaataagccctatctgacttcgcaccggcgcatccacaccggcgagaagccctacccgtgcaaagagtgcggccgccgcttccggcacaaacccaacctgctgtctcacagcaagattcacaagcgatccgaggggtcggcccaggccgcccccggcccggggagcccccagctgccagccggcccccaggagtccgcggccgagcccaccccggcggtacctctgaaaccggcccaggagccgccgccaggggccccgccagagcacccgcaggacccgatcgaagcccccccctccctctacagctgcgacgactgcggcaggagcttccggctggagcgcttcctgcgggcccaccagcggcagcacaccggggagcggcccttcacctgcgccgagtgcgggaagaacttcggcaagaagacgcacctggtggcgcactcgcgcgtgcactccggcgagcggcccttcgcctgcgaggagtgcggccgccgcttctcccagggcagccatctggcggcgcatcggcgcgaccacgcccccgatcggcccttcgtgtgtcccgactgcggcaaggccttccgccacaaaccctacctggcggcgcaccggcgcatccacaccggcgagaagccctacgtctgccccgactgcggcaaagccttcagccagaagtccaacctggtgtcgcaccggcgcatccacacgggcgagcggccctacgcctgtcccgactgcgaccgcagcttcagccagaagtccaacctcatcacccaccgcaagagccacatccgggacggcgccttctgctgtgccatctgtggccagaccttcgacgacgaggagagactcctggcccaccagaagaagcacgatgtctgagacggtgggcggggccgtgttggctgagagagggctggggtccttcgtggtgggagtcgcagtgggctgggggtgcctgcctagtgctggagtaggggacaatgggaatcctagaggggatggaagacgcggggagtgagctgggtgggccctgctagcgagagaggtcaaccccggtggccagggaacccacttccaagcgcagggacgccggcctccagctggtgtgtgctaaggctccgtcctgactgccctgtgccctggaaaagcagcaatagcatccgccccttagagccctctggctagaggagccaccagtggaaaggaagaccctccatcctctggtattaacgccttaatgcccctgtcttttactgtaagttacttaagatcatttttggaagcaggcgtggtagagtcctgtaaatgaatgctctgggctagatacagcttggagaacctgctggccttgttagacagcacttgggcctttgccagcagcaagaggtgaagcgaagccactcttacctctcccttcccctcccacctgccccctgcgtaggcacccagacttggagagacccgtctgctgttaatacttccatcctcttccttcccaaagagcagatcccaaggcatttactccttggtctgtctcgctttatctgtcgcccctcccagcgctgagagcctcccctggctgtcagcagcactgtgtccaggctcttgtctgaacaccgcagcccctccttcgctccttccagagctcagcatgtcacggcaaggactgccgcattggtgatggagggccagctgaggggaagttgctggtgagtttccttttctccatttctagcatatggacacctggcctctgcttgagcacttaggtgacaggaacttccgcacctcctgaggccctggatgattctaattgttagaaattctaattgttagaaatccttccttataatgaatgaattctgctttcctataatttctacctattgggccttgttctgttctctggaactaaacagaacaaccatttacccctccttttcaaactagagaataaagatttggttttagaactggtg

SEQ ID NO: 2472 - protein, 47 aa, Homosapiens
MDGRRVPAQPAAEVRPGQGRGATAGPRGAAPPAGRVTVRLASLQSEV

SEQ ID NO: 2473 - DNA, 3653 bp, Homosapiens
cgaacctgccgctgtcgccgcggcggggcggggagcgagagtgggccgcggaggccggccttcgggctccatggacgggcgccgcgtccctgcacagcccgccgcagaggtacggccggggcaggggcgcggggccaccgcgggcccgcggggggccgctccacctgcggggcgcgtgaccgtgagtgtgcgcgaccgtgtgtgagtgcgcggggggggacgctgctggatctgcgggggtgggggagcgcacctgcgcacaggctccgcgagctgcgccgtgcgtgggacccgaaatggctcactcgcaagaacgggacccgtgtgcccgggagcgtggacggaggacacgcatcagtacaaaagggcggtgtggggcttctgccacccgcggccagccgcgatgcggaaggggattctgacggagtcgtggtcacaccagctggccctgcgcagccccatgggaaataggcctggaattcctgtcgggaggaggctgggggaaggggagccagcagggattccagagttcctgccataggccggcctttggccatcagggaaagcccagactctggccacagaatggagaattcgttccgtgaccttaccagggaagaaagtgaccccgaaagacagcagtgtgcttccttgttgaaggggcacattcatttattaatccaatgtccattaaggtcactctgccaggcaggatgtggggcttatggctggtgcgtgtggctttgtggggggaggggttgtggctggtgaggacacaaagctgactgccctagaggagctcagagcctcacttctgttttctcttccctccccacagaggaagaaccgatgctggaacgtcgttgcaggggccccctggccatgggcctggcccagccccgactcctttctgggccctcccaggagtcaccccagaccctggggaaggagtcccgcgggctgaggcaacaaggcacgtcagtggcccagtctggtgcccaagccccaggcagggcccatcgctgtgcccactgtcgaaggcacttccctggctgggtggctctgtggcttcacacccgccggtgccaggcccggctgcccttgccctgccctgagtgtggccgtcgctttcgccatgcccccttcttagcactgcaccgccaggtccatgctgctgccaccccagacctgggctttgcctgccacctctgtgggcagagcttccgaggctgggtggccctggttctgcatctgcgggcccattcagctgcaaagcggcccatcgcttgtcccaaatgcgagagacgcttctggcgacgaaagcagcttcgagctcatctgcggcggtgccaccctcccgccccggaggcccggcccttcatatgcggcaactgtggccggagctttgcccagtgggaccagctagttgcccacaagcgggtgcacgtagctgaggccctggaggaggccgcagccaaggctctggggccccggcccaggggccgccccgcggtgaccgccccccggcccggtggagatgccgtcgaccgccccttccagtgtgcctgttgtggcaagcgcttccggcacaagcccaacttgatcgctcaccgccgcgtgcacacgggcgagcggccccaccagtgccccgagtgcgggaagcgctttaccaataagccctatctgacttcgcaccggcgcatccacaccggcgagaagccctacccgtgcaaagagtgcggccgccgcttccggcacaaacccaacctgctgtctcacagcaagattcacaagcgatccgaggggtcggcccaggccgcccccggcccggggagcccccagctgccagccggcccccaggagtccgcggccgagcccaccccggcggtacctctgaaaccggcccaggagccgccgccaggggccccgccagagcacccgcaggacccgatcgaagcccccccctccctctacagctgcgacgactgcggcaggagcttccggctggagcgcttcctgcgggcccaccagcggcagcacaccggggagcggcccttcacctgcgccgagtgcgggaagaacttcggcaagaagacgcacctggtggcgcactcgcgcgtgcactccggcgagcggcccttcgcctgcgaggagtgcggccgccgcttctcccagggcagccatctggcggcgcatcggcgcgaccacgcccccgatcggcccttcgtgtgtcccgactgcggcaaggccttccgccacaaaccctacctggcggcgcaccggcgcatccacaccggcgagaagccctacgtctgccccgactgcggcaaagccttcagccagaagtccaacctggtgtcgcaccggcgcatccacacgggcgagcggccctacgcctgtcccgactgcgaccgcagcttcagccagaagtccaacctcatcacccaccgcaagagccacatccgggacggcgccttctgctgtgccatctgtggccagaccttcgacgacgaggagagactcctggcccaccagaagaagcacgatgtctgagacggtgggcggggccgtgttggctgagagagggctggggtccttcgtggtgggagtcgcagtgggctgggggtgcctgcctagtgctggagtaggggacaatgggaatcctagaggggatggaagacgcggggagtgagctgggtgggccctgctagcgagagaggtcaaccccggtggccagggaacccacttccaagcgcagggacgccggcctccagctggtgtgtgctaaggctccgtcctgactgccctgtgccctggaaaagcagcaatagcatccgccccttagagccctctggctagaggagccaccagtggaaaggaagaccctccatcctctggtattaacgccttaatgcccctgtcttttactgtaagttacttaagatcatttttggaagcaggcgtggtagagtcctgtaaatgaatgctctgggctagatacagcttggagaacctgctggccttgttagacagcacttgggcctttgccagcagcaagaggtgaagcgaagccactcttacctctcccttcccctcccacctgccccctgcgtaggcacccagacttggagagacccgtctgctgttaatacttccatcctcttccttcccaaagagcagatcccaaggcatttactccttggtctgtctcgctttatctgtcgcccctcccagcgctgagagcctcccctggctgtcagcagcactgtgtccaggctcttgtctgaacaccgcagcccctccttcgctccttccagagctcagcatgtcacggcaaggactgccgcattggtgatggagggccagctgaggggaagttgctggtgagtttccttttctccatttctagcatatggacacctggcctctgcttgagcacttaggtgacaggaacttccgcacctcctgaggccctggatgattctaattgttagaaattctaattgttagaaatccttccttataatgaatgaattctgctttcctataatttctacctattgggccttgttctgttctctggaactaaacagaacaaccatttacccctccttttcaaactagagaataaagatttggttttagaactggtg

SEQ ID NO: 2474 - protein, 79 aa, Homosapiens
MAGACGFVGGGVVAGEDTKLTALEELRASLLFSLPSPQRKNRCWNVVAGAPWPWAWPSPDSFLGPPRSHPRPWGRSPAG

SEQ ID NO: 2475 - DNA, 3833 bp, Homosapiens
ggcggggcggggagcgagagtgggccgcggaggccggccttcgggctccatggacgggcgccgcgtccctgcacagcccgccgcagaggtacggccggggcaggggcgcggggccaccgcgggcccgcggggggccgctccacctgcggggcgcgtgaccgtgagtgtgcgcgaccgtgtgtgagtgcgcggggggggacgctgctggatctgcgggggtgggggagcgcacctgcgcacaggctccgcgagctgcgccgtgcgtgggacccgaaatggctcactcgcaagaacgggacccgtgtgcccgggagcgtggacggaggacacgcatcagtacaaaagggcggtgtggggcttctgccacccgcggccagccgcgatgcggaaggggattctgacggagtcgtggtcacaccagctggccctgcgcagccccatgggaaataggcctggaattcctgtcgggaggaggctgggggaaggggagccagcagggattccagagttcctgccataggccggcctttggccatcagggaaagcccagactctggccacagaatggagaattcgttccgtgaccttaccagggaagaaagtgaccccgaaagacagcagtgtgcttccttgttgaaggggcacattcatttattaatccaatgtccattaaggtcactctgccaggcaggatgtggggcttatggctggtgcgtgtggctttgtggggggaggggttgtggctggtgaggacacaaagctgactgccctagaggagctcagagcctcacttctgttttctcttccctccccacaggtaaggctggcctctctgcagtcagaggtctgagctctgccatggggataggggtgtctttattactgcagttttctctaacacctgggggctaccggagtgtgggccgaagcaggcgctgcagccgcggaagtatccccaggaacatccccaagaggagctggaaaaagcctcatccccagctctgcagtctccaggcagaggaagaaccgatgctggaacgtcgttgcaggggccccctggccatgggcctggcccagccccgactcctttctgggccctcccaggagtcaccccagaccctggggaaggagtcccgcgggctgaggcaacaaggcacgtcagtggcccagtctggtgcccaagccccaggcagggcccatcgctgtgcccactgtcgaaggcacttccctggctgggtggctctgtggcttcacacccgccggtgccaggcccggctgcccttgccctgccctgagtgtggccgtcgctttcgccatgcccccttcttagcactgcaccgccaggtccatgctgctgccaccccagacctgggctttgcctgccacctctgtgggcagagcttccgaggctgggtggccctggttctgcatctgcgggcccattcagctgcaaagcggcccatcgcttgtcccaaatgcgagagacgcttctggcgacgaaagcagcttcgagctcatctgcggcggtgccaccctcccgccccggaggcccggcccttcatatgcggcaactgtggccggagctttgcccagtgggaccagctagttgcccacaagcgggtgcacgtagctgaggccctggaggaggccgcagccaaggctctggggccccggcccaggggccgccccgcggtgaccgccccccggcccggtggagatgccgtcgaccgccccttccagtgtgcctgttgtggcaagcgcttccggcacaagcccaacttgatcgctcaccgccgcgtgcacacgggcgagcggccccaccagtgccccgagtgcgggaagcgctttaccaataagccctatctgacttcgcaccggcgcatccacaccggcgagaagccctacccgtgcaaagagtgcggccgccgcttccggcacaaacccaacctgctgtctcacagcaagattcacaagcgatccgaggggtcggcccaggccgcccccggcccggggagcccccagctgccagccggcccccaggagtccgcggccgagcccaccccggcggtacctctgaaaccggcccaggagccgccgccaggggccccgccagagcacccgcaggacccgatcgaagcccccccctccctctacagctgcgacgactgcggcaggagcttccggctggagcgcttcctgcgggcccaccagcggcagcacaccggggagcggcccttcacctgcgccgagtgcgggaagaacttcggcaagaagacgcacctggtggcgcactcgcgcgtgcactccggcgagcggcccttcgcctgcgaggagtgcggccgccgcttctcccagggcagccatctggcggcgcatcggcgcgaccacgcccccgatcggcccttcgtgtgtcccgactgcggcaaggccttccgccacaaaccctacctggcggcgcaccggcgcatccacaccggcgagaagccctacgtctgccccgactgcggcaaagccttcagccagaagtccaacctggtgtcgcaccggcgcatccacacgggcgagcggccctacgcctgtcccgactgcgaccgcagcttcagccagaagtccaacctcatcacccaccgcaagagccacatccgggacggcgccttctgctgtgccatctgtggccagaccttcgacgacgaggagagactcctggcccaccagaagaagcacgatgtctgagacggtgggcggggccgtgttggctgagagagggctggggtccttcgtggtgggagtcgcagtgggctgggggtgcctgcctagtgctggagtaggggacaatgggaatcctagaggggatggaagacgcggggagtgagctgggtgggccctgctagcgagagaggtcaaccccggtggccagggaacccacttccaagcgcagggacgccggcctccagctggtgtgtgctaaggctccgtcctgactgccctgtgccctggaaaagcagcaatagcatccgccccttagagccctctggctagaggagccaccagtggaaaggaagaccctccatcctctggtattaacgccttaatgcccctgtcttttactgtaagttacttaagatcatttttggaagcaggcgtggtagagtcctgtaaatgaatgctctgggctagatacagcttggagaacctgctggccttgttagacagcacttgggcctttgccagcagcaagaggtgaagcgaagccactcttacctctcccttcccctcccacctgccccctgcgtaggcacccagacttggagagacccgtctgctgttaatacttccatcctcttccttcccaaagagcagatcccaaggcatttactccttggtctgtctcgctttatctgtcgcccctcccagcgctgagagcctcccctggctgtcagcagcactgtgtccaggctcttgtctgaacaccgcagcccctccttcgctccttccagagctcagcatgtcacggcaaggactgccgcattggtgatggagggccagctgaggggaagttgctggtgagtttccttttctccatttctagcatatggacacctggcctctgcttgagcacttaggtgacaggaacttccgcacctcctgaggccctggatgattctaattgttagaaattctaattgttagaaatccttccttataatgaatgaattctgctttcctataatttctacctattgggccttgttctgttctctggaactaaacagaacaaccatttacccctccttttcaaactagagaataaagatttggttttagaactggtg

SEQ ID NO: 2476 - protein, 624 aa, Homosapiens; identical to SEQ ID NO: 2468

SEQ ID NO: 2477 - DNA, 2968 bp, Homosapiens
cggggagcgagagtgggccgcggaggccggccttcgggctccatggacgggcgccgcgtccctgcacagcccgccgcagaggtacggccggggcaggggcgcggggccaccgcgggcccgcggggggccgctccacctgcggggcgcgtgaccaggaagaaccgatgctggaacgtcgttgcaggggccccctggccatgggcctggcccagccccgactcctttctgggccctcccaggagtcaccccagaccctggggaaggagtcccgcgggctgaggcaacaaggcacgtcagtggcccagtctggtgcccaagccccaggcagggcccatcgctgtgcccactgtcgaaggcacttccctggctgggtggctctgtggcttcacacccgccggtgccaggcccggctgcccttgccctgccctgagtgtggccgtcgctttcgccatgcccccttcttagcactgcaccgccaggtccatgctgctgccaccccagacctgggctttgcctgccacctctgtgggcagagcttccgaggctgggtggccctggttctgcatctgcgggcccattcagctgcaaagcggcccatcgcttgtcccaaatgcgagagacgcttctggcgacgaaagcagcttcgagctcatctgcggcggtgccaccctcccgccccggaggcccggcccttcatatgcggcaactgtggccggagctttgcccagtgggaccagctagttgcccacaagcgggtgcacgtagctgaggccctggaggaggccgcagccaaggctctggggccccggcccaggggccgccccgcggtgaccgccccccggcccggtggagatgccgtcgaccgccccttccagtgtgcctgttgtggcaagcgcttccggcacaagcccaacttgatcgctcaccgccgcgtgcacacgggcgagcggccccaccagtgccccgagtgcgggaagcgctttaccaataagccctatctgacttcgcaccggcgcatccacaccggcgagaagccctacccgtgcaaagagtgcggccgccgcttccggcacaaacccaacctgctgtctcacagcaagattcacaagcgatccgaggggtcggcccaggccgcccccggcccggggagcccccagctgccagccggcccccaggagtccgcggccgagcccaccccggcggtacctctgaaaccggcccaggagccgccgccaggggccccgccagagcacccgcaggacccgatcgaagcccccccctccctctacagctgcgacgactgcggcaggagcttccggctggagcgcttcctgcgggcccaccagcggcagcacaccggggagcggcccttcacctgcgccgagtgcgggaagaacttcggcaagaagacgcacctggtggcgcactcgcgcgtgcactccggcgagcggcccttcgcctgcgaggagtgcggccgccgcttctcccagggcagccatctggcggcgcatcggcgcgaccacgcccccgatcggcccttcgtgtgtcccgactgcggcaaggccttccgccacaaaccctacctggcggcgcaccggcgcatccacaccggcgagaagccctacgtctgccccgactgcggcaaagccttcagccagaagtccaacctggtgtcgcaccggcgcatccacacgggcgagcggccctacgcctgtcccgactgcgaccgcagcttcagccagaagtccaacctcatcacccaccgcaagagccacatccgggacggcgccttctgctgtgccatctgtggccagaccttcgacgacgaggagagactcctggcccaccagaagaagcacgatgtctgagacggtgggcggggccgtgttggctgagagagggctggggtccttcgtggtgggagtcgcagtgggctgggggtgcctgcctagtgctggagtaggggacaatgggaatcctagaggggatggaagacgcggggagtgagctgggtgggccctgctagcgagagaggtcaaccccggtggccagggaacccacttccaagcgcagggacgccggcctccagctggtgtgtgctaaggctccgtcctgactgccctgtgccctggaaaagcagcaatagcatccgccccttagagccctctggctagaggagccaccagtggaaaggaagaccctccatcctctggtattaacgccttaatgcccctgtcttttactgtaagttacttaagatcatttttggaagcaggcgtggtagagtcctgtaaatgaatgctctgggctagatacagcttggagaacctgctggccttgttagacagcacttgggcctttgccagcagcaagaggtgaagcgaagccactcttacctctcccttcccctcccacctgccccctgcgtaggcacccagacttggagagacccgtctgctgttaatacttccatcctcttccttcccaaagagcagatcccaaggcatttactccttggtctgtctcgctttatctgtcgcccctcccagcgctgagagcctcccctggctgtcagcagcactgtgtccaggctcttgtctgaacaccgcagcccctccttcgctccttccagagctcagcatgtcacggcaaggactgccgcattggtgatggagggccagctgaggggaagttgctggtgagtttccttttctccatttctagcatatggacacctggcctctgcttgagcacttaggtgacaggaacttccgcacctcctgaggccctggatgattctaattgttagaaattctaattgttagaaatccttccttataatgaatgaattctgctttcctataatttctacctattgggccttgttctgttctctggaactaaacagaacaaccatttacccctccttttcaaactagagaataaagatttggttttagaactggtg

SEQ ID NO: 2478 - protein, 78 aa, Homosapiens
MDGRRVPAQPAAEVRPGQGRGATAGPRGAAPPAGRVTRKNRCWNVVAGAPWPWAWPSPDSFLGPPRSHPRPWGRSPAG

SEQ ID NO: 2479 - DNA, 3277 bp, Homosapiens
ccgcggaggccggccttcgggctccatggacgggcgccgcgtccctgcacagcccgccgcagaggtacggccggggcaggggcgcggggccaccgcgggcccgcggggggccgctccacctgcggggcgcgtgaccgtaaggctggcctctctgcagtcagaggtctgagctctgccatggggataggggtgtctttattactgcagttttctctaacacctgggggctaccggagtgtgggccgaagcaggcgctgcagccgcggaagtatccccaggaacatccccaagaggagctggaaaaagcctcatccccagctctgcagtctccaggggagctcagtgtctgtttgtccagcttctcagagttgctgtgcagctcggatgtggcataggaaacagcagacacagggagagggcagcataaggcactgtagggagcagtggccacattttctgcagaggaagaaccgatgctggaacgtcgttgcaggggccccctggccatgggcctggcccagccccgactcctttctgggccctcccaggagtcaccccagaccctggggaaggagtcccgcgggctgaggcaacaaggcacgtcagtggcccagtctggtgcccaagccccaggcagggcccatcgctgtgcccactgtcgaaggcacttccctggctgggtggctctgtggcttcacacccgccggtgccaggcccggctgcccttgccctgccctgagtgtggccgtcgctttcgccatgcccccttcttagcactgcaccgccaggtccatgctgctgccaccccagacctgggctttgcctgccacctctgtgggcagagcttccgaggctgggtggccctggttctgcatctgcgggcccattcagctgcaaagcggcccatcgcttgtcccaaatgcgagagacgcttctggcgacgaaagcagcttcgagctcatctgcggcggtgccaccctcccgccccggaggcccggcccttcatatgcggcaactgtggccggagctttgcccagtgggaccagctagttgcccacaagcgggtgcacgtagctgaggccctggaggaggccgcagccaaggctctggggccccggcccaggggccgccccgcggtgaccgccccccggcccggtggagatgccgtcgaccgccccttccagtgtgcctgttgtggcaagcgcttccggcacaagcccaacttgatcgctcaccgccgcgtgcacacgggcgagcggccccaccagtgccccgagtgcgggaagcgctttaccaataagccctatctgacttcgcaccggcgcatccacaccggcgagaagccctacccgtgcaaagagtgcggccgccgcttccggcacaaacccaacctgctgtctcacagcaagattcacaagcgatccgaggggtcggcccaggccgcccccggcccggggagcccccagctgccagccggcccccaggagtccgcggccgagcccaccccggcggtacctctgaaaccggcccaggagccgccgccaggggccccgccagagcacccgcaggacccgatcgaagcccccccctccctctacagctgcgacgactgcggcaggagcttccggctggagcgcttcctgcgggcccaccagcggcagcacaccggggagcggcccttcacctgcgccgagtgcgggaagaacttcggcaagaagacgcacctggtggcgcactcgcgcgtgcactccggcgagcggcccttcgcctgcgaggagtgcggccgccgcttctcccagggcagccatctggcggcgcatcggcgcgaccacgcccccgatcggcccttcgtgtgtcccgactgcggcaaggccttccgccacaaaccctacctggcggcgcaccggcgcatccacaccggcgagaagccctacgtctgccccgactgcggcaaagccttcagccagaagtccaacctggtgtcgcaccggcgcatccacacgggcgagcggccctacgcctgtcccgactgcgaccgcagcttcagccagaagtccaacctcatcacccaccgcaagagccacatccgggacggcgccttctgctgtgccatctgtggccagaccttcgacgacgaggagagactcctggcccaccagaagaagcacgatgtctgagacggtgggcggggccgtgttggctgagagagggctggggtccttcgtggtgggagtcgcagtgggctgggggtgcctgcctagtgctggagtaggggacaatgggaatcctagaggggatggaagacgcggggagtgagctgggtgggccctgctagcgagagaggtcaaccccggtggccagggaacccacttccaagcgcagggacgccggcctccagctggtgtgtgctaaggctccgtcctgactgccctgtgccctggaaaagcagcaatagcatccgccccttagagccctctggctagaggagccaccagtggaaaggaagaccctccatcctctggtattaacgccttaatgcccctgtcttttactgtaagttacttaagatcatttttggaagcaggcgtggtagagtcctgtaaatgaatgctctgggctagatacagcttggagaacctgctggccttgttagacagcacttgggcctttgccagcagcaagaggtgaagcgaagccactcttacctctcccttcccctcccacctgccccctgcgtaggcacccagacttggagagacccgtctgctgttaatacttccatcctcttccttcccaaagagcagatcccaaggcatttactccttggtctgtctcgctttatctgtcgcccctcccagcgctgagagcctcccctggctgtcagcagcactgtgtccaggctcttgtctgaacaccgcagcccctccttcgctccttccagagctcagcatgtcacggcaaggactgccgcattggtgatggagggccagctgaggggaagttgctggtgagtttccttttctccatttctagcatatggacacctggcctctgcttgagcacttaggtgacaggaacttccgcacctcctgaggccctggatgattctaattgttagaaattctaattgttagaaatccttccttataatgaatgaattctgctttcctataatttctacctattgggccttgttctgttctctggaactaaacagaacaaccatttacccctccttttcaaactagagaataaagatttggttttagaactggtg

SEQ ID NO: 2480 - protein, 136 aa, Homosapiens; identical to SEQ ID NO: 2470

SEQ ID NO: 2481 - DNA, 2281 bp, Homosapiens
cttcgggctccatggacgggcgccgcgtccctgcacagcccgccgcagagcagaggaagaaccgatgctggaacgtcgttgcaggggccccctggccatgggcctggcccagccccgactcctttctgggccctcccaggagtcaccccagaccctggggaaggagtcccgcgggctgaggcaacaaggcacgtcattgtggcaagcgcttccggcacaagcccaacttgatcgctcaccgccgcgtgcacacgggcgagcggccccaccagtgccccgagtgcgggaagcgctttaccaataagccctatctgacttcgcaccggcgcatccacaccggcgagaagccctacccgtgcaaagagtgcggccgccgcttccggcacaaacccaacctgctgtctcacagcaagattcacaagcgatccgaggggtcggcccaggccgcccccggcccggggagcccccagctgccagccggcccccaggagtccgcggccgagcccaccccggcggtacctctgaaaccggcccaggagccgccgccaggggccccgccagagcacccgcaggacccgatcgaagcccccccctccctctacagctgcgacgactgcggcaggagcttccggctggagcgcttcctgcgggcccaccagcggcagcacaccggggagcggcccttcacctgcgccgagtgcgggaagaacttcggcaagaagacgcacctggtggcgcactcgcgcgtgcactccggcgagcggcccttcgcctgcgaggagtgcggccgccgcttctcccagggcagccatctggcggcgcatcggcgcgaccacgcccccgatcggcccttcgtgtgtcccgactgcggcaaggccttccgccacaaaccctacctggcggcgcaccggcgcatccacaccggcgagaagccctacgtctgccccgactgcggcaaagccttcagccagaagtccaacctggtgtcgcaccggcgcatccacacgggcgagcggccctacgcctgtcccgactgcgaccgcagcttcagccagaagtccaacctcatcacccaccgcaagagccacatccgggacggcgccttctgctgtgccatctgtggccagaccttcgacgacgaggagagactcctggcccaccagaagaagcacgatgtctgagacggtgggcggggccgtgttggctgagagagggctggggtccttcgtggtgggagtcgcagtgggctgggggtgcctgcctagtgctggagtaggggacaatgggaatcctagaggggatggaagacgcggggagtgagctgggtgggccctgctagcgagagaggtcaaccccggtggccagggaacccacttccaagcgcagggacgccggcctccagctggtgtgtgctaaggctccgtcctgactgccctgtgccctggaaaagcagcaatagcatccgccccttagagccctctggctagaggagccaccagtggaaaggaagaccctccatcctctggtattaacgccttaatgcccctgtcttttactgtaagttacttaagatcatttttggaagcaggcgtggtagagtcctgtaaatgaatgctctgggctagatacagcttggagaacctgctggccttgttagacagcacttgggcctttgccagcagcaagaggtgaagcgaagccactcttacctctcccttcccctcccacctgccccctgcgtaggcacccagacttggagagacccgtctgctgttaatacttccatcctcttccttcccaaagagcagatcccaaggcatttactccttggtctgtctcgctttatctgtcgcccctcccagcgctgagagcctcccctggctgtcagcagcactgtgtccaggctcttgtctgaacaccgcagcccctccttcgctccttccagagctcagcatgtcacggcaaggactgccgcattggtgatggagggccagctgaggggaagttgctggtgagtttccttttctccatttctagcatatggacacctggcctctgcttgagcacttaggtgacaggaacttccgcacctcctgaggccctggatgattctaattgttagaaattctaattgttagaaatccttccttataatgaatgaattctgctttcctataatttctacctattgggccttgttctgttctctggaactaaacagaacaaccatttacccctccttttcaaactagagaataaagatttggttttagaactggtg

SEQ ID NO: 2482 - protein, 79 aa, Homosapiens
MLERRCRGPLAMGLAQPRLLSGPSQESPQTLGKESRGLRQQGTSLWQALPAQAQLDRSPPRAHGRAAPPVPRVREALYQ

SEQ ID NO: 2483 - DNA, 3717 bp, Homosapiens
ggctccgcgagctgcgccgtgcgtgggacccgaaatggctcactcgcaagaacgggacccgtgtgcccgggagcgtggacggaggacacgcatcagtacaaaagggcggtgtggggcttctgccacccgcggccagccgcgatgcggaaggggattctgacggagtcgtggtcacaccagctggccctgcgcagccccatgggaaataggcctggaattcctgtcgggaggaggctgggggaaggggagccagcagggattccagagttcctgccataggccggcctttggccatcagggaaagcccagactctggccacagaatggagaattcgttccgtgaccttaccagggaagaaagtgaccccgaaagacagcagtgtgcttccttgttgaaggggcacattcatttattaatccaatgtccattaaggtcactctgccaggcaggatgtggggcttatggctggtgcgtgtggctttgtggggggaggggttgtggctggtgaggacacaaagctgactgccctagaggagctcagagcctcacttctgttttctcttccctccccacaggtaaggctggcctctctgcagtcagaggtctgagctctgccatggggataggggtgtctttattactgcagttttctctaacacctgggggctaccggagtgtgggccgaagcaggcgctgcagccgcggaagtatccccaggaacatccccaagaggagctggaaaaagcctcatccccagctctgcagtctccaggggagctcagtgtctgtttgtccagcttctcagagttgctgtgcagctcggatgtggcataggaaacagcagacacagggagagggcagcataaggcactgtagggagcagtggccacattttctgcagaggaagaaccgatgctggaacgtcgttgcaggggccccctggccatgggcctggcccagccccgactcctttctgggccctcccaggagtcaccccagaccctggggaaggagtcccgcgggctgaggcaacaaggcacgtcagtggcccagtctggtgcccaagccccaggcagggcccatcgctgtgcccactgtcgaaggcacttccctggctgggtggctctgtggcttcacacccgccggtgccaggcccggctgcccttgccctgccctgagtgtggccgtcgctttcgccatgcccccttcttagcactgcaccgccaggtccatgctgctgccaccccagacctgggctttgcctgccacctctgtgggcagagcttccgaggctgggtggccctggttctgcatctgcgggcccattcagctgcaaagcggcccatcgcttgtcccaaatgcgagagacgcttctggcgacgaaagcagcttcgagctcatctgcggcggtgccaccctcccgccccggaggcccggcccttcatatgcggcaactgtggccggagctttgcccagtgggaccagctagttgcccacaagcgggtgcacgtagctgaggccctggaggaggccgcagccaaggctctggggccccggcccaggggccgccccgcggtgaccgccccccggcccggtggagatgccgtcgaccgccccttccagtgtgcctgttgtggcaagcgcttccggcacaagcccaacttgatcgctcaccgccgcgtgcacacgggcgagcggccccaccagtgccccgagtgcgggaagcgctttaccaataagccctatctgacttcgcaccggcgcatccacaccggcgagaagccctacccgtgcaaagagtgcggccgccgcttccggcacaaacccaacctgctgtctcacagcaagattcacaagcgatccgaggggtcggcccaggccgcccccggcccggggagcccccagctgccagccggcccccaggagtccgcggccgagcccaccccggcggtacctctgaaaccggcccaggagccgccgccaggggccccgccagagcacccgcaggacccgatcgaagcccccccctccctctacagctgcgacgactgcggcaggagcttccggctggagcgcttcctgcgggcccaccagcggcagcacaccggggagcggcccttcacctgcgccgagtgcgggaagaacttcggcaagaagacgcacctggtggcgcactcgcgcgtgcactccggcgagcggcccttcgcctgcgaggagtgcggccgccgcttctcccagggcagccatctggcggcgcatcggcgcgaccacgcccccgatcggcccttcgtgtgtcccgactgcggcaaggccttccgccacaaaccctacctggcggcgcaccggcgcatccacaccggcgagaagccctacgtctgccccgactgcggcaaagccttcagccagaagtccaacctggtgtcgcaccggcgcatccacacgggcgagcggccctacgcctgtcccgactgcgaccgcagcttcagccagaagtccaacctcatcacccaccgcaagagccacatccgggacggcgccttctgctgtgccatctgtggccagaccttcgacgacgaggagagactcctggcccaccagaagaagcacgatgtctgagacggtgggcggggccgtgttggctgagagagggctggggtccttcgtggtgggagtcgcagtgggctgggggtgcctgcctagtgctggagtaggggacaatgggaatcctagaggggatggaagacgcggggagtgagctgggtgggccctgctagcgagagaggtcaaccccggtggccagggaacccacttccaagcgcagggacgccggcctccagctggtgtgtgctaaggctccgtcctgactgccctgtgccctggaaaagcagcaatagcatccgccccttagagccctctggctagaggagccaccagtggaaaggaagaccctccatcctctggtattaacgccttaatgcccctgtcttttactgtaagttacttaagatcatttttggaagcaggcgtggtagagtcctgtaaatgaatgctctgggctagatacagcttggagaacctgctggccttgttagacagcacttgggcctttgccagcagcaagaggtgaagcgaagccactcttacctctcccttcccctcccacctgccccctgcgtaggcacccagacttggagagacccgtctgctgttaatacttccatcctcttccttcccaaagagcagatcccaaggcatttactccttggtctgtctcgctttatctgtcgcccctcccagcgctgagagcctcccctggctgtcagcagcactgtgtccaggctcttgtctgaacaccgcagcccctccttcgctccttccagagctcagcatgtcacggcaaggactgccgcattggtgatggagggccagctgaggggaagttgctggtgagtttccttttctccatttctagcatatggacacctggcctctgcttgagcacttaggtgacaggaacttccgcacctcctgaggccctggatgattctaattgttagaaattctaattgttagaaatccttccttataatgaatgaattctgctttcctataatttctacctattgggccttgttctgttctctggaactaaacagaacaaccatttacccctccttttcaaactagagaataaagatttggttttagaactggtg

SEQ ID NO: 2484 - protein, 136 aa, Homosapiens; identical to SEQ ID NO: 2470

SEQ ID NO: 2485 - DNA, 3299 bp, Homosapiens
catggggataggggtgtctttattactgcagttttctctaacacctgggggctaccggagtgtgggccgaagcaggcgctgcagccgcggaagtatccccaggaacatccccaagaggagctggaaaaagcctcatccccagctctgcagtctccagggtagagtctggcctttgctgtgctcccaaaccacgccacaacaggggtgcacgggcgtccccatcccggcggaaggaaatggccctttctcatatcctggggtcttccctgtgcacagtctgacactgggaatgagtgacctttgtgttccctgagaagagagagtgcgctctagggaatttagaaggatgtgtctggagcttgtgagcaggcacagaagggcccttaggagcctaactgcttccttcctccttccgcggaggaggctcctgtgcaggaatctgggctcccctgagctgtggaagagctgaacatggggcagcccctggcgaggttggggcaggaccgggcaggggactgagattgcagtctcatcttccctccccttctattgccccagtaatctccagcaccccgagggaggcagagccggtgatcaggccccgagggcagcaggctgtgggtgttccttggattcagggagagccttccttcctgcaatgtcctaatttgtgtgggtggaagagggcaggcgggcagaatgggggcacagtctgggcaggcggtggtctggcgttagactgccgggagtagcacccagggctctgctcctgttccccgagaagggctgttctcacttgtcctccagcctcctacggagactgcagttagtgatgctgaaagtgcctcccctgtggggctaggaatgaaaagctatagacacctttttctctgagatctttgcaaacccaggcgctttagaggaaagaacactggcctgggagtttaaagacctgttccctagtcttgattctgctgttggcttactgtgtcaccttgggcaggtctcgtcatctttgatgtctcacagttgcttcattgtggccggagctttgcccagtgggaccagctagttgcccacaagcgggtgcacgtagctgaggccctggaggaggccgcagccaaggctctggggccccggcccaggggccgccccgcggtgaccgccccccggcccggtggagatgccgtcgaccgccccttccagtgtgcctgttgtggcaagcgcttccggcacaagcccaacttgatcgctcaccgccgcgtgcacacgggcgagcggccccaccagtgccccgagtgcgggaagcgctttaccaataagccctatctgacttcgcaccggcgcatccacaccggcgagaagccctacccgtgcaaagagtgcggccgccgcttccggcacaaacccaacctgctgtctcacagcaagattcacaagcgatccgaggggtcggcccaggccgcccccggcccggggagcccccagctgccagccggcccccaggagtccgcggccgagcccaccccggcggtacctctgaaaccggcccaggagccgccgccaggggccccgccagagcacccgcaggacccgatcgaagcccccccctccctctacagctgcgacgactgcggcaggagcttccggctggagcgcttcctgcgggcccaccagcggcagcacaccggggagcggcccttcacctgcgccgagtgcgggaagaacttcggcaagaagacgcacctggtggcgcactcgcgcgtgcactccggcgagcggcccttcgcctgcgaggagtgcggccgccgcttctcccagggcagccatctggcggcgcatcggcgcgaccacgcccccgatcggcccttcgtgtgtcccgactgcggcaaggccttccgccacaaaccctacctggcggcgcaccggcgcatccacaccggcgagaagccctacgtctgccccgactgcggcaaagccttcagccagaagtccaacctggtgtcgcaccggcgcatccacacgggcgagcggccctacgcctgtcccgactgcgaccgcagcttcagccagaagtccaacctcatcacccaccgcaagagccacatccgggacggcgccttctgctgtgccatctgtggccagaccttcgacgacgaggagagactcctggcccaccagaagaagcacgatgtctgagacggtgggcggggccgtgttggctgagagagggctggggtccttcgtggtgggagtcgcagtgggctgggggtgcctgcctagtgctggagtaggggacaatgggaatcctagaggggatggaagacgcggggagtgagctgggtgggccctgctagcgagagaggtcaaccccggtggccagggaacccacttccaagcgcagggacgccggcctccagctggtgtgtgctaaggctccgtcctgactgccctgtgccctggaaaagcagcaatagcatccgccccttagagccctctggctagaggagccaccagtggaaaggaagaccctccatcctctggtattaacgccttaatgcccctgtcttttactgtaagttacttaagatcatttttggaagcaggcgtggtagagtcctgtaaatgaatgctctgggctagatacagcttggagaacctgctggccttgttagacagcacttgggcctttgccagcagcaagaggtgaagcgaagccactcttacctctcccttcccctcccacctgccccctgcgtaggcacccagacttggagagacccgtctgctgttaatacttccatcctcttccttcccaaagagcagatcccaaggcatttactccttggtctgtctcgctttatctgtcgcccctcccagcgctgagagcctcccctggctgtcagcagcactgtgtccaggctcttgtctgaacaccgcagcccctccttcgctccttccagagctcagcatgtcacggcaaggactgccgcattggtgatggagggccagctgaggggaagttgctggtgagtttccttttctccatttctagcatatggacacctggcctctgcttgagcacttaggtgacaggaacttccgcacctcctgaggccctggatgattctaattgttagaaattctaattgttagaaatccttccttataatgaatgaattctgctttcctataatttctacctattgggccttgttctgttctctggaactaaacagaacaaccatttacccctccttttcaaactagagaataaagatttggttttagaactggtg

SEQ ID NO: 2486 - protein, 103 aa, Homosapiens [sequence omitted]

SEQ ID NO: 2487 - DNA, 1836 bp, Homosapiens
ttccgcggaggaggctcctgtgcaggaatctgggctcccctgagctgtggaagagctgaacatggggcagcccctggcgaggttggggcaggaccgggcaggggactgagattgcagtctcatcttccctccccttctattgccccagtaatctccagcaccccgagggaggcagagccggtgatcaggccccgagggcagcaggctgtgggtgttccttggattcagggagagccttccttcctgcgccgagtgcgggaagaacttcggcaagaagacgcacctggtggcgcactcgcgcgtgcactccggcgagcggcccttcgcctgcgaggagtgcggccgccgcttctcccagggcagccatctggcggcgcatcggcgcgaccacgcccccgatcggcccttcgtgtgtcccgactgcggcaaggccttccgccacaaaccctacctggcggcgcaccggcgcatccacaccggcgagaagccctacgtctgccccgactgcggcaaagccttcagccagaagtccaacctggtgtcgcaccggcgcatccacacgggcgagcggccctacgcctgtcccgactgcgaccgcagcttcagccagaagtccaacctcatcacccaccgcaagagccacatccgggacggcgccttctgctgtgccatctgtggccagaccttcgacgacgaggagagactcctggcccaccagaagaagcacgatgtctgagacggtgggcggggccgtgttggctgagagagggctggggtccttcgtggtgggagtcgcagtgggctgggggtgcctgcctagtgctggagtaggggacaatgggaatcctagaggggatggaagacgcggggagtgagctgggtgggccctgctagcgagagaggtcaaccccggtggccagggaacccacttccaagcgcagggacgccggcctccagctggtgtgtgctaaggctccgtcctgactgccctgtgccctggaaaagcagcaatagcatccgccccttagagccctctggctagaggagccaccagtggaaaggaagaccctccatcctctggtattaacgccttaatgcccctgtcttttactgtaagttacttaagatcatttttggaagcaggcgtggtagagtcctgtaaatgaatgctctgggctagatacagcttggagaacctgctggccttgttagacagcacttgggcctttgccagcagcaagaggtgaagcgaagccactcttacctctcccttcccctcccacctgccccctgcgtaggcacccagacttggagagacccgtctgctgttaatacttccatcctcttccttcccaaagagcagatcccaaggcatttactccttggtctgtctcgctttatctgtcgcccctcccagcgctgagagcctcccctggctgtcagcagcactgtgtccaggctcttgtctgaacaccgcagcccctccttcgctccttccagagctcagcatgtcacggcaaggactgccgcattggtgatggagggccagctgaggggaagttgctggtgagtttccttttctccatttctagcatatggacacctggcctctgcttgagcacttaggtgacaggaacttccgcacctcctgaggccctggatgattctaattgttagaaattctaattgttagaaatccttccttataatgaatgaattctgctttcctataatttctacctattgggccttgttctgttctctggaactaaacagaacaaccatttacccctccttttcaaactagagaataaagatttggttttagaactggtg

SEQ ID NO: 2488 - protein, 48 aa, Homosapiens [sequence omitted]

SEQ ID NO: 2489 - DNA, 1869 bp, Homosapiens
ttcagggagagccttccttcctgcaatgtcctaatttgtgtgggtggaagagggcaggcgggcagaatgggggcacagtctgggcaggcggtggtctggcgttagactgccgggagtagcacccagggctctgctcctgttccccgagaagggctgttctcacttgtcctccagcctcctacggagactgcactgcgacgactgcggcaggagcttccggctggagcgcttcctgcgggcccaccagcggcagcacaccggggagcggcccttcacctgcgccgagtgcgggaagaacttcggcaagaagacgcacctggtggcgcactcgcgcgtgcactccggcgagcggcccttcgcctgcgaggagtgcggccgccgcttctcccagggcagccatctggcggcgcatcggcgcgaccacgcccccgatcggcccttcgtgtgtcccgactgcggcaaggccttccgccacaaaccctacctggcggcgcaccggcgcatccacaccggcgagaagccctacgtctgccccgactgcggcaaagccttcagccagaagtccaacctggtgtcgcaccggcgcatccacacgggcgagcggccctacgcctgtcccgactgcgaccgcagcttcagccagaagtccaacctcatcacccaccgcaagagccacatccgggacggcgccttctgctgtgccatctgtggccagaccttcgacgacgaggagagactcctggcccaccagaagaagcacgatgtctgagacggtgggcggggccgtgttggctgagagagggctggggtccttcgtggtgggagtcgcagtgggctgggggtgcctgcctagtgctggagtaggggacaatgggaatcctagaggggatggaagacgcggggagtgagctgggtgggccctgctagcgagagaggtcaaccccggtggccagggaacccacttccaagcgcagggacgccggcctccagctggtgtgtgctaaggctccgtcctgactgccctgtgccctggaaaagcagcaatagcatccgccccttagagccctctggctagaggagccaccagtggaaaggaagaccctccatcctctggtattaacgccttaatgcccctgtcttttactgtaagttacttaagatcatttttggaagcaggcgtggtagagtcctgtaaatgaatgctctgggctagatacagcttggagaacctgctggccttgttagacagcacttgggcctttgccagcagcaagaggtgaagcgaagccactcttacctctcccttcccctcccacctgccccctgcgtaggcacccagacttggagagacccgtctgctgttaatacttccatcctcttccttcccaaagagcagatcccaaggcatttactccttggtctgtctcgctttatctgtcgcccctcccagcgctgagagcctcccctggctgtcagcagcactgtgtccaggctcttgtctgaacaccgcagcccctccttcgctccttccagagctcagcatgtcacggcaaggactgccgcattggtgatggagggccagctgaggggaagttgctggtgagtttccttttctccatttctagcatatggacacctggcctctgcttgagcacttaggtgacaggaacttccgcacctcctgaggccctggatgattctaattgttagaaattctaattgttagaaatccttccttataatgaatgaattctgctttcctataatttctacctattgggccttgttctgttctctggaactaaacagaacaaccatttacccctccttttcaaactagagaataaagatttggttttagaactggtg

SEQ ID NO: 2490 - protein, 48 aa, Homosapiens [sequence omitted]

SEQ ID NO: 2491 - DNA, 2916 bp, Homosapiens
cctacggagactgcagttagtgatgctgaaagtgcctcccctgtggggctaggaatgaaaagctatagacacctttttctctgagatctttgcaaacccaggcgctttagaggaaagaacactggcctgggagtttaaagacctgttccctagtcttgattctgctgttggcttactgtgtcaccttgggcaggtctcgtcatctttgatgtctcacagttgcttcatctgttaaacagggagctcagtgtctgtttgtccagcttctcagagttgctgtgcagctcggatgtggcataggaaacagcagacacagggagagggcagcataaggcactgtagggagcagtggccacattttctggtgagtcctgtggcaggaatgtttgtgcattcagcactggagcatttactccctgtctgacactggggtagctgccatgagggggattctagtatcagagtccctcccttctggaagtttccagggcaacaaagacataagacaaacatccttgaaatgttatctaaaaacccaagattgaaataatacataccacacaaggaaacaggagagtagtctagctccatgtccggggctctaggggttcatagatggcagctcccggaggcccggcccttcatatgcggcaactgtggccggagctttgcccagtgggaccagctagttgcccacaagcgggtgcacgtagctgaggccctggaggaggccgcagccaaggctctggggccccggcccaggggccgccccgcggtgaccgccccccggcccggtggagatgccgtcgaccgccccttccagtgtgcctgttgtggcaagcgcttccggcacaagcccaacttgatcgctcaccgccgcgtgcacacgggcgagcggccccaccagtgccccgagtgcgggaagcgctttaccaataagccctatctgacttcgcaccggcgcatccacaccggcgagaagccctacccgtgcaaagagtgcggccgccgcttccggcacaaacccaacctgctgtctcacagcaagattcacaagcgatccgaggggtcggcccaggccgcccccggcccggggagcccccagctgccagccggcccccaggagtccgcggccgagcccaccccggcggtacctctgaaaccggcccaggagccgccgccaggggccccgccagagcacccgcaggacccgatcgaagcccccccctccctctacagctgcgacgactgcggcaggagcttccggctggagcgcttcctgcgggcccaccagcggcagcacaccggggagcggcccttcacctgcgccgagtgcgggaagaacttcggcaagaagacgcacctggtggcgcactcgcgcgtgcactccggcgagcggcccttcgcctgcgaggagtgcggccgccgcttctcccagggcagccatctggcggcgcatcggcgcgaccacgcccccgatcggcccttcgtgtgtcccgactgcggcaaggccttccgccacaaaccctacctggcggcgcaccggcgcatccacaccggcgagaagccctacgtctgccccgactgcggcaaagccttcagccagaagtccaacctggtgtcgcaccggcgcatccacacgggcgagcggccctacgcctgtcccgactgcgaccgcagcttcagccagaagtccaacctcatcacccaccgcaagagccacatccgggacggcgccttctgctgtgccatctgtggccagaccttcgacgacgaggagagactcctggcccaccagaagaagcacgatgtctgagacggtgggcggggccgtgttggctgagagagggctggggtccttcgtggtgggagtcgcagtgggctgggggtgcctgcctagtgctggagtaggggacaatgggaatcctagaggggatggaagacgcggggagtgagctgggtgggccctgctagcgagagaggtcaaccccggtggccagggaacccacttccaagcgcagggacgccggcctccagctggtgtgtgctaaggctccgtcctgactgccctgtgccctggaaaagcagcaatagcatccgccccttagagccctctggctagaggagccaccagtggaaaggaagaccctccatcctctggtattaacgccttaatgcccctgtcttttactgtaagttacttaagatcatttttggaagcaggcgtggtagagtcctgtaaatgaatgctctgggctagatacagcttggagaacctgctggccttgttagacagcacttgggcctttgccagcagcaagaggtgaagcgaagccactcttacctctcccttcccctcccacctgccccctgcgtaggcacccagacttggagagacccgtctgctgttaatacttccatcctcttccttcccaaagagcagatcccaaggcatttactccttggtctgtctcgctttatctgtcgcccctcccagcgctgagagcctcccctggctgtcagcagcactgtgtccaggctcttgtctgaacaccgcagcccctccttcgctccttccagagctcagcatgtcacggcaaggactgccgcattggtgatggagggccagctgaggggaagttgctggtgagtttccttttctccatttctagcatatggacacctggcctctgcttgagcacttaggtgacaggaacttccgcacctcctgaggccctggatgattctaattgttagaaattctaattgttagaaatccttccttataatgaatgaattctgctttcctataatttctacctattgggccttgttctgttctctggaactaaacagaacaaccatttacccctccttttcaaactagagaataaagatttggttttagaactggtg

SEQ ID NO: 2492 - protein, 408 aa, Homosapiens
MSGALGVHRWQLPEARPFICGNCGRSFAQWDQLVAHKRVHVAEALEEAAAKALGPRPRGRPAVTAPRPGGDAVDRPFQCACCGKRFRHKPNLIAHRRVHTGERPHQCPECGKRFTNKPYLTSHRRIHTGEKPYPCKECGRRFRHKPNLLSHSKIHKRSEGSAQAAPGPGSPQLPAGPQESAAEPTPAVPLKPAQEPPPGAPPEHPQDPIEAPPSLYSCDDCGRSFRLERFLRAHQRQHTGERPFTCAECGKNFGKKTHLVAHSRVHSGERPFACEECGRRFSQGSHLAAHRRDHAPDRPFVCPDCGKAFRHKPYLAAHRRIHTGEKPYVCPDCGKAFSQKSNLVSHRRIHTGERPYACPDCDRSFSQKSNLITHRKSHIRDGAFCCAICGQTFDDEERLLAHQKKHDV

SEQ ID NO: 2493 - DNA, 2747 bp, Homosapiens
cttgaaatgttatctaaaaacccaagattgaaataatacataccacacaaggaaacaggagagtagtctagctccatgtccggggctctaggggttcatagatggcagctcctgtccggggctgaggttgggaggggagaaacaggggcagagtgagttggtctctggagtgactgtgcttttccaccctcagcagaggaagaaccgatgctggaacgtcgttgcaggggccccctggccatgggcctggcccagccccgactcctttctgggccctcccaggagtcaccccagaccctggggaaggagtcccgcgggctgaggcaacaaggcacgtcagtggcccagtctggtgcccaagccccaggcagggcccatcgctgtgcccactgtcgaaggcacttccctggctgggtggctctgtggcttcacacccgccggtgccaggcccggctgcccttgccccggcccttcatatgcggcaactgtggccggagctttgcccagtgggaccagctagttgcccacaagcgggtgcacgtagctgaggccctggaggaggccgcagccaaggctctggggccccggcccaggggccgccccgcggtgaccgccccccggcccggtggagatgccgtcgaccgccccttccagtgtgcctgttgtggcaagcgcttccggcacaagcccaacttgatcgctcaccgccgcgtgcacacgggcgagcggccccaccagtgccccgagtgcgggaagcgctttaccaataagccctatctgacttcgcaccggcgcatccacaccggcgagaagccctacccgtgcaaagagtgcggccgccgcttccggcacaaacccaacctgctgtctcacagcaagattcacaagcgatccgaggggtcggcccaggccgcccccggcccggggagcccccagctgccagccggcccccaggagtccgcggccgagcccaccccggcggtacctctgaaaccggcccaggagccgccgccaggggccccgccagagcacccgcaggacccgatcgaagcccccccctccctctacagctgcgacgactgcggcaggagcttccggctggagcgcttcctgcgggcccaccagcggcagcacaccggggagcggcccttcacctgcgccgagtgcgggaagaacttcggcaagaagacgcacctggtggcgcactcgcgcgtgcactccggcgagcggcccttcgcctgcgaggagtgcggccgccgcttctcccagggcagccatctggcggcgcatcggcgcgaccacgcccccgatcggcccttcgtgtgtcccgactgcggcaaggccttccgccacaaaccctacctggcggcgcaccggcgcatccacaccggcgagaagccctacgtctgccccgactgcggcaaagccttcagccagaagtccaacctggtgtcgcaccggcgcatccacacgggcgagcggccctacgcctgtcccgactgcgaccgcagcttcagccagaagtccaacctcatcacccaccgcaagagccacatccgggacggcgccttctgctgtgccatctgtggccagaccttcgacgacgaggagagactcctggcccaccagaagaagcacgatgtctgagacggtgggcggggccgtgttggctgagagagggctggggtccttcgtggtgggagtcgcagtgggctgggggtgcctgcctagtgctggagtaggggacaatgggaatcctagaggggatggaagacgcggggagtgagctgggtgggccctgctagcgagagaggtcaaccccggtggccagggaacccacttccaagcgcagggacgccggcctccagctggtgtgtgctaaggctccgtcctgactgccctgtgccctggaaaagcagcaatagcatccgccccttagagccctctggctagaggagccaccagtggaaaggaagaccctccatcctctggtattaacgccttaatgcccctgtcttttactgtaagttacttaagatcatttttggaagcaggcgtggtagagtcctgtaaatgaatgctctgggctagatacagcttggagaacctgctggccttgttagacagcacttgggcctttgccagcagcaagaggtgaagcgaagccactcttacctctcccttcccctcccacctgccccctgcgtaggcacccagacttggagagacccgtctgctgttaatacttccatcctcttccttcccaaagagcagatcccaaggcatttactccttggtctgtctcgctttatctgtcgcccctcccagcgctgagagcctcccctggctgtcagcagcactgtgtccaggctcttgtctgaacaccgcagcccctccttcgctccttccagagctcagcatgtcacggcaaggactgccgcattggtgatggagggccagctgaggggaagttgctggtgagtttccttttctccatttctagcatatggacacctggcctctgcttgagcacttaggtgacaggaacttccgcacctcctgaggccctggatgattctaattgttagaaattctaattgttagaaatccttccttataatgaatgaattctgctttcctataatttctacctattgggccttgttctgttctctggaactaaacagaacaaccatttacccctccttttcaaactagagaataaagatttggttttagaactggtg

SEQ ID NO: 2494 - protein, 479 aa, Homosapiens
MLERRCRGPLAMGLAQPRLLSGPSQESPQTLGKESRGLRQQGTSVAQSGAQAPGRAHRCAHCRRHFPGWVALWLHTRRCQARLPLPRPFICGNCGRSFAQWDQLVAHKRVHVAEALEEAAAKALGPRPRGRPAVTAPRPGGDAVDRPFQCACCGKRFRHKPNLIAHRRVHTGERPHQCPECGKRFTNKPYLTSHRRIHTGEKPYPCKECGRRFRHKPNLLSHSKIHKRSEGSAQAAPGPGSPQLPAGPQESAAEPTPAVPLKPAQEPPPGAPPEHPQDPIEAPPSLYSCDDCGRSFRLERFLRAHQRQHTGERPFTCAECGKNFGKKTHLVAHSRVHSGERPFACEECGRRFSQGSHLAAHRRDHAPDRPFVCPDCGKAFRHKPYLAAHRRIHTGEKPYVCPDCGKAFSQKSNLVSHRRIHTGERPYACPDCDRSFSQKSNLITHRKSHIRDGAFCCAICGQTFDDEERLLAHQKKHDV

SEQ ID NO: 2495 - DNA, 2874 bp, Homosapiens
gggagaaacaggggcagagtgagttggtctctggagtgactgtgcttttccaccctcagcagaggaagaaccgatgctggaacgtcgttgcaggggccccctggccatgggcctggcccagccccgactcctttctgggccctcccaggagtcaccccagaccctggggaaggagtcccgcgggctgaggcaacaaggcacgtcagtggcccagtctggtgcccaagccccaggcagggcccatcgctgtgcccactgtcgaaggcacttccctggctgggtggctctgtggcttcacacccgccggtgccaggcccggctgcccttgccctgccctgagtgtggccgtcgctttcgccatgcccccttcttagcactgcaccgccaggtccatgctgctgccaccccagacctgggctttgcctgccacctctgtgggcagagcttccgaggctgggtggccctggttctgcatctgcgggcccattcagctgcaaagcggcccatcgcttgtcccaaatgcgagagacgcttctggcgacgaaagcagcttcgagctcatctgcggcggtgccaccctcccgccccggaggcccggcccttcatatgcggcaactgtggccggagctttgcccagtgggaccagctagttgcccacaagcgggtgcacgtagctgaggccctggaggaggccgcagccaaggctctggggccccggcccaggggccgccccgcggtgaccgccccccggcccggtggagatgccgtcgaccgccccttccagtgtgcctgttgtggcaagcgcttccggcacaagcccaacttgatcgctcaccgccgcgtgcacacgggcgagcggccccaccagtgccccgagtgcgggaagcgctttaccaataagccctatctgacttcgcaccggcgcatccacaccggcgagaagccctacccgtgcaaagagtgcggccgccgcttccggcacaaacccaacctgctgtctcacagcaagattcacaagcgatccgaggggtcggcccaggccgcccccggcccggggagcccccagctgccagccggcccccaggagtccgcggccgagcccaccccggcggtacctctgaaaccggcccaggagccgccgccaggggccccgccagagcacccgcaggacccgatcgaagcccccccctccctctacagctgcgacgactgcggcaggagcttccggctggagcgcttcctgcgggcccaccagcggcagcacaccggggagcggcccttcacctgcgccgagtgcgggaagaacttcggcaagaagacgcacctggtggcgcactcgcgcgtgcactccggcgagcggcccttcgcctgcgaggagtgcggccgccgcttctcccagggcagccatctggcggcgcatcggcgcgaccacgcccccgatcggcccttcgtgtgtcccgactgcggcaaggccttccgccacaaaccctacctggcggcgcaccggcgcatccacaccggcgagaagccctacgtctgccccgactgcggcaaagccttcagccagaagtccaacctggtgtcgcaccggcgcatccacacgggcgagcggccctacgcctgtcccgactgcgaccgcagcttcagccagaagtccaacctcatcacccaccgcaagagccacatccgggacggcgccttctgctgtgccatctgtggccagaccttcgacgacgaggagagactcctggcccaccagaagaagcacgatgtctgagacggtgggcggggccgtgttggctgagagagggctggggtccttcgtggtgggagtcgcagtgggctgggggtgcctgcctagtgctggagtaggggacaatgggaatcctagaggggatggaagacgcggggagtgagctgggtgggccctgctagcgagagaggtcaaccccggtggccagggaacccacttccaagcgcagggacgccggcctccagctggtgtgtgctaaggctccgtcctgactgccctgtgccctggaaaagcagcaatagcatccgccccttagagccctctggctagaggagccaccagtggaaaggaagaccctccatcctctggtattaacgccttaatgcccctgtcttttactgtaagttacttaagatcatttttggaagcaggcgtggtagagtcctgtaaatgaatgctctgggctagatacagcttggagaacctgctggccttgttagacagcacttgggcctttgccagcagcaagaggtgaagcgaagccactcttacctctcccttcccctcccacctgccccctgcgtaggcacccagacttggagagacccgtctgctgttaatacttccatcctcttccttcccaaagagcagatcccaaggcatttactccttggtctgtctcgctttatctgtcgcccctcccagcgctgagagcctcccctggctgtcagcagcactgtgtccaggctcttgtctgaacaccgcagcccctccttcgctccttccagagctcagcatgtcacggcaaggactgccgcattggtgatggagggccagctgaggggaagttgctggtgagtttccttttctccatttctagcatatggacacctggcctctgcttgagcacttaggtgacaggaacttccgcacctcctgaggccctggatgattctaattgttagaaattctaattgttagaaatccttccttataatgaatgaattctgctttcctataatttctacctattgggccttgttctgttctctggaactaaacagaacaaccatttacccctccttttcaaactagagaataaagatttggttttagaactg

SEQ ID NO: 2496 - protein, 567 aa, Homosapiens; identical to SEQ ID NO: 2466

SEQ ID NO: 2497 - DNA, 1023 bp, Homosapiens
agggagaggtaagagtggcttcgcttcacctcttgctgctggcaaaggcccaagtgctgtctaacaaggccagcaggttctccaagctgtatctagcccagagcattcatttacaggactctaccacgcctgcttccaaaaatgatcttaagtaacttacagtaaaagacaggggcattaaggcgttaataccagaggatggagggtcttcctttccactggtggctcctctagccagagggctctaaggggcggatgctattgctgcttttccagggcacagggcagtcaggacggagccttagcacacaccagctggaggccggcgtccctgcgcttggaagtgggttccctggccaccggggttgacctctctcgctagcagggcccacccagctcactccccgcgtcttccatcccctctaggattcccattgtcccctactccagcactaggcaggcacccccagcccactgcgactcccaccacgaaggaccccagccctctctcagccaacacggccccgcccaccgtctcagacatcgtgcttcttctggtgggccaggagtctctcctcgtcgtcgaaggtctggccacagatggcacagcagaaggcgccgtcccggatgtggctcttgcggtgggtgatgaggttggacttctggctgaagctgcggtcgcagtcgggacaggcgtagggccgctcgcccgtgtggatgcgccggtgcgacaccaggttggacttctggctgaaggctttgccgcagtcggggcagacgtagggcttctcgccggtgtggatgcgccggtgcgccgccaggtagggtttgtggcggaaggccttgccgcagtcgggacacacgaagggccgatcgggggcgtggtcgcgccgatgcgccggtttcagaggtaccgccggggtgggctcggccgcggactcctgggggccggctggcagctgggggctccccgggccgggggcggcctgggccgacccctcggatcgcttgtgaatcttgctg

SEQ ID NO: 2498 - protein, 42 aa, Homosapiens
MRRFQRYRRGGLGRGLLGAGWQLGAPRAGGGLGRPLGSLVNL

SEQ ID NO: 2499 - DNA, 1113 bp, Homosapiens
cgtgtgtcccgactgcggcaaggccttccgccacaaaccctacctggcggcgcaccggcgcatccacaccggcgagaagccctacgtctgccccgactgcggcaaagccttcagccagaagtccaacctggtgtcgcaccggcgcatccacacgggcgagcggccctacgcctgtcccgactgcgaccgcagcttcagccagaagtccaacctcatcacccaccgcaagagccacatccgggacggcgccttctgctgtgccatctgtggccagaccttcgacgacgaggagagactcctggcccaccagaagaagcacgatgtctgagacggtgggcggggccgtgttggctgagagagggctggggtccttcgtggtgggagtcgcagtgggctgggggtgcctgcctagtgctggagtaggggacaatgggaatcctagaggggatggaagacgcggggagtgagctgggtgggccctgctagcgagagaggtcaaccccggtggccagggaacccacttccaagcgcagggacgccggcctccagctggtgtgtgctaaggctccgtcctgactgccctgtgccctggaaaagcagcaatagcatccgccccttagagccctctggctagaggagccaccagtggaaaggaagaccctccatcctctggtattaacgccttaatgcccctgtcttttactgtaagttacttaagatcatttttggaagcaggcgctcttgtctgaacaccgcagcccctccttcgctccttccagagctcagcatgtcacggcaaggactgccgcattggtgatggagggccagctgaggggaagttgctggtgagtttccttttctccatttctagcatatggacacctggcctctgcttgagcacttaggtgacaggaacttccgcacctcctgaggccctggatgattctaattgttagaaattctaattgttagaaatccttccttataatgaatgaattctgctttcctataatttctacctattgggccttgttctgttctctggaactaaacagaacaaccatttacccctccttttcaaactagagaataaagatttggttttagaactgg

SEQ ID NO: 2500 - protein, 48 aa, Homosapiens [sequence omitted]

SEQ ID NO: 2501 - DNA, 663 bp, Homosapiens
gtcgcagtgggctgggggtgcctgcctagtgctggagtaggggacaatgggaatcctagaggggatggaagacgcggggagtgagctgggtgggccctgctagcgagagaggtcaaccccggtggccagggaacccacttccaagcgcagggacgccggcctccagctggtgtgtgctaaggctccgtcctgactgccctgtgccctggaaaagcagcaatagcatccgccccttagagccctctggctagaggagccaccagtggaaaggaagaccctccatcctctggtattaacgccttaatgcccccctccttcgctccttccagagctcagcatgtcacggcaaggactgccgcattggtgatggagggccagctgaggggaagttgctggtgagtttccttttctccatttctagcatatggacacctggcctctgcttgagcacttaggtgacaggaacttccgcacctcctgaggccctggatgattctaattgttagaaattctaattgttagaaatccttccttataatgaatgaattctgctttcctataatttctacctattgggccttgttctgttctctggaactaaacagaacaaccatttacccctccttttcaaactagagaataaagatttggttttagaactgg

SEQ ID NO: 2502 - protein, 31 aa, Homosapiens
MPPSFAPSRAQHVTARTAALVMEGQLRGSCW

SEQ ID NO: 2503 - DNA, 2277 bp, Homosapiens
ggccagggccgggagcccggtgcccaagtcgccctcggggtggcagttcccgttaaccttagccacaaagtcaaagatggcaggaaagggacacagccggcgctgatgctgggaggcctccagggatggagagtggcctggctggcaacggcacaggagctgggctggtgatgaaggtcaagcaggagaagccggagcggctgctgcagacgctggcgccgcaggccatgcttgtggagaaggacaaggagaacatatttcagcagcaccggggcctcccgccacgccagaccatggggcggcctcgagccctggggggacaggaggagtctgggagtccaaggtgggcccctcccactgagcaggatgcggggctggcaggccgggctcccgggtcagcctccggccccctgagcccctcgctttcctccggcgagggtcactttgtatgcctggactgcgggaagaggttcagctggtggtcgtccctgaagatccaccagcgcacccacaccggggagaagccgtacctctgcggcaagtgcggcaagagcttcagccagaagccgaacctggcgcgccaccagcggcaccacacgggcgagcgacccttctgctgccccgagtgcgcgcggcgcttcagccagaagcagcacctgctcaagcaccagaagacccactcccggcccgccacccactcgtgccccgagtgcgagcgctgcttccgtcaccaggtgggcctccgcatccaccagcgcgcgcacgcccgggaccgccagggctcccgcgccggcctgcacgagctgattcaggacgcggcggcgcgccgggcctgtcgcctgcagccggggccgccgcgggggcgccccgagtgggcctggctggggctctgccagggctggtggggccagcccggggcccgggccgcggtctccggccccgaggggccgggcgagccgcgccagttcatctgcaacgagtgtggcaagagcttcacctggtggtcgtcgctgaacatccaccagcgcatccacactggcgagcgcccctatgcgtgccccgagtgcggccgccgcttcagccagaagcccaacttgacgcggcacctgcgcaaccacacaggcgagcgcccgcacccctgcccgcactgtggccgcggcttccgccagaagcagcacctgctcaagcacctgcgcacgcacctgcccggcgcccaggctgcgccctgccccagctgcggtaagagctgccgcagccgcgccgcgctgcgcgcccaccagcgcgcccacgctgtcgctgagcccgccgttccggccggggaaccgggcgaccagccgcaggccgaggccatcccgggcttggccgcgaggccgcggagctcccaacggtccccgggggcccgggacacgctgtggggccggggacaagcgggcctcgctgggcctggcgagccgcgccagttcatctgcaacgagtgcggcaagagcttctcgtggtggtcggcgctcaccatccaccagcgcatccacacgggtgagcggccctacccgtgccccgagtgcggccgccgcttcagccagaagcccaacctgacgcggcaccggcgcaaccacacaggcgagcggccctacctgtgtcccgcctgcggccgcggcttcagccagaagcagcacctgctcaagcaccagcgcgtgcaccgcgcggcccctgcgtgcagccccaaggaggaggcgcgctagtggactggacctcagcggacccgtggtggtgcgggggatgtttgcggggtgtgtgtggggagtgggggtggccaggattgctggctcttagaaccccttagagcgggaccggtggattccttaaggctctgaagggctgagaacagttctagaagcgtcccaaagggtgctgggaaaggtcccagcgtgggttgagggaggagggaagatccgagttcctcaccgcgggccgggatgtgaccaccctcttcagaggttggaccccaggcttcaagcaccgagtgaggggtctgttggggacgctgggagagtctctggtgtgaagtggcttaggtctggactggtcagctgtggcaccagccggtcctgcccacgcttcaggatggccgggggctgcccctgtgggagagttgccaagactcggcgataccaaggatggaagccagaggctgtggcgagggagagccaagcatattcccagcaccagggccactgctggcacgtcgtagacatccaataaatatttttggaaggagtg

SEQ ID NO: 2504 - protein, 537 aa, Homosapiens
MESGLAGNGTGAGLVMKVKQEKPERLLQTLAPQAMLVEKDKENIFQQHRGLPPRQTMGRPRALGGQEESGSPRWAPPTEQDAGLAGRAPGSASGPLSPSLSSGEGHFVCLDCGKRFSWWSSLKIHQRTHTGEKPYLCGKCGKSFSQKPNLARHQRHHTGERPFCCPECARRFSQKQHLLKHQKTHSRPATHSCPECERCFRHQVGLRIHQRAHARDRQGSRAGLHELIQDAAARRACRLQPGPPRGRPEWAWLGLCQGWWGQPGARAAVSGPEGPGEPRQFICNECGKSFTWWSSLNIHQRIHTGERPYACPECGRRFSQKPNLTRHLRNHTGERPHPCPHCGRGFRQKQHLLKHLRTHLPGAQAAPCPSCGKSCRSRAALRAHQRAHAVAEPAVPAGEPGDQPQAEAIPGLAARPRSSQRSPGARDTLWGRGQAGLAGPGEPRQFICNECGKSFSWWSALTIHQRIHTGERPYPCPECGRRFSQKPNLTRHRRNHTGERPYLCPACGRGFSQKQHLLKHQRVHRAAPACSPKEEAR

SEQ ID NO: 2505 - DNA, 1217 bp, Homosapiens
agttcccgttaaccttagccacaaagtcaaagatggcaggaaagggacacagccggcgctgatgctgggaggcctccagggatggagagtggcctggctggcaacggcacaggagctgggctggtgatgaaggtcaagcaggagaagccggagcggctgctgcagacgctggcgccgcaggccatgcttgtggagaaggacaaggagaacatatttcagcagcaccggggcctcccgccacgccagaccatggggcggcctcgagccctggggggacaggaggagtctgggagtccaaggtgggcccctcccactgagcaggatgcggggctggcaggccgggctcccgggtcagcctccggccccctgagcccctcgctttcctccggcgagggtcactttgtatgcctggactgcgggaagaggttcagctggtggtcgtccctgaagatccaccagcgcacccacaccggggagaagccgtacctctgcggcaagtgcggcaagagcttcagccagaagccgaacctggcgcgccaccagcggcaccacacgggcgagcgacccttctgctgccccgagtgcgcgcggcggcttcagccagaagcagcacctgctcaagcaccagcgcgtgcaccgcgcggcccctgcgtgcagccccaaggaggaggcgcgctagtggactggacctcagcggacccgtggtggtgcgggggatgtttgcggggtgtgtgtggggagtgggggtggccaggattgctggctcttagaaccccttagagcgggaccggtggattccttaaggctctgaagggctgagaacagttctagaagcgtcccaaagggtgctgggaaaggtcccagcgtgggttgagggaggagggaagatccgagttcctcaccgcgggccgggatgtgaccaccctcttcagaggttggaccccaggcttcaagcaccgagtgaggggtctgttggggacgctgggagagtctctggtgtgaagtggcttaggtctggactggtcagctgtggcaccagccggtcctgcccacgcttcaggatggccgggggctgcccctgtgggagagttgccaagactcggcgataccaaggatggaagccagaggctgtggcgagggagagccaagcatattcccagcaccagggccactgctggcacgtcgtagacatccaataaatatttttggaaggagtg

SEQ ID NO: 2506 - protein, 232 aa, Homosapiens
MESGLAGNGTGAGLVMKVKQEKPERLLQTLAPQAMLVEKDKENIFQQHRGLPPRQTMGRPRALGGQEESGSPRWAPPTEQDAGLAGRAPGSASGPLSPSLSSGEGHFVCLDCGKRFSWWSSLKIHQRTHTGEKPYLCGKCGKSFSQKPNLARHQRHHTGERPFCCPECARRLQPEAAPAQAPARAPRGPCVQPQGGGALVDWTSADPWWCGGCLRGVCGEWGWPGLLALRTP

SEQ ID NO: 2507 - DNA, 429 bp, Homosapiens
gcccctggaacctcccaccagcccagcacagctctcacagcctcagcgccccaggtcgggcagtcagaagcagaccatgccacagatgaacatgggaacagttagctgtgaagccttgggctgtcgtccgcctccaacccctggggctctgaccacacccagccccagctcagatcatcttgctcaaagggccgaaggaggacccatctccacaccttccacatgtagatatcctcaacgttcttcacagaggggatgcccgcaccccgccccaccgagttcgcggctgctgtgcccatcttcctagagaggagttctccgccacacccgacaccacacacttccaacttctgcggtgcttccctctcacttatctccacccccaatccttatccccgctcgtttaatcacacatttattggtcaccta

SEQ ID NO: 2508 - protein, 76 aa, Homosapiens
MPQMNMGTVSCEALGCRPPPTPGALTTPSPSSDHLAQRAEGGPISTPSTCRYPQRSSQRGCPHPAPPSSRLLCPSS

SEQ ID NO: 2509 - DNA, 1106 bp, Homosapiens
caggagctgggctggtgatgaaggtcaagcaggagaagccggagcggctgctgcagacgctggcgccgcaggccatgcttgtggagaaggacaaggagaacatatttcagcagcaccggggcctcccgccacgccagaccatggggcggcctcgagccctggggggacaggaggagtctgggagtccaaggtgggcccctcccactgagcaggatgcggggctggcaggccgggctcccgggtcagcctccggccccctgagcccctcgctttcctccggcgagggtcactttgtatgcctggactgcgggaagaggttcagctggtggtcgtccctgaagatccaccagcgcacccacaccggggagaagccgtacctctgcggcaagtgcggcaagagcttcagccagaagccgaacctggcgcgccaccagcggcaccacacgggcgagcgacccttctgctgccccgagtgcgcgcggcgcttcagccagaaaagcagcacctgctcaacaccagcgcgtgcaccgcgcggcccctgcgtgcagccccaaggaggaggcgcgctagtggactggacctcagcggacccgtggtggtgcgggggatgtttgcggggtgtgtgtggggagtgggggtggccaggattgctggctcttagaaccccttagagcgggaccggtggattccttaaggctctgaagggctgagaacagttctagaagcgtcccaaagggtgctgggaaaggtcccagcgtgggttgagggaggagggaagatccgagttcctcaccgcgggccgggatgtgaccaccctcttcagaggttggaccccaggcttcaagcaccgagtgaggggtctgttggggacgctgggagagtctctggtgtgaagtggcttaggtctggactggtcagctgtggcaccagccggtcctgcccacgcttcaggatggccgggggctgcccctgtgggagagttgccaagactcggcgataccaaggatggaagccagaggctgtggcgagggagagccaagcatattcccagcaccagggccactgctggcacgtcgtagacatccaataaatatttttggaaggag

SEQ ID NO: 2510 - protein, 217 aa, Homosapiens
MKVKQEKPERLLQTLAPQAMLVEKDKENIFQQHRGLPPRQTMGRPRALGGQEESGSPRWAPPTEQDAGLAGRAPGSASGPLSPSLSSGEGHFVCLDCGKRFSWWSSLKIHQRTHTGEKPYLCGKCGKSFSQKPNLARHQRHHTGERPFCCPECARRFSQKSSTCSTPARAPRGPCVQPQGGGALVDWTSADPWWCGGCLRGVCGEWGWPGLLALRTP

SEQ ID NO: 2511 - DNA, 1072 bp, Homosapiens
acattgcagccttctgcaaggatggggtggtactgtccttctcacttctcattctcttccattttaaaatgataaacctgggtcagaggatatttaggaagaggcattgtcattaagtccaagacaagatggtcagatttgttatcctagtgggttacaatccaaaatactctggagcatgctgagattaaggtggttgccaagggaacagaaaacagccatgagtaaataaatcaagactttaaaggatttagatcgggtctatggccagttgcagagtgggcaggatcttaagacccgataggtgcagaacccatctggacacggagaccaggaatggagttccatggaggcctggctggcactgcacccgggcatgaggacacatccagtaagaagacctgcctcaagaggtgcactgcggtgaccagtggaggtgactggttggagcctggaattggaagcagattccaagctctggtggacaaactctccaggcctggtgggaatcacagctggggcagacctcatcctggctgcctggccacaggcccccactctctgccactggtggtaggacgatgcctgtgtggagagctggcttctctgctcccgcctggtccaccacttggctagagttcagagacaggaagtgattggtctaagctaacacagcaagttggtggcagacctggttctagaggcaaaaccttcttccagatgtgaatgaaacctgcaggcttcattttcctttctgagcagtgcttcttagctctttggagacacgaagcccttggaaaatctgatgaaggttacggaccttccctaggaaaacagataactgacgtagactcaaaaaccccaagcaatttcaggagccactggactccctgaatgaaacccatccctggactccaggctaagaacctcagccctggggacttcacctgctgccctttccttacctgtcacacattgagccccgagtcaaggccactgtacaagtagtgcccctccctccccctggccaagcctccttcccttgttcaggaataaagaattccgaggagcc

SEQ ID NO: 2512 - protein, 38 aa, Homosapiens
MASCRVGRILRPDRCRTHLDTETRNGVPWRPGWHCTRA

SEQ ID NO: 2513 - DNA, 2582 bp, Homosapiens
acattgcagccttctgcaaggatggggtggtactgtccttctcacttctcattctcttccattttaaaatgataaacctgggtcagaggatatttaggaagaggcattgtcattaagtccaagacaagatggtcagatttgttatcctagtgggttacaatccaaaatactctggagcatgctgagattaaggtggttgccaagggaacagaaaacagccatgagtaaataaatcaagactttaaaggatttagatcgggtctatggccagttgcagagtgggcaggatcttaagacccgataggtgcagaacccatctggacacggagaccaggaatggagttccatggaggcctggctggcactgcacccgggcatgaggacacatccagtaagaagacctgcctcaagaggtgcactgcggtgaccagtggaggtgactggttggagcctggaattggaagcagattccaagctctggtggacaaactctccaggcctggtgggaatcacagctggggcagacctcatcctggctgcctggccacaggcccccactctctgccactggtggtaggacgatgcctgtgtggagagctggcttctctgctcccgcctggtccaccacttggctagagttcagagacaggaagtgattggtctaagctaacacagcaagttggtggcagacctggttctagaggcaaaaccttcttccagatgtgaatgaaacctgcaggcttcattttcctttctgagcagtgcttcttagctctttggagacacgaagcccttggaaaatctgatgaaggttacggaccttccctaggaaaacagataactgacgtagactcaaaaaccccaagcaatttcaggagccactggactccctgaatgaaacccatccctggactccaggctaagaacctcagccctggggacttcacctgctgccctttccttacctgtcacacattgagccccgagtcaaggccactgtacaagtagtgcccctccctccccctggccaagcctccttcccttgttcaggaataaagaattccgaggagccctttttagtcattcccttctcccagacctaacgaatggtgcgtcaggtttctggagcctcatttcccttccccagacattggcagaggtcccttgggctagattttctcttctggttttgtttcttgttctgcctgactggccgctggcttccacaaaggagccctttgctcctggcctgggctctgatttcactgtgtggtctcaggggaagctggactgctgtggacgctggtgggagcttgagtctggtctgagtctgccccagggagaaagaatcctgcttccaccaaccaagcccagtcagcggttcctcccagctggccaagtgttcagcccagtgggctggggaggaagaggatgagggcctcgctcctggtgcctgtggctctgggcagggtgagaggtcggtggaggatctttctgtgtgttctctgagtatgcagcagtgcagttgaagggaacagggcccaggcaggcagcagggcaaggactcctcccatcttcacacctgaaccagtcagcctggaagctacaagttctcacctgcctccccagaatgaacatcagaaaaggcaaaactgaccagggctgggatgggtttgggtcagcgtggttggagggcagcctgtggatccctgcactggagtcttgctgtcttcgatgcaggttggatcatacattgttacctcctactgtatgcctcaccctggaatagcagaatgctcagggggagatccgagaacgagaaggtgctcccagccccaggagcttccagtctggctctgatccttggccgacctagaggaaacctccacacacgccccttttgtgctaatggtgcagtttgtgtccccctctgcccatcactgtgctgtgcttgttcctgcctctgtgccttcccctatactgctcggacatgtcccctttcctctcctctacccagctaagcccttctgatccacggggcccggcttcccaaaccacccagcccacattcctccttcctgctccgaacaggtccggtgtgagcccctgcccccgaactgcgtgctgtcccatggacgctccagtctcttccgtgtgtgtcttgagtccctaactagacagttagctccctgagggcaagggactgtcatttcctcttgagtcctaccagggtctagcacaggactgggctcctaactctcaggaaacacttgtcggctgactggtgcctcaagcgctggagcttgtcggtggccggtaatgggcagtgcacgtggggagagggtatgtgagttaactcaagggtgccttttcttgggctgtgggctggctcccctgggtcaaaagtggatgtcggaggcctcaggctcttacctccttggggcagtgggagcatcagggacccccacccccaccccggctctgcaggagtgcacggaagtggtcgtccagcctggatatttctacaggttgctgactcctgcgggagctgactgagtggaataaatgttctctcaacatca

SEQ ID NO: 2514 - protein, 38 aa, Homosapiens; identical to SEQ ID NO: 2512

SEQ ID NO: 2515 - DNA, 509 bp, Homosapiens
cgcatggtcgccgctccggcccgggcgggcgcagcgctggcagccccgttttccgccagccgggctgccggagagttagacctcccagcctcacggggctgctgtgcggctgcgacgacgccggcgactgcggcgctgcagcggagacggaaggctcgggaggcggcgccatggactggtgattgcagctggaagtgcccatgaccgagctggcgtcctccgggggcgggtcccctgcgggggacggggaggagggtctgggggacgagcgaggcctggtcatccaccaccctgcagaggagcagccctaccgctgcccgctgtgcggccagaccttctcgcagcagcccagcctggtgcggcaccagaaggcgcacgccggagcgggccgcgcggctgccttcgtgtgtcccgagtgcggcaaggccttcagcgtcaagcacaacctcgaggtgcaccagcgcacgcacaccggggagcggcccttcccctgccccgagtgcggccgc

SEQ ID NO: 2516 - protein, 66 aa, Homosapiens
MVAAPARAGAALAAPFSASRAAGELDLPASRGCCAAATTPATAALQRRRKAREAAPWTGDCSWKCP

SEQ ID NO: 2517 - DNA, 1119 bp, Homosapiens
ggtcctttccgggagtgggagcgccgggacttaattacggactggtgattgcagctggaagtgcccatgaccgagctggcgtcctccgggggcgggtcccctgcgggggacggggaggagggtctgggggacgagcgaggcctggtcatccaccaccctgcagaggagcagccctaccgctgcccgctgtgcggccagaccttctcgcagcagcccagcctggtgcggcaccagaaggcgcacgccggagcgggccgcgcggctgccttcgtgtgtcccgagtgcggcaaggccttcagcgtcaagcacaacctcgagttgcagagtgggcaggatcttaagacccgataggtgcagaacccatctggacacggagaccaggaatggagttccatggaggcctggctggcactgcacccgggcatgaggacacatccagtaagaagacctgcctcaagaggtgcactgcggtgaccagtggaggtgactggttggagcctggaattggaagcagattccaagctctggtggacaaactctccaggcctggtgggaatcacagctggggcagacctcatcctggctgcctggccacaggcccccactctctgccactggtggtaggacgatgcctgtgtggagagctggcttctctgctcccgcctggtccaccacttggctagagttcagagacaggaagtgattggtctaagctaacacagcaagttggtggcagacctggttctagaggcaaaaccttcttccagatgtgaatgaaacctgcaggcttcattttcctttctgagcagtgcttcttagctctttggagacacgaagcccttggaaaatctgatgaaggttacggaccttccctaggaaaacagataactgacgtagactcaaaaaccccaagcaatttcaggagccactggactccctgaatgaaacccatccctggactccaggctaagaacctcagccctggggacttcacctgctgccctttccttacctgtcacacattgagccccgagtcaaggccactgtacaagtagtgcccctccctccccctggccaagcctccttcccttgttcaggaataaagaattccgaggagcc

SEQ ID NO: 2518 - protein, 94 aa, Homosapiens
MTELASSGGGSPAGDGEEGLGDERGLVIHHPAEEQPYRCPLCGQTFSQQPSLVRHQKAHAGAGRAAAFVCPECGKAFSVKHNLELQSGQDLKTR

SEQ ID NO: 2519 - DNA, 2629 bp, Homosapiens
ggtcctttccgggagtgggagcgccgggacttaattacggactggtgattgcagctggaagtgcccatgaccgagctggcgtcctccgggggcgggtcccctgcgggggacggggaggagggtctgggggacgagcgaggcctggtcatccaccaccctgcagaggagcagccctaccgctgcccgctgtgcggccagaccttctcgcagcagcccagcctggtgcggcaccagaaggcgcacgccggagcgggccgcgcggctgccttcgtgtgtcccgagtgcggcaaggccttcagcgtcaagcacaacctcgagttgcagagtgggcaggatcttaagacccgataggtgcagaacccatctggacacggagaccaggaatggagttccatggaggcctggctggcactgcacccgggcatgaggacacatccagtaagaagacctgcctcaagaggtgcactgcggtgaccagtggaggtgactggttggagcctggaattggaagcagattccaagctctggtggacaaactctccaggcctggtgggaatcacagctggggcagacctcatcctggctgcctggccacaggcccccactctctgccactggtggtaggacgatgcctgtgtggagagctggcttctctgctcccgcctggtccaccacttggctagagttcagagacaggaagtgattggtctaagctaacacagcaagttggtggcagacctggttctagaggcaaaaccttcttccagatgtgaatgaaacctgcaggcttcattttcctttctgagcagtgcttcttagctctttggagacacgaagcccttggaaaatctgatgaaggttacggaccttccctaggaaaacagataactgacgtagactcaaaaaccccaagcaatttcaggagccactggactccctgaatgaaacccatccctggactccaggctaagaacctcagccctggggacttcacctgctgccctttccttacctgtcacacattgagccccgagtcaaggccactgtacaagtagtgcccctccctccccctggccaagcctccttcccttgttcaggaataaagaattccgaggagccctttttagtcattcccttctcccagacctaacgaatggtgcgtcaggtttctggagcctcatttcccttccccagacattggcagaggtcccttgggctagattttctcttctggttttgtttcttgttctgcctgactggccgctggcttccacaaaggagccctttgctcctggcctgggctctgatttcactgtgtggtctcaggggaagctggactgctgtggacgctggtgggagcttgagtctggtctgagtctgccccagggagaaagaatcctgcttccaccaaccaagcccagtcagcggttcctcccagctggccaagtgttcagcccagtgggctggggaggaagaggatgagggcctcgctcctggtgcctgtggctctgggcagggtgagaggtcggtggaggatctttctgtgtgttctctgagtatgcagcagtgcagttgaagggaacagggcccaggcaggcagcagggcaaggactcctcccatcttcacacctgaaccagtcagcctggaagctacaagttctcacctgcctccccagaatgaacatcagaaaaggcaaaactgaccagggctgggatgggtttgggtcagcgtggttggagggcagcctgtggatccctgcactggagtcttgctgtcttcgatgcaggttggatcatacattgttacctcctactgtatgcctcaccctggaatagcagaatgctcagggggagatccgagaacgagaaggtgctcccagccccaggagcttccagtctggctctgatccttggccgacctagaggaaacctccacacacgccccttttgtgctaatggtgcagtttgtgtccccctctgcccatcactgtgctgtgcttgttcctgcctctgtgccttcccctatactgctcggacatgtcccctttcctctcctctacccagctaagcccttctgatccacggggcccggcttcccaaaccacccagcccacattcctccttcctgctccgaacaggtccggtgtgagcccctgcccccgaactgcgtgctgtcccatggacgctccagtctcttccgtgtgtgtcttgagtccctaactagacagttagctccctgagggcaagggactgtcatttcctcttgagtcctaccagggtctagcacaggactgggctcctaactctcaggaaacacttgtcggctgactggtgcctcaagcgctggagcttgtcggtggccggtaatgggcagtgcacgtggggagagggtatgtgagttaactcaagggtgccttttcttgggctgtgggctggctcccctgggtcaaaagtggatgtcggaggcctcaggctcttacctccttggggcagtgggagcatcagggacccccacccccaccccggctctgcaggagtgcacggaagtggtcgtccagcctggatatttctacaggttgctgactcctgcgggagctgactgagtggaataaatgttctctcaacatca

SEQ ID NO: 2520 - protein, 94 aa, Homosapiens; identical to SEQ ID NO: 2518

SEQ ID NO: 2521 - DNA, 727 bp, Homosapiens
agctatttgataagagcaacgtcgcgggacgcttgccgtctttatgggggcggggagaaggggcgcgggtgtcgctgcgggagagttaccgtatttgcgttgagcagcgcagactgtagagcaaagagctgcggccggagaccggaggagcaggggctcagctgggctggactggtgattgcagctggaagtgcccatgaccgagctggcgtcctccgggggcgggtcccctgcgggggacggggaggagggtctgggggacgagcgaggcctggtcatccaccaccctgcagaggagcagccctaccgctgcccgctgtgcggccagaccttctcgcagcagcccagcctggtgcggcaccagaaggcgcacgccggagcgggccgcgcggctgccttcgtgtgtcccgagtgcggcaaggccttcagcgtcaagcacaacctcgaggtgcaccagcgcacgcacaccggggagcggcccttcccctgccccgatgcggccgctgcttccgcgagccgcgcttcctgctcaaccaccagcgcacccacgcgcgcatgcccgcgccgcacccgcgccgccccggcgtcttcggggagcggcggccctacttctgcccccgctgcggcaagagcttcgcgcgcgagggctcgctcaagacccatcagcgcagccacggccacgggcccgagggccaggcggcccacttaggacgcgtgctatgatgcg

SEQ ID NO: 2522 - protein, 170 aa, Homosapiens
MTELASSGGGSPAGDGEEGLGDERGLVIHHPAEEQPYRCPLCGQTFSQQPSLVRHQKAHAGAGRAAAFVCPECGKAFSVKHNLEVHQRTHTGERPFPCPDAAAASASRASCSTTSAPTRACPRRTRAAPASSGSGGPTSAPAAARASRARARSRPISAATATGPRARRPT

SEQ ID NO: 2523 - DNA, 422 bp, Homosapiens
taaagtggggctcaataaccctgctccgcccctttctcagggctgttgtgaggacaatgggaaacaatttaagaggaacacagtgtcctgggaagaggatcctttggagaagcagcatgaagggagctgggtttgggggtgttggctgggcactgagggtgctgctcagccttgggccaggctttgctgtgagttaactcaagggtgccttttcttgggctgtgggctggctcccctgggtcaaaagtggatgtcggaggcctcaggctcttacctccttggggcagtgggagcatcagggacccccacccccaccccggctctgcaggagtgcacggaagtggtcgtccagcctggatatttctacaggttgctgactcctgcgggagctgactgagtggaataaatgttctctcaacatc

SEQ ID NO: 2524 - protein, 46 aa, Homosapiens
MGNNLRGTQCPGKRILWRSSMKGAGFGGVGWALRVLLSLGPGFAVS

SEQ ID NO: 2525 - DNA, 451 bp, Homosapiens
gactggaaggagtgtaggccgtgcttaaaaggcagtggaggaagaggaacaccaattcccagcaggggaacttgagcttgaacaaaacggggcgaaaggtggaggttgtgggagggactggtgattgcagctggaagtgcccatgaccgagctggcgtcctccgggggcgggtcccctgcgggggacggggaggagggtctgggggacgagcgaggcctggtcatccaccaccctgcagaggagcagccctaccgctgcccgctgtgcggccagaccttctcgcagcagcccagcctggtgcggcaccagaaggcgcacgccggagcgggccgcgcggctgccttcgtgtgtcccgagtgcggcaaggccttcagcgtcaagcacaacctcgaggtgcaccagcgcacgcacaccggggagcggcccttcccctgccccgagtgcggccgc

SEQ ID NO: 2526 - protein, 102 aa, Homosapiens
MTELASSGGGSPAGDGEEGLGDERGLVIHHPAEEQPYRCPLCGQTFSQQPSLVRHQKAHAGAGRAAAFVCPECGKAFSVKHNLEVHQRTHTGERPFPCPECG

SEQ ID NO: 2527 - DNA, 1868 bp, Homosapiens
caccaattcccagcaggggaacttgagcttgaacaaaacggggcgaaaggtggaggttgtgggaggtgagtgtccctgccaggctgggggttggctaaccctcgtgttccccgacccctctctctccaccccccacccccgcccccgcttctgtctccctagggactggtgattgcagctggaagtgcccatgaccgagctggcgtcctccgggggcgggtcccctgcgggggacggggaggagggtctgggggacgagcgaggcctggtcatccaccaccctgcagaggagcagccctaccgctgcccgctgtgcggccagaccttctcgcagcagcccagcctggtgcggcaccagaaggcgcacgccggagcgggccgcgcggctgccttcgtgtgtcccgagtgcggcaaggccttcagcgtcaagcacaacctcgaggtgcaccagcgcacgcacaccggggagcggcccttcccctgccccgagtgcggccgctgcttcagcctcaagcagaacctgctcacgcaccagcgcatccacagcggcgagaagccgcaccagtgcgcgcagtgcggccgctgcttccgcgagccgcgcttcctgctcaaccaccagcgcacccacgcgcgcatgcccgcgccgcacccgcgccgccccggcgtcttcggggagcggcggccctacttctgcccccgctgcggcaagagcttcgcgcgcgagggctcgctcaagacccatcagcgcagccacggccacgggcccgagggccaggcggcccacttaggacgcgtgctatgatgcgcccggggcctgctgccgacggctgcttcccgccccgcacgtgcgtccccgacccctggagatggccctgggccgcagctccctctctagatgggatcccgggagaggggcagcgctggcttgggctcttgaaggtgtgggccgccgccaggctccggccgcccgctcgcgttcctccctcgggaccctctggctggctgcgcacagctgcttccggctcctgccatggttctccttctctggcccatccggcctagagcagttgcagagtgggcaggatcttaagacccgataggtgcagaacccatctggacacggagaccaggaatggagttccatggaggcctggctggcactgcacccgggcatgaggacacatccagtaagaagacctgcctcaagaggtgcactgcggtgaccagtggaggtgactggttggagcctggaattggaagcagattccaagctctggtggacaaactctccaggcctggtgggaatcacagctggggcagacctcatcctggctgcctggccacaggcccccactctctgccactggtggtaggacgatgcctgtgtggagagctggcttctctgctcccgcctggtccaccacttggctagagttcagagacaggaagtgattggtctaagctaacacagcaagttggtggcagacctggttctagaggcaaaaccttcttccagatgtgaatgaaacctgcaggcttcattttcctttctgagcagtgcttcttagctctttggagacacgaagcccttggaaaatctgatgaaggttacggaccttccctaggaaaacagataactgacgtagactcaaaaaccccaagcaatttcaggagccactggactccctgaatgaaacccatccctggactccaggctaagaacctcagccctggggacttcacctgctgccctttccttacctgtcacacattgagccccgagtcaaggccactgtacaagtagtgcccctccctccccctggccaagcctccttcccttgttcaggaataaagaattccgaggagcc

SEQ ID NO: 2528 - protein, 77 aa, Homosapiens
MALGRSSLSRWDPGRGAALAWALEGVGRRQAPAARSRSSLGTLWLAAHSCFRLLPWFSFSGPSGLEQLQSGQDLKTR

SEQ ID NO: 2529 - DNA, 3378 bp, Homosapiens
caccaattcccagcaggggaacttgagcttgaacaaaacggggcgaaaggtggaggttgtgggaggtgagtgtccctgccaggctgggggttggctaaccctcgtgttccccgacccctctctctccaccccccacccccgcccccgcttctgtctccctagggactggtgattgcagctggaagtgcccatgaccgagctggcgtcctccgggggcgggtcccctgcgggggacggggaggagggtctgggggacgagcgaggcctggtcatccaccaccctgcagaggagcagccctaccgctgcccgctgtgcggccagaccttctcgcagcagcccagcctggtgcggcaccagaaggcgcacgccggagcgggccgcgcggctgccttcgtgtgtcccgagtgcggcaaggccttcagcgtcaagcacaacctcgaggtgcaccagcgcacgcacaccggggagcggcccttcccctgccccgagtgcggccgctgcttcagcctcaagcagaacctgctcacgcaccagcgcatccacagcggcgagaagccgcaccagtgcgcgcagtgcggccgctgcttccgcgagccgcgcttcctgctcaaccaccagcgcacccacgcgcgcatgcccgcgccgcacccgcgccgccccggcgtcttcggggagcggcggccctacttctgcccccgctgcggcaagagcttcgcgcgcgagggctcgctcaagacccatcagcgcagccacggccacgggcccgagggccaggcggcccacttaggacgcgtgctatgatgcgcccggggcctgctgccgacggctgcttcccgccccgcacgtgcgtccccgacccctggagatggccctgggccgcagctccctctctagatgggatcccgggagaggggcagcgctggcttgggctcttgaaggtgtgggccgccgccaggctccggccgcccgctcgcgttcctccctcgggaccctctggctggctgcgcacagctgcttccggctcctgccatggttctccttctctggcccatccggcctagagcagttgcagagtgggcaggatcttaagacccgataggtgcagaacccatctggacacggagaccaggaatggagttccatggaggcctggctggcactgcacccgggcatgaggacacatccagtaagaagacctgcctcaagaggtgcactgcggtgaccagtggaggtgactggttggagcctggaattggaagcagattccaagctctggtggacaaactctccaggcctggtgggaatcacagctggggcagacctcatcctggctgcctggccacaggcccccactctctgccactggtggtaggacgatgcctgtgtggagagctggcttctctgctcccgcctggtccaccacttggctagagttcagagacaggaagtgattggtctaagctaacacagcaagttggtggcagacctggttctagaggcaaaaccttcttccagatgtgaatgaaacctgcaggcttcattttcctttctgagcagtgcttcttagctctttggagacacgaagcccttggaaaatctgatgaaggttacggaccttccctaggaaaacagataactgacgtagactcaaaaaccccaagcaatttcaggagccactggactccctgaatgaaacccatccctggactccaggctaagaacctcagccctggggacttcacctgctgccctttccttacctgtcacacattgagccccgagtcaaggccactgtacaagtagtgcccctccctccccctggccaagcctccttcccttgttcaggaataaagaattccgaggagccctttttagtcattcccttctcccagacctaacgaatggtgcgtcaggtttctggagcctcatttcccttccccagacattggcagaggtcccttgggctagattttctcttctggttttgtttcttgttctgcctgactggccgctggcttccacaaaggagccctttgctcctggcctgggctctgatttcactgtgtggtctcaggggaagctggactgctgtggacgctggtgggagcttgagtctggtctgagtctgccccagggagaaagaatcctgcttccaccaaccaagcccagtcagcggttcctcccagctggccaagtgttcagcccagtgggctggggaggaagaggatgagggcctcgctcctggtgcctgtggctctgggcagggtgagaggtcggtggaggatctttctgtgtgttctctgagtatgcagcagtgcagttgaagggaacagggcccaggcaggcagcagggcaaggactcctcccatcttcacacctgaaccagtcagcctggaagctacaagttctcacctgcctccccagaatgaacatcagaaaaggcaaaactgaccagggctgggatgggtttgggtcagcgtggttggagggcagcctgtggatccctgcactggagtcttgctgtcttcgatgcaggttggatcatacattgttacctcctactgtatgcctcaccctggaatagcagaatgctcagggggagatccgagaacgagaaggtgctcccagccccaggagcttccagtctggctctgatccttggccgacctagaggaaacctccacacacgccccttttgtgctaatggtgcagtttgtgtccccctctgcccatcactgtgctgtgcttgttcctgcctctgtgccttcccctatactgctcggacatgtcccctttcctctcctctacccagctaagcccttctgatccacggggcccggcttcccaaaccacccagcccacattcctccttcctgctccgaacaggtccggtgtgagcccctgcccccgaactgcgtgctgtcccatggacgctccagtctcttccgtgtgtgtcttgagtccctaactagacagttagctccctgagggcaagggactgtcatttcctcttgagtcctaccagggtctagcacaggactgggctcctaactctcaggaaacacttgtcggctgactggtgcctcaagcgctggagcttgtcggtggccggtaatgggcagtgcacgtggggagagggtatgtgagttaactcaagggtgccttttcttgggctgtgggctggctcccctgggtcaaaagtggatgtcggaggcctcaggctcttacctccttggggcagtgggagcatcagggacccccacccccaccccggctctgcaggagtgcacggaagtggtcgtccagcctggatatttctacaggttgctgactcctgcgggagctgactgagtggaataaatgttctctcaacatca

SEQ ID NO: 2530 - protein, 77 aa, Homosapiens; identical to SEQ ID NO: 2528

SEQ ID NO: 2531 - DNA, 1119 bp, Homosapiens
gcggccgctgcttccgcgagccgcgcttcctgctcaaccaccagcgcacccacgcgcgcatgcccgcgccgcacccgcgccgccccggcgtcttcggggagcggcggccctacttctgcccccgctgcggcaagagcttcgcgcgcgagggctcgctcaagacccatcacgctggcttgggctcttgaaggtgtgggccgccgccaggctccggccgcccgctcgcgttcctccctcgggaccctctggctggctgcgcacagctgcttccggctcctgccatggttctccttctctggcccatccggcctagagcagttgcagagtgggcaggatcttaagacccgataggtgcagaacccatctggacacggagaccaggaatggagttccatggaggcctggctggcactgcacccgggcatgaggacacatccagtaagaagacctgcctcaagaggtgcactgcggtgaccagtggaggtgactggttggagcctggaattggaagcagattccaagctctggtggacaaactctccaggcctggtgggaatcacagctggggcagacctcatcctggctgcctggccacaggcccccactctctgccactggtggtaggacgatgcctgtgtggagagctggcttctctgctcccgcctggtccaccacttggctagagttcagagacaggaagtgattggtctaagctaacacagcaagttggtggcagacctggttctagaggcaaaaccttcttccagatgtgaatgaaacctgcaggcttcattttcctttctgagcagtgcttcttagctctttggagacacgaagcccttggaaaatctgatgaaggttacggaccttccctaggaaaacagataactgacgtagactcaaaaaccccaagcaatttcaggagccactggactccctgaatgaaacccatccctggactccaggctaagaacctcagccctggggacttcacctgctgccctttccttacctgtcacacattgagccccgagtcaaggccactgtacaagtagtgcccctccctccccctggccaagcctccttcccttgttcaggaataaagaattccgaggagcc

SEQ ID NO: 2532 - protein, 42 aa, Homosapiens
MPAPHPRRPGVFGERRPYFCPRCGKSFAREGSLKTHHAGLGS

SEQ ID NO: 2533 - DNA, 2629 bp, Homosapiens
gcggccgctgcttccgcgagccgcgcttcctgctcaaccaccagcgcacccacgcgcgcatgcccgcgccgcacccgcgccgccccggcgtcttcggggagcggcggccctacttctgcccccgctgcggcaagagcttcgcgcgcgagggctcgctcaagacccatcacgctggcttgggctcttgaaggtgtgggccgccgccaggctccggccgcccgctcgcgttcctccctcgggaccctctggctggctgcgcacagctgcttccggctcctgccatggttctccttctctggcccatccggcctagagcagttgcagagtgggcaggatcttaagacccgataggtgcagaacccatctggacacggagaccaggaatggagttccatggaggcctggctggcactgcacccgggcatgaggacacatccagtaagaagacctgcctcaagaggtgcactgcggtgaccagtggaggtgactggttggagcctggaattggaagcagattccaagctctggtggacaaactctccaggcctggtgggaatcacagctggggcagacctcatcctggctgcctggccacaggcccccactctctgccactggtggtaggacgatgcctgtgtggagagctggcttctctgctcccgcctggtccaccacttggctagagttcagagacaggaagtgattggtctaagctaacacagcaagttggtggcagacctggttctagaggcaaaaccttcttccagatgtgaatgaaacctgcaggcttcattttcctttctgagcagtgcttcttagctctttggagacacgaagcccttggaaaatctgatgaaggttacggaccttccctaggaaaacagataactgacgtagactcaaaaaccccaagcaatttcaggagccactggactccctgaatgaaacccatccctggactccaggctaagaacctcagccctggggacttcacctgctgccctttccttacctgtcacacattgagccccgagtcaaggccactgtacaagtagtgcccctccctccccctggccaagcctccttcccttgttcaggaataaagaattccgaggagccctttttagtcattcccttctcccagacctaacgaatggtgcgtcaggtttctggagcctcatttcccttccccagacattggcagaggtcccttgggctagattttctcttctggttttgtttcttgttctgcctgactggccgctggcttccacaaaggagccctttgctcctggcctgggctctgatttcactgtgtggtctcaggggaagctggactgctgtggacgctggtgggagcttgagtctggtctgagtctgccccagggagaaagaatcctgcttccaccaaccaagcccagtcagcggttcctcccagctggccaagtgttcagcccagtgggctggggaggaagaggatgagggcctcgctcctggtgcctgtggctctgggcagggtgagaggtcggtggaggatctttctgtgtgttctctgagtatgcagcagtgcagttgaagggaacagggcccaggcaggcagcagggcaaggactcctcccatcttcacacctgaaccagtcagcctggaagctacaagttctcacctgcctccccagaatgaacatcagaaaaggcaaaactgaccagggctgggatgggtttgggtcagcgtggttggagggcagcctgtggatccctgcactggagtcttgctgtcttcgatgcaggttggatcatacattgttacctcctactgtatgcctcaccctggaatagcagaatgctcagggggagatccgagaacgagaaggtgctcccagccccaggagcttccagtctggctctgatccttggccgacctagaggaaacctccacacacgccccttttgtgctaatggtgcagtttgtgtccccctctgcccatcactgtgctgtgcttgttcctgcctctgtgccttcccctatactgctcggacatgtcccctttcctctcctctacccagctaagcccttctgatccacggggcccggcttcccaaaccacccagcccacattcctccttcctgctccgaacaggtccggtgtgagcccctgcccccgaactgcgtgctgtcccatggacgctccagtctcttccgtgtgtgtcttgagtccctaactagacagttagctccctgagggcaagggactgtcatttcctcttgagtcctaccagggtctagcacaggactgggctcctaactctcaggaaacacttgtcggctgactggtgcctcaagcgctggagcttgtcggtggccggtaatgggcagtgcacgtggggagagggtatgtgagttaactcaagggtgccttttcttgggctgtgggctggctcccctgggtcaaaagtggatgtcggaggcctcaggctcttacctccttggggcagtgggagcatcagggacccccacccccaccccggctctgcaggagtgcacggaagtggtcgtccagcctggatatttctacaggttgctgactcctgcgggagctgactgagtggaataaatgttctctcaacatca

SEQ ID NO: 2534 - protein, 42 aa, Homosapiens; identical to SEQ ID NO: 2532

SEQ ID NO: 2535 - DNA, 1072 bp, Homosapiens
ccagcgcacccacgcgcgcatgcccgcgccgcacccgcgccgccccggcgtcttcggggagcggcggccctacttctgcccccgctgcggcaagagcttcgcgcgcgagggctcgctcaagacccatcagctgctgccgacggctgcttcccgccgccaggctccggccgcccgctcgcgttcctccctcgggaccctctggctggctgcgcacagctgcttccggctcctgccatggttctccttctctggcccatccggcctagagcagttgcagagtgggcaggatcttaagacccgataggtgcagaacccatctggacacggagaccaggaatggagttccatggaggcctggctggcactgcacccgggcatgaggacacatccagtaagaagacctgcctcaagaggtgcactgcggtgaccagtggaggtgactggttggagcctggaattggaagcagattccaagctctggtggacaaactctccaggcctggtgggaatcacagctggggcagacctcatcctggctgcctggccacaggcccccactctctgccactggtggtaggacgatgcctgtgtggagagctggcttctctgctcccgcctggtccaccacttggctagagttcagagacaggaagtgattggtctaagctaacacagcaagttggtggcagacctggttctagaggcaaaaccttcttccagatgtgaatgaaacctgcaggcttcattttcctttctgagcagtgcttcttagctctttggagacacgaagcccttggaaaatctgatgaaggttacggaccttccctaggaaaacagataactgacgtagactcaaaaaccccaagcaatttcaggagccactggactccctgaatgaaacccatccctggactccaggctaagaacctcagccctggggacttcacctgctgccctttccttacctgtcacacattgagccccgagtcaaggccactgtacaagtagtgcccctccctccccctggccaagcctccttcccttgttcaggaataaagaattccgaggagcc

SEQ ID NO: 2536 - protein, 94 aa, Homosapiens
MPAPHPRRPGVFGERRPYFCPRCGKSFAREGSLKTHQLLPTAASRRQAPAARSRSSLGTLWLAAHSCFRLLPWFSFSGPSGLEQLQSGQDLKTR

SEQ ID NO: 2537 - DNA, 2582 bp, Homosapiens
ccagcgcacccacgcgcgcatgcccgcgccgcacccgcgccgccccggcgtcttcggggagcggcggccctacttctgcccccgctgcggcaagagcttcgcgcgcgagggctcgctcaagacccatcagctgctgccgacggctgcttcccgccgccaggctccggccgcccgctcgcgttcctccctcgggaccctctggctggctgcgcacagctgcttccggctcctgccatggttctccttctctggcccatccggcctagagcagttgcagagtgggcaggatcttaagacccgataggtgcagaacccatctggacacggagaccaggaatggagttccatggaggcctggctggcactgcacccgggcatgaggacacatccagtaagaagacctgcctcaagaggtgcactgcggtgaccagtggaggtgactggttggagcctggaattggaagcagattccaagctctggtggacaaactctccaggcctggtgggaatcacagctggggcagacctcatcctggctgcctggccacaggcccccactctctgccactggtggtaggacgatgcctgtgtggagagctggcttctctgctcccgcctggtccaccacttggctagagttcagagacaggaagtgattggtctaagctaacacagcaagttggtggcagacctggttctagaggcaaaaccttcttccagatgtgaatgaaacctgcaggcttcattttcctttctgagcagtgcttcttagctctttggagacacgaagcccttggaaaatctgatgaaggttacggaccttccctaggaaaacagataactgacgtagactcaaaaaccccaagcaatttcaggagccactggactccctgaatgaaacccatccctggactccaggctaagaacctcagccctggggacttcacctgctgccctttccttacctgtcacacattgagccccgagtcaaggccactgtacaagtagtgcccctccctccccctggccaagcctccttcccttgttcaggaataaagaattccgaggagccctttttagtcattcccttctcccagacctaacgaatggtgcgtcaggtttctggagcctcatttcccttccccagacattggcagaggtcccttgggctagattttctcttctggttttgtttcttgttctgcctgactggccgctggcttccacaaaggagccctttgctcctggcctgggctctgatttcactgtgtggtctcaggggaagctggactgctgtggacgctggtgggagcttgagtctggtctgagtctgccccagggagaaagaatcctgcttccaccaaccaagcccagtcagcggttcctcccagctggccaagtgttcagcccagtgggctggggaggaagaggatgagggcctcgctcctggtgcctgtggctctgggcagggtgagaggtcggtggaggatctttctgtgtgttctctgagtatgcagcagtgcagttgaagggaacagggcccaggcaggcagcagggcaaggactcctcccatcttcacacctgaaccagtcagcctggaagctacaagttctcacctgcctccccagaatgaacatcagaaaaggcaaaactgaccagggctgggatgggtttgggtcagcgtggttggagggcagcctgtggatccctgcactggagtcttgctgtcttcgatgcaggttggatcatacattgttacctcctactgtatgcctcaccctggaatagcagaatgctcagggggagatccgagaacgagaaggtgctcccagccccaggagcttccagtctggctctgatccttggccgacctagaggaaacctccacacacgccccttttgtgctaatggtgcagtttgtgtccccctctgcccatcactgtgctgtgcttgttcctgcctctgtgccttcccctatactgctcggacatgtcccctttcctctcctctacccagctaagcccttctgatccacggggcccggcttcccaaaccacccagcccacattcctccttcctgctccgaacaggtccggtgtgagcccctgcccccgaactgcgtgctgtcccatggacgctccagtctcttccgtgtgtgtcttgagtccctaactagacagttagctccctgagggcaagggactgtcatttcctcttgagtcctaccagggtctagcacaggactgggctcctaactctcaggaaacacttgtcggctgactggtgcctcaagcgctggagcttgtcggtggccggtaatgggcagtgcacgtggggagagggtatgtgagttaactcaagggtgccttttcttgggctgtgggctggctcccctgggtcaaaagtggatgtcggaggcctcaggctcttacctccttggggcagtgggagcatcagggacccccacccccaccccggctctgcaggagtgcacggaagtggtcgtccagcctggatatttctacaggttgctgactcctgcgggagctgactgagtggaataaatgttctctcaacatca

SEQ ID NO: 2538 - protein, 94 aa, Homosapiens; identical to SEQ ID NO: 2536

SEQ ID NO: 2539 - DNA, 1692 bp, Homosapiens
ggaagaagtgtattcagcattctaccttcttcctgattctgtgagcttagacctgcttccactttcaatctctctcattgcaggctgaagaggactggcctttcagtggccctcgtggaacggtaggaagctgagctggactctctgccacatcgttcggttcccacaacagcctgatgaagcagcagcagaaaaaatggaagccattttggttaacgggtcacatcttagcagttggcagcgtaagaagcggaaggatccactggtcagaaatggagattgaggagaagctgagagcacggagggcttcaggggagagcctgtcctttggaaaagcgggcaatttgcactcgtggtagatgagtggggaggccgctcagtctctctgcccctttgcacatgctgcacccgtttagtttgacgtcgtggagagctcctccaggcacgggctgtgtgaaagggtttaaaagtttgggggcatggctgggggtccccgcatgaggggtgctgtgtaggctcccatcttttctgccggtcatgctgggagccaacagcaccggctcctgacgtggggacttgccctgtgccatgacgtggggactcgccctgtgccctgcgccccggttcctgctggttctgtgccttctggactcatttcctttccagggtccgcaaccgcttccgacacaatcactattttggctgcggccacggcttcattcgcttcagctgcgagcttttctcagcgcagagagcacagggaagctgggaggagtccgcctagatggaatcttccagaagcaacatgactcttttaggcctttgctgccagctaagaaggtgaagaaaagtcaccactgcaataaaaagagggcactttgtcttacttggcaataaaccaccaccagcagcagcagcaatagcagcacccccacccccaccaaacccaaaacaaacaagaaaagcaaaaggaaaccttcgttttcagtgagaggattggcatgaagaatccttgggacacaggaatcaatcaagacctttggatgcccctgcctgctctgtctctagaagcctcaagcccagcatccccatgccgacgtgctcatctctagcaaaacaccagcctctcagccctctctccataaaggccactagaaagtactgtgatgccaggctgctccacatccaggcagcctgggtgaccactgccctttatgagaatcagaaaaagctgtctcccgagtagttggaattacaggtgcatgccaccatgcctggctaatttttgtatttttagtagagatggagtttcactatgttggccaggctgctcttgaactcctgacctcaaatgatccacccgactcggcctcccaaagagctggaattacaggagaagctaaacgttttaaaataagtatattatttctgaattactataacagacatggactccatttgaacaagatacttaattccatcaaaaacttgtcaaaatatacaaatttagtcacaagacactttactaccatctaccaaagctgtagtaaacacacacattttccatctttgaaatgaaataacgtataataatgttttccaaaataacaaagatgtctgcagtgaatagcactccctttgatgtggcaactgggtcaatcgtgttaacaactgtgaattcatctttttaag

SEQ ID NO: 2540 - protein, 102 aa, Homosapiens
MTWGLALCPAPRFLLVLCLLDSFPFQGPQPLPTQSLFWLRPRLHSLQLRAFLSAESTGKLGGVRLDGIFQKQHDSFRPLLPAKKVKKSHHCNKKRALCLTWQ

SEQ ID NO: 2541 - DNA, 2043 bp, Homosapiens
ggaagaagtgtattcagcattctaccttcttcctgattctgtgagcttagacctgcttccactttcaatctctctcattgcaggctgaagaggactggcctttcagtggccctcgtggaacggtaggaagctgagctggactctctgccacatcgttcggttcccacaacagcctgatgaagcagcagcagaaaaaatggaagccattttggttaacgggtcacatcttagcagttggcagcgtaagaagcggaaggatccactggtcagaaatggagattgaggagaagctgagagcacggagggcttcaggggagagcctgtcctttggaaaagcgggcaatttgcactcgtggtagatgagtggggaggccgctcagtctctctgcccctttgcacatgctgcacccgtttagtttgacgtcgtggagagctcctccaggcacgggctgtgtgaaagggtttaaaagtttgggggcatggctgggggtccccgcatgaggggtgctgtgtaggctcccatcttttctgccggtcatgctgggagccaacagcaccggctcctgacgtggggacttgccctgtgccatgacgtggggactcgccctgtgccctgcgccccggttcctgctggttctgtgccttctggactcatttcctttccagggtccgcaaccgcttccgacacaatcactattttggctgcggccacggcttcattcgcttcagctgcgagcttttctcagcgcagagagcacagggaagctgggaggagtccgcctagatggaatcttccagaagcaacatgactcttttaggcctttgctgccagctaagaaggtgaagaaaagtcaccactgcaataaaaagagggcactttgtcttacttggcaataaaccaccaccagcagcagcagcaatagcagcacccccacccccaccaaacccaaaacaaacaagaaaagcaaaaggaaaccttcgttttcagtgagaggattggcatgaagaatccttgggacacaggaatcaatcaagacctttggatgcccctgcctgctctgtctctagaagcctcaagcccagcatccccatgccgacgtgctcatctctagcaaaacaccagcctctcagccctctctccataaaggccactagaaagtactgtgatgccaggctgctccacatccaggcagcctgggtgaccactgccctttatgagaatcagaaaaagctgtctcccgagtagttggaattacaggtgcatgccaccatgcctggctaatttttgtatttttagtagagatggagtttcactatgttggccaggctgctcttgaactcctgacctcaaatgatccacccgactcggcctcccaaagagctggaattacaggagaagctaaacgttttaaaataagtatattatttctgaattactataacagacatggactccatttgaacaagatacttaattccatcaaaaacttgtcaaaatatacaaatttagtcacaagacactttactaccatctaccaaagctgtagtaaacacacacattttccatctttgaaatgaaataacgtataataatgttttccaaaataacaaagatgtctgcagtgaatagcactccctttgatgtggcaactgggtcaatcgtgttaacaactgtgaattcatctttttaagaaattcttttattgtttcttttcttttccgcgacagtctcactcgtgttgccccggctggagtgcagtggcgctatcttggctcactgcagcctccgcctcccgggttcaagcaattctcatgcctcagcctcctgagtagctgggattataggcacgtgccaccacacccagctaatttttttgtatttttagtagagacggggtttgaccatgttggtcagggtggtctcgaattcctgacctcagttgagccgccggcctcggcctcccaggaagtgctgggattacaggcatgagccaccaggcccggccttattgtttctatttgtaataaatctgttccccttgc

SEQ ID NO: 2542 - protein, 102 aa, Homosapiens; identical to SEQ ID NO: 2540

SEQ ID NO: 2543 - DNA, 4175 bp, Homosapiens
gagcttgtagcggcgccacaatctctgtcctctcaggaacaggaactggcttgacgtccttttcctgccctatccaagcccctgttcttgcagcccttctgaagctcagcctggcaccggccccggcgccccagcccctggccaagcctctgctgtcatttctcctccctcctctcagtctgcagctgcgggacgggccgggctcctcagtttctgctgtgttgtgaccccacgaggcgctcagcacccagggaaggcgcgtgtgtccccgatgctggctcctccctgagccccgacggctctcgaggttctgagcctgtggcctgcacagggaacttcctctccgactgcatttatgcctctgtggatgtgaaggctatttctagaaatctcttcctttgcagaaacacccgaaaccctcctgccaggaagaccagggcctgggaagagggtcgctctccggccattctcccctcaccctcctcaccttcctcacatcctgtgccctgggggaccagcagctgcttccacccagaacaagcgggagcctgtgtcaggaaagcatgtcagagcagagctgccagatgtccgaactgcggctcctcctcctgggaaaatgccgctcgggaaaaagtgccacaggaaatgccattctgggcaaacatgtgttcaagtccaagttcagtgatcagacagtgatcaaaatgtgccagagagagagttgggtcctgagagaaaggaaggttgtggtaattgacacccctgaccttttctcctcaatagcttgtgctgaagacaagcaacgcaacatccaacactgcttggagctctctgctcccagcctccatgctctgctcttggtaattgccatcggccatttcacaagggaggatgaggaaacagccaagggcatccaacaagtgtttggagctgaagccaggaggcacatcattattgtcttcactcggaaggatgatttgggggatgacttgctgcaagatttcattgaaaaaaacaaacctctcaagcagttggttcaagactatgagggccgatactgcattttcaacaacaagaccaatagtaaggatgagcagatcacccaggtgttggagctccttcgcaaggttgagtctttggtgaatacgaacggaggaccctatcatgtgaacttcaaaactgaaggcagcaggtttcaagattgtgtgaatgaagctgcatctcaagagggagacaagccacagggcccaagggaaaggcagctgcagtccacaggacccgagcagaatccggggacatcagaactgacagtcctccttgtggggaaacgcggtgctggaaaaagtgcagcaggaaacagcattctggggaggcaggcctttcagaccggatttagtgagcagtcagtaacccagagcttcttgtctgagagcagaagctggagaaaaaagaaagtttcgatcattgatgctccggacatctcatctttaaagaacattgactcagaagttagaaaacacatctgtacaggcccccatgccttcctgctggtgacaccactgggcttttacactaagaatgatgaggcagtgctgagcaccatccaaaacaattttggagaaaaattctttgagtacatgatcatacttcttaccaggaaagaagatttaggggatcaggatctagatacgttcttaagaaacagcaataaagctctctatggtctcatccagaagtgtaaaaacagatatagtgccttcaactaccgggcaacaggagaagaagagcaaaggcaggcggacgagctcctggaaaaaattgagagcatggtgcatcagaatgggaacaagcattgtgttttcagagaaaaagaaaccctgaacattgtccttgtggggagaagcgggactgggaagagtgcgaccgggaactctatcctggggagcctcgtcttcacctctcggctccgggcccagccagtcaccaagaccagccagagtggcaggaggacatgggacggacaggaggtggtggttgtggacactccttccttcaaccagatgctggatgtcgaaaaggacccatcccggttagaagaggaggtcaagcgctgtttgtcctgctgtgaaaaaggggacacattttttgtcctggtgttccagctgggacgattcactgaagaggacaaaacagctgtggcgaaactggaggccatctttggagcagactttacgaaatacgcgattatgctgttcacccggaaggaagacctaggggcggggaatttggaagacttcatgaagaactcagataacaaagcccttcggcgcatttttaaaaagtgtgggcggcgagtttgtgcttttaacaacaaagaaacaggccaggcccaggaaacccaggtgaaagctcttttaacaaaggtcaatgatctgagaaaagaaagtgggtggtccgggtatccccatacacaggagaacgtcagcaaactaattaaaaatgtccaggaaatgtcccaagccgaaaaactccttaaaaatttaataggtattttacaataggtagccgaagtgcctggggtctcttcaattagagacaccctcaggttggggggaggggcggggcatggtacaacctgtgggaagggaagcgggttcatggctttgagggcctgagaggcaaatgcatcccgccttgtgatgtatcagctatttgtagataaataaattgcaggtgggggcgaatagtagggtattataaaggagaaagaagatacaaggtggggaaatctggaaaaagatttcagacattaggctgataataagtggtagaatcaagtcacaagaatcacctcacttgtgtaggtaggttggaatcaggatagacactgtgatcaaggctgaggccacctgggatgagaatatagatagtcgtacaacaacccaggggatccagatacatgagaccagggcagcgttcagcacactcctgggcatggcggaagcaggaagcagactccagagggcctccctgttgtccagggccgttggctccctgagctctcctgtctcctttgggatgcgacttagggctagagtgttcttttcttcacacgttagccattccttacggctcttcacgttccacgcctagatgtgaagtgggacatagtcttccattgctggctgtccctgaggaaacagacatgagtcttggaggttctgaatgattttattgctaattatcacagtgacatagactagaacagaaattagaagcatagtaagattgccaaaatcagagaatcttgcaaagttctgtaattctaagtgttgttctagatttcctctagagaaggttattagaatctccattgcgtttctctttctccttctctttcccttgaggttaggaaacaggttaaaactcagagaactccaataataatggtttaaaaacatcaggggcttcctgtatctcctgtcaggaagccgaggaataagcaggctggggctggtgggcgtcaacatcccagttttgttctatctttctgtcccacctgcactgggatgtggcttctacactcgaatttgcttcttggtttcaagacagtggtgttctttccatagctgagcagattattttgagaggtgggtgatatgtgagagagaaatctggaaccttcttctgggtagatacaggataagatagatacagggtaaaatgttgagcactttgtacatgctttgagagcataatctttgtcatctgtttttttcccctagacaatatcaggttaccgtcaacattaatccatttaaaaggacatggactgttgccattaatacttttggattccatataacccttaacacaataacttctagaaaatgtgtgtgccgtagacacaaagaagggaacaatagacaccagggtatacttgagggtggagggtggcaggagggtgaagattgaaaagctgcctattgcgtgttatgctggtttcctgggtgacaaaattacctgtacaccacacccctgtgacacacaacttactcatgtaacaaacctgtgcatgtaccccttgaacctgaaataaaaattggaaagtaaaaaaaagtgtgtaaatatatttagttgaatcaaataataaagatgaatcattatgaattcac

SEQ ID NO: 2544 - protein, 665 aa, Homosapiens; identical to SEQ ID NO: 298

SEQ ID NO: 2545 - DNA, 1020 bp, Homosapiens
atgaaaaacaagtctgaaaccagtatccatcaatacttggtcgaagagccaaccctttcctggtcgcctccatccactagagccagtgaagtagtatgttccgccaacgtttctcactacgagctccaagtagaaataggaagaggatttgacaagttgacttctgtccatctagcacggcatactcctacgggaacgctggtaactacaaaaattacaaatctggaaaacggcaataaagaacgcctgaaagttttacagaaagccatgattctatcccactttttccggcatcccaatattacaacttattggacagttttcactgttggcagctggctttgggttatttctccatttatggcctatggttcagcaagacaactcttgaggacctattttcctgaaggaatgagtaaaactttaataagaaacattctctttggagcagtgagaggattgaactatctctaccaatatggctgtattcacaggagaattaaagccagccatatcctcatttctggtgatggcctagtgaccctctctggcctgtcccatctgcatagtttggttaagcatggacagaggcatagggctgtgtatgatttcccacagttcagcacattagtgcagccatggctgagtccagaactactgagacaggatttacatgggtataatgtgaagtcagatatttacagtgttgggattacaacatgtgaattagccagtgggcaggtgcctttccaggacgtgcatagaactcagatgctgttaacagaaactgaaagctgggtacagctgtgtttgcaacaagatccggagaaaaggccatcagcaagcagtttattgtcccatgttttcttcaaacagatgaaagaagaaagccaggattcggtactttcactgttgcctcctgcttataacaagccatcaatatcactgcctccggtgttaccttggactgagccagaatgtggttttcctgatgaaaaagattcatattgggaattctag

SEQ ID NO: 2546 - protein, 339 aa, Homosapiens
MKNKSETSIHQYLVEEPTLSWSPPSTRASEVVCSANVSHYELQVEIGRGFDKLTSVHLARHTPTGTLVTTKITNLENGNKERLKVLQKAMILSHFFRHPNITTYWTVFTVGSWLWVISPFMAYGSARQLLRTYFPEGMSKTLIRNILFGAVRGLNYLYQYGCIHRRIKASHILISGDGLVTLSGLSHLHSLVKHGQRHRAVYDFPQFSTLVQPWLSPELLRQDLHGYNVKSDIYSVGITTCELASGQVPFQDVHRTQMLLTETESWVQLCLQQDPEKRPSASSLLSHVFFKQMKEESQDSVLSLLPPAYNKPSISLPPVLPWTEPECGFPDEKDSYWEF

SEQ ID NO: 2547 - DNA, 1255 bp, Homosapiens
ctgactgagaggttttggtggcggtacagacacttttaactcacagtaaaagcaaaagcaacagctcaagcagcctccttggagaaaacctgaaaattcaacttgttcaagagaaggtcttgtacgtgcctaagttctagagcctcctgacgtgagcatggctgagagtgaggaccgctccctgaggatcgttctggtagggaaaactggaagtgggaaaagtgcaacagcgaacaccatccttggagaggaaatctttgattctagaattgctgcccaagctgttaccaagaactgtcaaaaagcatcccgggaatggcaggggagagaccttcttgttgtagacactccagggctctttgacaccaaggagagcctggacaccacctgcaaggaaatcagccgctgcatcatctcctcctgcccagggccccatgctattgtcctagttctgctgctgggccgctacacagaggaggagcagaaaaccgttgcattgatcaaggctgtctttgggaagtcagccatgaagcacatggtcatcttgttcactcgcaaagaagagttggagggccagagcttccatgacttcatagcagatgcggatgtgggcctaaaaagcatcgtcaaggagtgcgggaaccgctgctgtgcctttagcaacagcaagaaaaccagtaaggcagagaaggaaagtcaagtgcaggagttggtggagctgatagagaaaatggtgcagtgcaacgaaggggcttacttttctgatgacatatacaaggacacagaggaaaggctgaaacaacgggaagaggttttgaggaaaatctacactgaccaattaaatgaagaaattaaactagtagaagaggataagcataaatcagaggaagaaaaggagaaagaaattaaattactaaaattaaaatatgatgaaaaaataaaaaatataagggaagaagctgagagaaatatatttaaagatgtttttaataggatttggaagatgctttcagaaatatggcataggtttttgtcgaaatgtaagttttattcttcctaatttactgtgatttgttaatggatgaattgtattttgcaaagatagttagagaaatacctccttccccttagctttattaaggtatcattgataaataaaaataaaatatgtttaatgtatataatgtgatttttaaatatatatatatatatacacacattgtgaaataatgaaataaaggtaattaacacatct

SEQ ID NO: 2548 - protein, 300 aa, Homosapiens; identical to SEQ ID NO: 300

SEQ ID NO: 2549 - DNA, 1973 bp, Homosapiens
tctcctgtttctcaacatcctggcttagtattgtgtgcaaaatcagagaggggtgcaagatcctgatttttcaggagttcaagcgacaatggcagcccaatacggcagtatgagcttcaaccccagcacaccaggggccagttatgggcctggaaggcaagagcccagaaattcccaattgagaattgtgttagtgggtaaaaccggagcaggaaaaagtgcaacaggaaacagcatccttggccggaaagtgtttcattctggcactgcagcaaaatccattaccaagaagtgtgagaaacgcagcagctcatggaaggaaacagaacttgtcgtagttgacacaccaggcattttcgacacagaggtgcccaatgctgaaacgtccaaggagattattcgctgcattcttctgacctccccagggcctcatgctctgcttctggtggttccactgggccgttacactgaggaagagcacaaagccacagagaagatcctgaaaatgtttggagagagggctagaagtttcatgattctcatattcacccggaaagatgacttaggtgacaccaatttgcatgactacttaagggaagctccagaagacattcaagacttgatggacattttcggtgaccgctactgtgcgttaaacaacaaggcaacaggcgctgagcaggaggcccagagggcacagttgctgggcctgatccagcgcgtggtgagggagaacaaggaaggctgctacactaataggatgtaccaaagggcggaggaggagatccagaagcaaacacaagcaatgcaagaactccacagagtggagctggagagagagaaagcgcggataagagaggagtatgaagagaaaatcagaaagctggaagataaagtggagcaggaaaagagaaagaagcaaatggagaagaaactagcagaacaggaggctcactatgctgtaaggcagcaaagggcaagaacggaagtggagagtaaggatgggatacttgaattaatcatgacagcgttacagattgcttcctttattttgttacgtctgttcgcggaagattaaacttaatgaaaatctgtttgtattttctgcatattctctggcaaccttgccccatacttacttatttagcatagtcgagtgctctagtttctgtctctcaggcactcgtaactaaggaccaccattggccattggtagatgtttgattgacttaacaagagagggacaaattttcaatttgtgaaactccaaagcagaaagtattggtgcttgctaccttgtgaattcttccttagacatgcagagaaaatgtatgcaagagaccaaaaagatggctccaagctatgtcatgttacctgtaataaaatcttttcttctagattctttctatgttggcagataatctccccttgtagcttccactcacttattcttgcattcagagtcacaatgatcatcttacccatgtggtttttgagaaagaaagatcaattctttgtttgcagtaggtaatcttagagatggagatgattgtagaattattcctagatgagtgtcaatttatttaattccattgtcatataaggagtcaaattgtttcttatcatttgttcattgaagaacagagacctgtctggaaaatcgatctctacaaattcaattaaataatgatccccaaatgctgaaaaagtgaaatacagcaattcaacagataatagagcaatgtttagtatattcagctgtatctgtagaaactctttgacgaacctcaatttaaccaatttgatgaatacccagttctcttcttttctagagaaagatagttgcaacctcacctccctcactcaacactttgaatacttattgtttggcaggtcatccacacacttctgcccccactgcattgaattttttgcttatgttgtttataataaaacttttcaattatctcata

SEQ ID NO: 2550 - protein, 329 aa, Homosapiens; identical to SEQ ID NO: 302

SEQ ID NO: 2551 - DNA, 2009 bp, Homosapiens
gtttctcaacatcctggcttagtattgtgtgcaaaatcagagaggggtgcaagatcctgatttttcaggagttcaagcgacaatggcagcccaatacggcagtatgagcttcaaccccagcacaccaggggccagttatggtgagagggcattcagtgctccccagaccaggctgcagggagggcctggaaggcaagagcccagaaattcccaattgagaattgtgttagtgggtaaaaccggagcaggaaaaagtgcaacaggaaacagcatccttggccggaaagtgtttcattctggcactgcagcaaaatccattaccaagaagtgtgagaaacgcagcagctcatggaaggaaacagaacttgtcgtagttgacacaccaggcattttcgacacagaggtgcccaatgctgaaacgtccaaggagattattcgctgcattcttctgacctccccagggcctcatgctctgcttctggtggttccactgggccgttacactgaggaagagcacaaagccacagagaagatcctgaaaatgtttggagagagggctagaagtttcatgattctcatattcacccggaaagatgacttaggtgacaccaatttgcatgactacttaagggaagctccagaagacattcaagacttgatggacattttcggtgaccgctactgtgcgttaaacaacaaggcaacaggcgctgagcaggaggcccagagggcacagttgctgggcctgatccagcgcgtggtgagggagaacaaggaaggctgctacactaataggatgtaccaaagggcggaggaggagatccagaagcaaacacaagcaatgcaagaactccacagagtggagctggagagagagaaagcgcggataagagaggagtatgaagagaaaatcagaaagctggaagataaagtggagcaggaaaagagaaagaagcaaatggagaagaaactagcagaacaggaggctcactatgctgtaaggcagcaaagggcaagaacggaagtggagagtaaggatgggatacttgaattaatcatgacagcgttacagattgcttcctttattttgttacgtctgttcgcggaagattaaacttaatgaaaatctgtttgtattttctgcatattctctggcaaccttgccccatacttacttatttagcatagtcgagtgctctagtttctgtctctcaggcactcgtaactaaggaccaccattggccattggtagatgtttgattgacttaacaagagagggacaaattttcaatttgtgaaactccaaagcagaaagtattggtgcttgctaccttgtgaattcttccttagacatgcagagaaaatgtatgcaagagaccaaaaagatggctccaagctatgtcatgttacctgtaataaaatcttttcttctagattctttctatgttggcagataatctccccttgtagcttccactcacttattcttgcattcagagtcacaatgatcatcttacccatgtggtttttgagaaagaaagatcaattctttgtttgcagtaggtaatcttagagatggagatgattgtagaattattcctagatgagtgtcaatttatttaattccattgtcatataaggagtcaaattgtttcttatcatttgttcattgaagaacagagacctgtctggaaaatcgatctctacaaattcaattaaataatgatccccaaatgctgaaaaagtgaaatacagcaattcaacagataatagagcaatgtttagtatattcagctgtatctgtagaaactctttgacgaacctcaatttaaccaatttgatgaatacccagttctcttcttttctagagaaagatagttgcaacctcacctccctcactcaacactttgaatacttattgtttggcaggtcatccacacacttctgcccccactgcattgaattttttgcttatgttgtttataataaaacttttcaattatctcata

SEQ ID NO: 2552 - protein, 343 aa, Homosapiens
MAAQYGSMSFNPSTPGASYGERAFSAPQTRLQGGPGRQEPRNSQLRIVLVGKTGAGKSATGNSILGRKVFHSGTAAKSITKKCEKRSSSWKETELVVVDTPGIFDTEVPNAETSKEIIRCILLTSPGPHALLLVVPLGRYTEEEHKATEKILKMFGERARSFMILIFTRKDDLGDTNLHDYLREAPEDIQDLMDIFGDRYCALNNKATGAEQEAQRAQLLGLIQRVVRENKEGCYTNRMYQRAEEEIQKQTQAMQELHRVELEREKARIREEYEEKIRKLEDKVEQEKRKKQMEKKLAEQEAHYAVRQQRARTEVESKDGILELIMTALQIASFILLRLFAED

SEQ ID NO: 2553 - DNA, 1857 bp, Homosapiens
agagaggggtgcaagatcctgatttttcagggcctggaaggcaagagcccagaaattcccaattgagaattgtgttagtgggtaaaaccggagcaggaaaaagtgcaacaggaaacagcatccttggccggaaagtgtttcattctggcactgcagcaaaatccattaccaagaagtgtgagaaacgcagcagctcatggaaggaaacagaacttgtcgtagttgacacaccaggcattttcgacacagaggtgcccaatgctgaaacgtccaaggagattattcgctgcattcttctgacctccccagggcctcatgctctgcttctggtggttccactgggccgttacactgaggaagagcacaaagccacagagaagatcctgaaaatgtttggagagagggctagaagtttcatgattctcatattcacccggaaagatgacttaggtgacaccaatttgcatgactacttaagggaagctccagaagacattcaagacttgatggacattttcggtgaccgctactgtgcgttaaacaacaaggcaacaggcgctgagcaggaggcccagagggcacagttgctgggcctgatccagcgcgtggtgagggagaacaaggaaggctgctacactaataggatgtaccaaagggcggaggaggagatccagaagcaaacacaagcaatgcaagaactccacagagtggagctggagagagagaaagcgcggataagagaggagtatgaagagaaaatcagaaagctggaagataaagtggagcaggaaaagagaaagaagcaaatggagaagaaactagcagaacaggaggctcactatgctgtaaggcagcaaagggcaagaacggaagtggagagtaaggatgggatacttgaattaatcatgacagcgttacagattgcttcctttattttgttacgtctgttcgcggaagattaaacttaatgaaaatctgtttgtattttctgcatattctctggcaaccttgccccatacttacttatttagcatagtcgagtgctctagtttctgtctctcaggcactcgtaactaaggaccaccattggccattggtagatgtttgattgacttaacaagagagggacaaattttcaatttgtgaaactccaaagcagaaagtattggtgcttgctaccttgtgaattcttccttagacatgcagagaaaatgtatgcaagagaccaaaaagatggctccaagctatgtcatgttacctgtaataaaatcttttcttctagattctttctatgttggcagataatctccccttgtagcttccactcacttattcttgcattcagagtcacaatgatcatcttacccatgtggtttttgagaaagaaagatcaattctttgtttgcagtaggtaatcttagagatggagatgattgtagaattattcctagatgagtgtcaatttatttaattccattgtcatataaggagtcaaattgtttcttatcatttgttcattgaagaacagagacctgtctggaaaatcgatctctacaaattcaattaaataatgatccccaaatgctgaaaaagtgaaatacagcaattcaacagataatagagcaatgtttagtatattcagctgtatctgtagaaactctttgacgaacctcaatttaaccaatttgatgaatacccagttctcttcttttctagagaaagatagttgcaacctcacctccctcactcaacactttgaatacttattgtttggcaggtcatccacacacttctgcccccactgcattgaattttttgcttatgttgtttataataaaacttttcaattatctcata

SEQ ID NO: 2554 - protein, 190 aa, Homosapiens [sequence omitted]

SEQ ID NO: 2555 - DNA, 4894 bp, Homosapiens
caaacatcggccttgtcctccttgtgttcatacactgtggaagcttttctctgcctcctccgtgagagtgcgtggccgggagaccagaaacgtggtcctttctcttgcctgtgagctggtgcagagatggaggaagaagaatatgaacaaattccccaggagaatcccccagaagagctgtcccaggatcctgtgctggagctgtcaggaggtaaaatgaatgaggagaggggagcaagtgggaaacatttggggtgcaggtgggacacagctccaccaccatagtgtgcttggagaggaagctgacgtcccccagtcacagaaatttacccgcctcagccaccatcagaggcctttggggtagggcccttcttatcactagccaaaaataagaaaaaagacccctggataggtatggtagataaaaggaggcgagaaatagcaccaatgactaaatcaccatgccagtcccaaaggaaatgctttcacatggtagatgttcttcctcaggatggatgtgctgacagtgcgtgtgacgaaaataagtggccttggactgaggcttggatgccaacagaccctgtatgggtgtttggctgactccgaagtggagctgtcacagttgtaagtttgaaagcgccttgtgcacaagcagaatgtacttggctgctgcctcagatctgggctctgccttatcgagggcgtccctttcccaaaagccattgcacagggtcaggcgcttaactttcatgggctcaacttcgtcattcatcctggggaggcaggatttacaaatgctggaaacccagccctttcctggccagaagaaatgatttgtgattcattatgtattttaatatgaatgaccttttactttatgaacttaaatggcctgagccatctggaaaaagccacgttaacctactacaatagggacattaccaatacctgtgtaacacctgtttgaccttttgttatagcaatcaaggttagctattcttttaagaatcctctccagagctcaagtgatgcatttggctttagtaaagtccagtggtgtgtgctagctccaggctgctcagatgggggttcctgtctcctctggctctgcactgggctaggtgggtggggatgaagatctactgcccagacttctgcccattcattcaaattccttccagccaccttggggaagctggagggggcccaatgtcactcagttagaattggcacgtgggtcagagccaagggtggctgtcaggccacagcaaggcctgttggtgcccaggagattcaggagatggccacgcccatgctgccacatgccagcttcatgctttgtcatctgagatacatcaatgtcttcagtggggacaagactgggaaaccagctattacttgtcacttctttatgtgctctgggtcttgggacccgcaaggccaggagaagggaattcccttcctgccttcttccccagtcatatctaaaaaccttggtattgggtttcttggtgttctattggccaagtctcgctcttctttctaggctctgctcttgcactgggagagaacgttcagccccaccttcaaggatgtgggcccagaatggtggcccagcgctggtttcagggcagatgttggtcttttacaatctgcccctgcagtctgggggtacacccagaggctcctggtgatgacaagatggggtacatgggcccttaccccagttccctctgctttctttggatatttctaggtctaagggagaaagaacagaagaccccaaggagactgaggctcattctcatggggaaaacagggagtgggaagagtgcaacaggaaacagcatcctcggcagggacgtcttcgagtctaaactcagcaccagacccgtgaccaagacctcccagagacggagccgagagtgggctgggaaggagcttgaggtgattgacacacccaacattctgtccccccaggtctcgccagaggtggcagacgctatctgccaagccatcgtcttatccgccccagggccccacgccgtgctcctggtgacacaactgggccggttcacggatgaggatcagcaggtggtcaggcgcctgcaggaggtctttggagtgggggttctgggtcacaccatcctggtgttcacccggaaggaagacctggctggcggctccctggaagactatgtgcgagagaccaacaaccaggcccttgcctggctggatgtgacccttgcacggcgccattgcggcttcaacaacagggcacagggggaggagcaggaggcccaactgcgagagctcatggagaaagttgaagccattatgtgggaaaacgaaggagattattacagcaacaaggcttaccaatatacccagcaaaactttcggctgaaagaactacaggaaaggcaagtaagccagggccaaggctctgaggacgtgcctggtgaggagtcttggctggaaggactgtcccagatccagaaggaatctgaggaagcccacagatgcctgctggggaaggctgacctttgagcctgtgctggacttgagccaaggacaccatcagcctttgcacccccctgtgtccagccctctgtttctctttccatcccatggagtgcttcccagtctccaggtcatgacgtctggtgtaggaagaggggcatggggcttgaggacagggtccagcatgcccagatcacattccagttccttcattccttcttccagaacatctgggtcctccctcctctgtgccccaacagcacgctgtcttcctattggaccttctatctcattgcattgcctttcatgagttacttgtctatactctgatagaaccaaagtttcttgagggcaggcctgtatcttttacttctgtgtaacttccacagcttttgactgcattggagtcatgcagtcacgtttggtgcggcaactccatgcaagctgttgaccagatgacttctcatctctccccacaccatgatggtttaaggtgcctgttgtgtctggtggctggaacatggcagtggtgctgagacatggggagggttggagactgggtggggagggttggagactgggctgggaggagagcaagcaggaacagggatggaggcaggaggagcagcccttttattcactcttgagctgtaacaaacaagccccgttggaacttcctagtgggaatgatgggagaagtttggggcagggtatccaagaagtcagactgtggtcaagtaggtggtcccttgccctggctacagaacatggaagcccctagggatgcaagtggacttgggcagaggaggtcacaccaccccaccaaggtagacttagattagagatgacttgcatctgttacttcccctttttccatgggtttcatggcccctcatgatatttgccttctgctcctagaaggcacagactactttcaacctgcctcgcccttcactgccacccctcccttctcccttgataatgggagcatgtggatggggtgtctgcgtgtgcaaacgggttccctagcaaagtatttgtgggggtccaatgcaaggaggcagggaagaaagggggcctgcaaaggaagcagtagagtgacttaaacatcttgcgaggcagcctgcctggtttatgggagaactctgaagcccatgatgttttcctggaaggctgttcctacagacggggtttataagtactgatactggacaggatgagaagggagtaggatgtcatcctgtctcaggcctcggataggaagctgcctgccagcaagaggagactgatgtgccccgggtgcaccccacctcctttgaggtccaagatgctcctggggagttgaccgacatttgggaagataataggaggcattggggaaactgctccccaatatattcctcttttcctttcttcaagctgcgtagcagggggcctttagctagtttctcccgagaggggcgggaagtacagctggtggagacagtgctgggagatgatcagaaatctcagggcacagcctcaggtctacctggacactcatccactgttggagatgctcaacagctagacacagatgctcacagccgacctgtggcctcttgctctgaagccatcccccatcttccctagacacagcagacatctgagaaagcttcagcatttctcttgctaacagattcagaaaagtgtctcaaagcagagcacagagttatttggtgtttgctgaagacagcctttgtgccacaatcacttattaaataagcgatcaatttcccattgaactgaacatgcaacatttatcatacattcagttctcattcacactccttaagatttggtcagaatttttatttctgttcatgtcttctacttttctactcctgtatgaataaaatattgatttgattacagtggctttgactataatgtgggagccaatttttgcctcagtcttcatttttatatttaccttgttattctcaggcatttttttcttctatgtgagagttaaaatcattctgtaatttccccccaaaatcatattggtattctagttggcaatgtcttacatttatgttaagtttgagggaattggtagttcaagtataagttaattaaggccattttatttctaagtgaacagacttgaaactccagagctactgaagtaaaagttagaatcatttgcattttcattcagataggagataattttgtaaattttgatgctattattttaactctattagcttaagtaatgtcataatagaaaacacaagcatttgaccaaatgagatccattcagcgactaactggcaaggcactcaaaacatgtcattcattaaatgttgtttttatttacctcaaa

SEQ ID NO: 2556 - protein, 52 aa, Homosapiens [sequence omitted]

SEQ ID NO: 2557 - DNA, 3363 bp, Homosapiens
gctgaaaatataagcaaacatcggccttgtcctccttgtgttcatacactgtggaagcttttctctgcctcctccgtgagagtgcgtggccgggagaccagaaacgtggtcctttctcttgcctgtgagctggtgcagagatggaggaagaagaatatgaacaaattccccaggagaatcccccagaagagctgtcccaggatcctgtgctggagctgtcaggaggtctaagggagaaagaacagaagaccccaaggagactgaggctcattctcatggggaaaacagggagtgggaagagtgcaacaggaaacagcatcctcggcagggacgtcttcgagtctaaactcagcaccagacccgtgaccaagacctcccagagacggagccgagagtgggctgggaaggagcttgaggtgattgacacacccaacattctgtccccccaggtctcgccagaggtggcagacgctatctgccaagccatcgtcttatccgccccagggccccacgccgtgctcctggtgacacaactgggccggttcacggatgaggatcagcaggtggtcaggcgcctgcaggaggtctttggagtgggggttctgggtcacaccatcctggtgttcacccggaaggaagacctggctggcggctccctggaagactatgtgcgagagaccaacaaccaggcccttgcctggctggatgtgacccttgcacggcgccattgcggcttcaacaacagggcacagggggaggagcaggaggcccaactgcgagagctcatggagaaagttgaagccattatgtgggaaaacgaaggagattattacagcaacaaggcttaccaatatacccagcaaaactttcggctgaaagaactacaggaaaggcaagtaagccagggccaaggctctgaggacgtgcctggtgaggagtcttggctggaaggactgtcccagatccagaaggaatctgaggaagcccacagatgcctgctggggaaggctgacctttgagcctgtgctggacttgagccaaggacaccatcagcctttgcacccccctgtgtccagccctctgtttctctttccatcccatggagtgcttcccagtctccaggtcatgacgtctggtgtaggaagaggggcatggggcttgaggacagggtccagcatgcccagatcacattccagttccttcattccttcttccagaacatctgggtcctccctcctctgtgccccaacagcacgctgtcttcctattggaccttctatctcattgcattgcctttcatgagttacttgtctatactctgatagaaccaaagtttcttgagggcaggcctgtatcttttacttctgtgtaacttccacagcttttgactgcattggagtcatgcagtcacgtttggtgcggcaactccatgcaagctgttgaccagatgacttctcatctctccccacaccatgatggtttaaggtgcctgttgtgtctggtggctggaacatggcagtggtgctgagacatggggagggttggagactgggtggggagggttggagactgggctgggaggagagcaagcaggaacagggatggaggcaggaggagcagcccttttattcactcttgagctgtaacaaacaagccccgttggaacttcctagtgggaatgatgggagaagtttggggcagggtatccaagaagtcagactgtggtcaagtaggtggtcccttgccctggctacagaacatggaagcccctagggatgcaagtggacttgggcagaggaggtcacaccaccccaccaaggtagacttagattagagatgacttgcatctgttacttcccctttttccatgggtttcatggcccctcatgatatttgccttctgctcctagaaggcacagactactttcaacctgcctcgcccttcactgccacccctcccttctcccttgataatgggagcatgtggatggggtgtctgcgtgtgcaaacgggttccctagcaaagtatttgtgggggtccaatgcaaggaggcagggaagaaagggggcctgcaaaggaagcagtagagtgacttaaacatcttgcgaggcagcctgcctggtttatgggagaactctgaagcccatgatgttttcctggaaggctgttcctacagacggggtttataagtactgatactggacaggatgagaagggagtaggatgtcatcctgtctcaggcctcggataggaagctgcctgccagcaagaggagactgatgtgccccgggtgcaccccacctcctttgaggtccaagatgctcctggggagttgaccgacatttgggaagataataggaggcattggggaaactgctccccaatatattcctcttttcctttcttcaagctgcgtagcagggggcctttagctagtttctcccgagaggggcgggaagtacagctggtggagacagtgctgggagatgatcagaaatctcagggcacagcctcaggtctacctggacactcatccactgttggagatgctcaacagctagacacagatgctcacagccgacctgtggcctcttgctctgaagccatcccccatcttccctagacacagcagacatctgagaaagcttcagcatttctcttgctaacagattcagaaaagtgtctcaaagcagagcacagagttatttggtgtttgctgaagacagcctttgtgccacaatcacttattaaataagcgatcaatttcccattgaactgaacatgcaacatttatcatacattcagttctcattcacactccttaagatttggtcagaatttttatttctgttcatgtcttctacttttctactcctgtatgaataaaatattgatttgattacagtggctttgactataatgtgggagccaatttttgcctcagtcttcatttttatatttaccttgttattctcaggcatttttttcttctatgtgagagttaaaatcattctgtaatttccccccaaaatcatattggtattctagttggcaatgtcttacatttatgttaagtttgagggaattggtagttcaagtataagttaattaaggccattttatttctaagtgaacagacttgaaactccagagctactgaagtaaaagttagaatcatttgcattttcattcagataggagataattttgtaaattttgatgctattattttaactctattagcttaagtaatgtcataatagaaaacacaagcatttgaccaaatgagatccattcagcgactaactggcaaggcactcaaaacatgtcattcattaaatgttgtttttatttacctcaaa

SEQ ID NO: 2558 - protein, 292 aa, Homosapiens; identical to SEQ ID NO: 723

SEQ ID NO: 2559 - DNA, 2181 bp, Homosapiens
gaaaacattttgctgaaaatataagcaaacatcggccttgtcctccttgtgttcatacactgtggaagcttttctctgcctcctccgtgagagtgcgtggccgggagaccagaaacgtggtcctttctcttgcctgtgagctggtgcagagatggaggaagaagaatatgaacaaattccccaggagaatcccccagaagagctgtcccaggatcctgtgctggagctgtcaggaggtctcgccagaggtggcagacgctatctgccaagccatcgtcttatccgccccagggccccacgccgtgctcctggtgacacaactgggccggttcacggatgaggatcagcaggtggtcaggcgcctgcaggaggtctttggagtgggggttctgggtcacaccatcctggtgttcacccggaaggaagacctggctggcggctccctggaagactatgtgcgagagaccaacaaccaggcccttgcctggctggatgtgacccttgcacggcgccattgcggcttcaacaacagggcacagggggaggagcaggaggcccaactgcgagagctcatggagaaagttgaagccattatgtgggaaaacgaaggagattattacagcaacaaggcttaccaatatacccagcaaaactttcggctgaaagaactacaggaaaggcaagtaagccagggccaaggctctgaggacgtgcctggtgaggagtcttggctggaaggactgtcccagatccagaaggaatctgaggaagcccacagatgcctgctggggaaggctgacctttgagcctgtgctggacttgagccaaggacaccatcagcctttgcacccccctgtgtccagccctctgtttctctttccatcccatggagtgcttcccagtctccaggtcatgacgtctggtgtaggaagaggggcatggggcttgaggacagggtccagcatgcccagatcacattccagttccttcattccttcttccagaacatctgggtcctccctcctctgtgccccaacagcacgctgtcttcctattggaccttctatctcattgcattgcctttcatgagttacttgtctatactctgatagaaccaaagtttcttgagggcaggcctgtatcttttacttctgtgtaacttccacagcttttgactgcattggagtcatgcagtcacgtttggtgcggcaactccatgcaagctgttgaccagatgacttctcatctctccccacaccatgatggtttaaggtgcctgttgtctggtggagacagtgctgggagatgatcagaaatctcagggcacagcctcaggtctacctggacactcatccactgttggagatgctcaacagctagacacagatgctcacagccgacctgtggcctcttgctctgaagccatcccccatcttccctagacacagcagacatctgagaaagcttcagcatttctcttgctaacagattcagaaaagtgtctcaaagcagagcacagagttatttggtgtttgctgaagacagcctttgtgccacaatcacttattaaataagcgatcaatttcccattgaactgaacatgcaacatttatcatacattcagttctcattcacactccttaagatttggtcagaatttttatttctgttcatgtcttctacttttctactcctgtatgaataaaatattgatttgattacagtggctttgactataatgtgggagccaatttttgcctcagtcttcatttttatatttaccttgttattctcaggcatttttttcttctatgtgagagttaaaatcattctgtaatttccccccaaaatcatattggtattctagttggcaatgtcttacatttatgttaagtttgagggaattggtagttcaagtataagttaattaaggccattttatttctaagtgaacagacttgaaactccagagctactgaagtaaaagttagaatcatttgcattttcattcagataggagataattttgtaaattttgatgctattattttaactctattagcttaagtaatgtcataatagaaaacacaagcatttgaccaaatgagatccattcagcgactaactggcaaggcactcaaaacatgtcattcattaaatgttgtttttatttacctcaaa

SEQ ID NO: 2560 - protein, 212 aa, Homosapiens; identical to SEQ ID NO: 721

SEQ ID NO: 2561 - DNA, 2441 bp, Homosapiens
tgctctttcaagggcaggtctccagcccagctctctgaaaacattttgctgaaaatataagcaaacatcggccttgtcctccttgtgttcatacactgtggaagcttttctctgcctcctccgtgagagtgcgtggccgggagaccagaaacgtggtcctttctcttgcctgtgagctggtgcagagatggaggaagaagaatatgaacaaattccccaggagaatcccccagaagagctgtcccaggatcctgtgctggagctgtcaggaggtctaagggagaaagaacagaagaccccaaggagactgaggctcattctcatggggaaaacagggagtgggaagagtgcaacaggaaacagcatcctcggcagggacgtcttcgagtctaaactcagcaccagacccgtgaccaagacctcccagagacggagccgagagtgggctgggaaggagcttgaggtgattgacacacccaacattctgtccccccaggtctcgccagaggtggcagacgctatctgccaagccatcgtcttatccgccccagggccccacgccgtgctcctggtgacacaactgggccggttcacggatgaggatcagcaggtggtcaggcgcctgcaggaggtctttggagtgggggttctgggtcacaccatcctggtgttcacccggaaggaagacctggctggcggctccctggaagactatgtgcgagagaccaacaaccaggcccttgcctggctggatgtgacccttgcacggcgccattgcggcttcaacaacagggcacagggggaggagcaggaggcccaactgcgagagctcatggagaaagttgaagccattatgtgggaaaacgaaggagattattacagcaacaaggcttaccaatatacccagcaaaactttcggctgaaagaactacaggaaaggcaagtaagccagggccaaggctctgaggacgtgcctggtgaggagtcttggctggaaggactgtcccagatccagaaggaatctgaggaagcccacagatgcctgctggggaaggctgacctttgagcctgtgctggacttgagccaaggacaccatcagcctttgcacccccctgtgtccagccctctgtttctctttccatcccatggagtgcttcccagtctccaggtcatgacgtctggtgtaggaagaggggcatggggcttgaggacagggtccagcatgcccagatcacattccagttccttcattccttcttccagaacatctgggtcctccctcctctgtgccccaacagcacgctgtcttcctattggaccttctatctcattgcattgcctttcatgagttacttgtctatactctgatagaaccaaagtttcttgagggcaggcctgtatcttttacttctgtgtaacttccacagcttttgactgcattggagtcatgcagtcacgtttggtgcggcaactccatgcaagctgttgaccagatgacttctcatctctccccacaccatgatggtttaaggtgcctgttgtctggtggagacagtgctgggagatgatcagaaatctcagggcacagcctcaggtctacctggacactcatccactgttggagatgctcaacagctagacacagatgctcacagccgacctgtggcctcttgctctgaagccatcccccatcttccctagacacagcagacatctgagaaagcttcagcatttctcttgctaacagattcagaaaagtgtctcaaagcagagcacagagttatttggtgtttgctgaagacagcctttgtgccacaatcacttattaaataagcgatcaatttcccattgaactgaacatgcaacatttatcatacattcagttctcattcacactccttaagatttggtcagaatttttatttctgttcatgtcttctacttttctactcctgtatgaataaaatattgatttgattacagtggctttgactataatgtgggagccaatttttgcctcagtcttcatttttatatttaccttgttattctcaggcatttttttcttctatgtgagagttaaaatcattctgtaatttccccccaaaatcatattggtattctagttggcaatgtcttacatttatgttaagtttgagggaattggtagttcaagtataagttaattaaggccattttatttctaagtgaacagacttgaaactccagagctactgaagtaaaagttagaatcatttgcattttcattcagataggagataattttgtaaattttgatgctattattttaactctattagcttaagtaatgtcataatagaaaacacaagcatttgaccaaatgagatccattcagcgactaactggcaaggcactcaaaacatgtcattcattaaatgttgtttttatttacctcaaa

SEQ ID NO: 2562 - protein, 292 aa, Homosapiens; identical to SEQ ID NO: 723

SEQ ID NO: 2563 - DNA, 1339 bp, Homosapiens
gttttactttctttttctcttggagctgagctataagacaacaggactgaacagggagccaactgtttctttgaacagtaaatcaggaacaccaatggaccaaaatgaacacagtcactggggaccacatgcaaagggccaatgtgccagcagatctgagctgagaatcatcctggtgggcaaaacaggaactggcaaaagtgctgcagggaacagcatcctcaggaagcaagcatttgaatcgaagctgggttcccagaccttgactaagacttgcagcaaaagtcagggaagctggggaaatagagagattgtcattattgacacaccagatatgttttcttggaaggaccactgtgaagctctgtacaaagaggtgcagaggtgctacttgctgtctgcaccaggaccccatgtgctgctcctggtgactcagctgggccgctatacctcacaggaccagcaggctgcacagagggtgaaggagatctttggagaggatgccatgggacacacaattgtcctctttacccacaaggaagacctcaatggtggctccctgatggattacatgcacgactcagataacaaagccctaagcaagctggtggcagcatgtggtgggcgaatctgtgcctttaataaccgtgctgaagggagcaatcaggatgaccaagtgaaggaactaatggactgtattgaggatctgttgatggagaaaaatggtgatcactataccaatgggttgtacagcctaatacagaggtctaaatgtggacctgtgggatcagatgaaagagtaaaggaattcaaacagagccttataaagtacatggaaactcaaagaagttacacagccttggctgaagcaaactgcctaaaaggagccttaatcaaaacacaactgtgtgttttattttgtattcagttgtttctcagattgataattctgtggctttgcatactgcacagcatgtgcaatttgttttgttgcttactctttagtatgtgcaatttattctgcagtttgctgtttattatacccaaaaagttaatgatatttttgagaacagttattagactagaacgcaagactcctaggttatagttacagatcccagttattatttactcactatcatttagtgggtgaatcacagtaatttccctgtaaaatgtggtacctgaagtcatatttgagattctatgaaatgtttaaatctgaacatcactccaattattaatgaaccaaatcatacgataagttactgtttgcattgaaatataatatcaaagccttttgaaatctgtaaacataaaattcctctcattttcaaat

SEQ ID NO: 2564 - protein, 337 aa, Homosapiens; identical to SEQ ID NO: 304

SEQ ID NO: 2565 - DNA, 1452 bp, Homosapiens
gttttactttctttttctcttggagctgagctataagacaacaggactgaacagggagccaactgtttctttgaacagtaaatcaggaacaccaatggaccaaaatgaacacagtcactggggaccacatgcaaagggccaatgtgccagcagatctgagctgagaatcatcctggtgggcaaaacaggaactggcaaaagtgctgcagggaacagcatcctcaggaagcaagcatttgaatcgaagctgggttcccagaccttgactaagacttgcagcaaaagtcagggaagctggggaaatagagagattgtcattattgacacaccagatatgttttcttggaaggaccactgtgaagctctgtacaaagaggtgcagaggtgctacttgctgtctgcaccaggaccccatgtgctgctcctggtgactcagctgggccgctatacctcacaggaccagcaggctgcacagagggtgaaggagatctttggagaggatgccatgggacacacaattgtcctctttacccacaaggaagacctcaatggtggctccctgatggattacatgcacgactcagataacaaagccctaagcaagctggtggcagcatgtggtgggcgaatctgtgcctttaataaccgtgctgaagggagcaatcaggatgaccaagtgaaggaactaatggactgtattgaggatctgttgatggagaaaaatggtgatcactataccaatgggttgtacagcctaatacagaggtctaaatgtggacctgtgggatcagatgaaagagtaaaggaattcaaacagagccttataaagtacatggaaactcaaagaagttacacagccttggctgaagcaaactgcctaaaaggagccttaatcaaaacacaactgtgtgttttattttgtattcagttgtttctcagattgataattctgtggctttgcatactgcacagcatgtgcaatttgttttgttgcttactctttagtatgtgcaatttattctgcagtttgctgtttattatacccaaaaagttaatgatatttttgagaacagttattagactagaacgcaagactcctaggttatagttacagatcccagttattatttactcactatcatttagtgggtgaatcacagtaatttccctgtaaaatgtggtacctgaagtcatatttgagattctatgaaatgtttaaatctgaacatcactccaattattaatgaaccaaatcatacgataagttactgtttgcattgaaatataatatcaaagccttttgaaatctgtaaacataaaattcctctcattttcaaatatctaaagccagttttatgttcctaaaatctcattttcttctttctagtactactatttctactgaatataatgaaaatggcaataaaataatattacataaactgtaaagtt

SEQ ID NO: 2566 - protein, 337 aa, Homosapiens; identical to SEQ ID NO: 304

SEQ ID NO: 2567 - DNA, 463 bp, Homosapiens
gctgagctataagacaacaggactgaacagggagccaactgtttctttgaacagtaaatcaggaacaccaatggaccaaaatgaacacagtcactgggggaatctggaagctaaaccccagagttgctacaagagacattggctcctgtgagtccaggtggcttctataactgctcaagatgccatctccttgccctgggacctccctaggtgacagtttgcagtgttccatgaattgctgcatagacttccactaggtggaaggcccaacattgtccctctggcaagcgaagttttccattcttctgagtagactagtgtcccagtgaggcccatggcagtcctgtgagcccgagaggtcatttgaaccagctaagaacaagaccactggtgggcattgcagcacctaaccctaaatcatatcattgctaggaggagtaaattaggtaatgcaggtaaacca

SEQ ID NO: 2568 - protein, 37 aa, Homosapiens
CPSEAHGSPVSPRGHLNQLRTRPLVGIAAPNPKSYHC

SEQ ID NO: 2569 - DNA, 309 bp, Homosapiens
gagctataagacaacaggactgaacagggagccaactgtttctttgaacagtaaatcaggaacaccaatggaccaaaatgaacacagtcactggggcgagaggaaggttaaacgtgcaatttggctgcctctaagcaagctccagcgcggtgtatcaggagctgcttggctgctgttttcagaatatagaaatgtgtaatgtaatgcctgcttccttttaagtacaagtgtccattgcatgtctactgtgaggccataatttcactggcctacagaaaataagattaaatgtccataaattttggccaa

SEQ ID NO: 2570 - protein, 43 aa, Homosapiens
MDQNEHSHWGERKVKRAIWLPLSKLQRGVSGAAWLLFSEYRNV

SEQ ID NO: 2571 - DNA, 1246 bp, Homosapiens
caggactgaacagggagccaactgtttctttgaacagtaaatcaggaacaccaatggaccaaaatgaacacagtcactggggtaagcatgggaggaaggaagatggcgacagatgaagaaaatgtctatggtttagaagagaacgctcagtcccggcaggagtccacgcggaggctcatccttgttgggagaacaggggccgggaagagcgccactgggaacagcatcctgggccagagacggttcttctccaggctgggggccacgtctgtgaccagggcctgcaccacgggcagccgcaggtgggacaagtgccacgtggaagtcgtggacactccggacattttcagctcccaagtgtccaagacagatcctggctgtgaggagagaggtcactgctacctgctctcggcccccggaccccacgcgctgctcctggtgacccagttgggtcggttcaccgcccaggaccagcaggcggtgaggcaggtgagggacatgttcggggaggacgtcctaaaatggatggtcatcgtcttcaccaggaaggaggacctggccgggggctccctgcacgattacgtgagcaacacagagaaccgggccttgcgcgagctggtggccgagtgcgggggccgggtctgtgcctttgataaccgggccaccggccgggagcaggaagcccaggtggagcagctgctggggatggtcgagggcttggtgctggagcacaagggcgcccattactccaacgaggtgtatgagctggcgcaggtgctgcgctgggcaggccctgaggagcggctccggcgggtggcggagcgcgtggcagccagggtgcagaggaggccatggggcgcctggctgtcggcccggctgtggaagtggctgaagtcccccaggagctggaggctgggcctggccctgctgctggggggcgcgctcctgttctgggtgctgctccacaggcggtggtcggaggccgttgcggaggtcgggcctgactgacagcgcaggtcctaaaactgaaggcaacttggttaagggaggctgaattcttggagctgaagggaaaacttcattccaacggaaggaatcctgtagtttcaggcatagttttaatgacacagaaaactttgctgcatcacctttgcaactttgccaaagctcagagttcactttttaagtttttaactcattttaaatgatgtgtatgcagagttttaaaataaattcgtctaacaat

SEQ ID NO: 2572 - protein, 314 aa, Homosapiens
MNTVTGVSMGGRKMATDEENVYGLEENAQSRQESTRRLILVGRTGAGKSATGNSILGQRRFFSRLGATSVTRACTTGSRRWDKCHVEVVDTPDIFSSQVSKTDPGCEERGHCYLLSAPGPHALLLVTQLGRFTAQDQQAVRQVRDMFGEDVLKWMVIVFTRKEDLAGGSLHDYVSNTENRALRELVAECGGRVCAFDNRATGREQEAQVEQLLGMVEGLVLEHKGAHYSNEVYELAQVLRWAGPEERLRRVAERVAARVQRRPWGAWLSARLWKWLKSPRSWRLGLALLLGGALLFWVLLHRRWSEAVAEVGPD

SEQ ID NO: 2573 - DNA, 1827 bp, Homosapiens
caggactgaacagggagccaactgtttctttgaacagtaaatcaggaacaccaatggaccaaaatgaacacagtcactggggtaagcatgggaggaaggaagatggcgacagatgaagaaaatgtctatggtttagaagagaacgctcagtcccggcaggagtccacgcggaggctcatccttgttgggagaacaggggccgggaagagcgccactgggaacagcatcctgggccagagacggttcttctccaggctgggggccacgtctgtgaccagggcctgcaccacgggcagccgcaggtgggacaagtgccacgtggaagtcgtggacactccggacattttcagctcccaagtgtccaagacagatcctggctgtgaggagagaggtcactgctacctgctctcggcccccggaccccacgcgctgctcctggtgacccagttgggtcggttcaccgcccaggaccagcaggcggtgaggcaggtgagggacatgttcggggaggacgtcctaaaatggatggtcatcgtcttcaccaggaaggaggacctggccgggggctccctgcacgattacgtgagcaacacagagaaccgggccttgcgcgagctggtggccgagtgcgggggccgggtctgtgcctttgataaccgggccaccggccgggagcaggaagcccaggtggagcagctgctggggatggtcgagggcttggtgctggagcacaagggcgcccattactccaacgaggtgtatgagctggcgcaggtgctgcgctgggcaggccctgaggagcggctccggcgggtggcggagcgcgtggcagccagggtgcagaggaggccatggggcgcctggctgtcggcccggctgtggaagtggctgaagtcccccaggagctggaggctgggcctggccctgctgctggggggcgcgctcctgttctgggtgctgctccacaggcggtggtcggaggccgttgcggaggtcgggcctgactgacagcgcaggtcctaaaactgaaggcaacttggttaagggaggctgaattcttggagctgaagggaaaacttcattccaacggaaggaatcctgtagtttcaggcatagttttaatgacacagaaaactttgctgcatcacctttgcaactttgccaaagctcagagttcactttttaagtttttaactcattttaaatgatgtgtatgcagagttttaaaataaattcgtctaacaataacttcctttggtagttttggtagtctaatgtcaagtagcttgtagtggggacaaacgcatggcacagggaaaacaagtgccattattttcgagctttttaaaaaatttagactgcccctccttgataattttctagttcttatacatgggtagataggttcctttgtgatccttgtagacttttagcatcaataaaagaaatgtgggggttacacacgtgaatgttacttctgagacatcagtttatagtacaatgatttactaccaaaaagatgaatgtaactgtactgttacaaagtggaaaataacagtttccacttttctagaacatattatggttcatggcattccaaaatgaagtaagggccgggcgaggtggctcacgcctgtaatcccaacactttgggaggtcgaggcaggtggatcacctgaggtcaggagttcgagaccagcctgaccaacatggcgaaaccccatctctactaaaaatacaaaaattagccaggcgtgatagcactcgcctgtaatcccagccattcaggaggctgaggcgggagaatcacttgatgcagtgagccga

SEQ ID NO: 2574 - protein, 314 aa, Homosapiens; identical to SEQ ID NO: 2572

SEQ ID NO: 2575 - DNA, 1254 bp, Homosapiens
gaggaaacagccttctgcactcacagccgaagggaaagcagcaggttggggcttcttgtggccaacttcagagcctgtcaccaggaaaggtaagcatgggaggaaggaagatggcgacagatgaagaaaatgtctatggtttagaagagaacgctcagtcccggcaggagtccacgcggaggctcatccttgttgggagaacaggggccgggaagagcgccactgggaacagcatcctgggccagagacggttcttctccaggctgggggccacgtctgtgaccagggcctgcaccacgggcagccgcaggtgggacaagtgccacgtggaagtcgtggacactccggacattttcagctcccaagtgtccaagacagatcctggctgtgaggagagaggtcactgctacctgctctcggcccccggaccccacgcgctgctcctggtgacccagttgggtcggttcaccgcccaggaccagcaggcggtgaggcaggtgagggacatgttcggggaggacgtcctaaaatggatggtcatcgtcttcaccaggaaggaggacctggccgggggctccctgcacgattacgtgagcaacacagagaaccgggccttgcgcgagctggtggccgagtgcgggggccgggtctgtgcctttgataaccgggccaccggccgggagcaggaagcccaggtggagcagctgctggggatggtcgagggcttggtgctggagcacaagggcgcccattactccaacgaggtgtatgagctggcgcaggtgctgcgctgggcaggccctgaggagcggctccggcgggtggcggagcgcgtggcagccagggtgcagaggaggccatggggcgcctggctgtcggcccggctgtggaagtggctgaagtcccccaggagctggaggctgggcctggccctgctgctggggggcgcgctcctgttctgggtgctgctccacaggcggtggtcggaggccgttgcggaggtcgggcctgactgacagcgcaggtcctaaaactgaaggcaacttggttaagggaggctgaattcttggagctgaagggaaaacttcattccaacggaaggaatcctgtagtttcaggcatagttttaatgacacagaaaactttgctgcatcacctttgcaactttgccaaagctcagagttcactttttaagtttttaactcattttaaatgatgtgtatgcagagttttaaaataaattcgtctaacaat

SEQ ID NO: 2576 - protein, 306 aa, Homosapiens; identical to SEQ ID NO: 306

SEQ ID NO: 2577 - DNA, 1884 bp, Homosapiens
gaggaaacagccttctgcactcacagccgaagggaaagcagcaggttggggcttcttgtggccaacttcagagcctgtcaccaggaaaggtaagcatgggaggaaggaagatggcgacagatgaagaaaatgtctatggtttagaagagaacgctcagtcccggcaggagtccacgcggaggctcatccttgttgggagaacaggggccgggaagagcgccactgggaacagcatcctgggccagagacggttcttctccaggctgggggccacgtctgtgaccagggcctgcaccacgggcagccgcaggtgggacaagtgccacgtggaagtcgtggacactccggacattttcagctcccaagtgtccaagacagatcctggctgtgaggagagaggtcactgctacctgctctcggcccccggaccccacgcgctgctcctggtgacccagttgggtcggttcaccgcccaggaccagcaggcggtgaggcaggtgagggacatgttcggggaggacgtcctaaaatggatggtcatcgtcttcaccaggaaggaggacctggccgggggctccctgcacgattacgtgagcaacacagagaaccgggccttgcgcgagctggtggccgagtgcgggggccgggtctgtgcctttgataaccgggccaccggccgggagcaggaagcccaggtggagcagctgctggggatggtcgagggcttggtgctggagcacaagggcgcccattactccaacgaggtgtatgagctggcgcaggtgctgcgctgggcaggccctgaggagcggctccggcgggtggcggagcgcgtggcagccagggtgcagaggaggccatggggcgcctggctgtcggcccggctgtggaagtggctgaagtcccccaggagctggaggctgggcctggccctgctgctggggggcgcgctcctgttctgggtgctgctccacaggcggtggtcggaggccgttgcggaggtcgggcctgactgacagcgcaggtcctaaaactgaaggcaacttggttaagggaggctgaattcttggagctgaagggaaaacttcattccaacggaaggaatcctgtagtttcaggcatagttttaatgacacagaaaactttgctgcatcacctttgcaactttgccaaagctcagagttcactttttaagtttttaactcattttaaatgatgtgtatgcagagttttaaaataaattcgtctaacaataacttcctttggtagttttggtagtctaatgtcaagtagcttgtagtggggacaaacgcatggcacagggaaaacaagtgccattattttcgagctttttaaaaaatttagactgcccctccttgataattttctagttcttatacatgggtagataggttcctttgtgatccttgtagacttttagcatcaataaaagaaatgtgggggttacacacgtgaatgttacttctgagacatcagtttatagtacaatgatttactaccaaaaagatgaatgtaactgtactgttacaaagtggaaaataacagtttccacttttctagaacatattatggttcatggcattccaaaatgaagtaagggccgggcgaggtggctcacgcctgtaatcccaacactttgggaggtcgaggcaggtggatcacctgaggtcaggagttcgagaccagcctgaccaacatggcgaaaccccatctctactaaaaatacaaaaattagccaggcgtgatagcactcgcctgtaatcccagccattcaggaggctgaggcgggagaatcacttgatgcagtgagccgagatcgtgccactgcactccaggctgggtgacaaagcaagaatctgtctc

SEQ ID NO: 2578 - protein, 306 aa, Homosapiens; identical to SEQ ID NO: 306

SEQ ID NO: 2579 - DNA, 1176 bp, Homosapiens
gccttctgcactcacagccgaagggaaagcagcaggttggggcttcttgtggccaacttcagagcctgtcaccaggaaaggtaagcatgggaggaaggaagatggcgacagatgaagaaaatgtctatggtaagaccagcgccactgggaacagcatcctgggccagagacggttcttctccaggctgggggccacgtctgtgaccagggcctgcaccacgggcagccgcaggtgggacaagtgccacgtggaagtcgtggacactccggacattttcagctcccaagtgtccaagacagatcctggctgtgaggagagaggtcactgctacctgctctcggcccccggaccccacgcgctgctcctggtgacccagttgggtcggttcaccgcccaggaccagcaggcggtgaggcaggtgagggacatgttcggggaggacgtcctaaaatggatggtcatcgtcttcaccaggaaggaggacctggccgggggctccctgcacgattacgtgagcaacacagagaaccgggccttgcgcgagctggtggccgagtgcgggggccgggtctgtgcctttgataaccgggccaccggccgggagcaggaagcccaggtggagcagctgctggggatggtcgagggcttggtgctggagcacaagggcgcccattactccaacgaggtgtatgagctggcgcaggtgctgcgctgggcaggccctgaggagcggctccggcgggtggcggagcgcgtggcagccagggtgcagaggaggccatggggcgcctggctgtcggcccggctgtggaagtggctgaagtcccccaggagctggaggctgggcctggccctgctgctggggggcgcgctcctgttctgggtgctgctccacaggcggtggtcggaggccgttgcggaggtcgggcctgactgacagcgcaggtcctaaaactgaaggcaacttggttaagggaggctgaattcttggagctgaagggaaaacttcattccaacggaaggaatcctgtagtttcaggcatagttttaatgacacagaaaactttgctgcatcacctttgcaactttgccaaagctcagagttcactttttaagtttttaactcattttaaatgatgtgtatgcagagttttaaaataaattcgtctaacaat

SEQ ID NO: 2580 - protein, 283 aa, Homosapiens
MGGRKMATDEENVYGKTSATGNSILGQRRFFSRLGATSVTRACTTGSRRWDKCHVEVVDTPDIFSSQVSKTDPGCEERGHCYLLSAPGPHALLLVTQLGRFTAQDQQAVRQVRDMFGEDVLKWMVIVFTRKEDLAGGSLHDYVSNTENRALRELVAECGGRVCAFDNRATGREQEAQVEQLLGMVEGLVLEHKGAHYSNEVYELAQVLRWAGPEERLRRVAERVAARVQRRPWGAWLSARLWKWLKSPRSWRLGLALLLGGALLFWVLLHRRWSEAVAEVGPD

SEQ ID NO: 2581 - DNA, 1757 bp, Homosapiens
gccttctgcactcacagccgaagggaaagcagcaggttggggcttcttgtggccaacttcagagcctgtcaccaggaaaggtaagcatgggaggaaggaagatggcgacagatgaagaaaatgtctatggtaagaccagcgccactgggaacagcatcctgggccagagacggttcttctccaggctgggggccacgtctgtgaccagggcctgcaccacgggcagccgcaggtgggacaagtgccacgtggaagtcgtggacactccggacattttcagctcccaagtgtccaagacagatcctggctgtgaggagagaggtcactgctacctgctctcggcccccggaccccacgcgctgctcctggtgacccagttgggtcggttcaccgcccaggaccagcaggcggtgaggcaggtgagggacatgttcggggaggacgtcctaaaatggatggtcatcgtcttcaccaggaaggaggacctggccgggggctccctgcacgattacgtgagcaacacagagaaccgggccttgcgcgagctggtggccgagtgcgggggccgggtctgtgcctttgataaccgggccaccggccgggagcaggaagcccaggtggagcagctgctggggatggtcgagggcttggtgctggagcacaagggcgcccattactccaacgaggtgtatgagctggcgcaggtgctgcgctgggcaggccctgaggagcggctccggcgggtggcggagcgcgtggcagccagggtgcagaggaggccatggggcgcctggctgtcggcccggctgtggaagtggctgaagtcccccaggagctggaggctgggcctggccctgctgctggggggcgcgctcctgttctgggtgctgctccacaggcggtggtcggaggccgttgcggaggtcgggcctgactgacagcgcaggtcctaaaactgaaggcaacttggttaagggaggctgaattcttggagctgaagggaaaacttcattccaacggaaggaatcctgtagtttcaggcatagttttaatgacacagaaaactttgctgcatcacctttgcaactttgccaaagctcagagttcactttttaagtttttaactcattttaaatgatgtgtatgcagagttttaaaataaattcgtctaacaataacttcctttggtagttttggtagtctaatgtcaagtagcttgtagtggggacaaacgcatggcacagggaaaacaagtgccattattttcgagctttttaaaaaatttagactgcccctccttgataattttctagttcttatacatgggtagataggttcctttgtgatccttgtagacttttagcatcaataaaagaaatgtgggggttacacacgtgaatgttacttctgagacatcagtttatagtacaatgatttactaccaaaaagatgaatgtaactgtactgttacaaagtggaaaataacagtttccacttttctagaacatattatggttcatggcattccaaaatgaagtaagggccgggcgaggtggctcacgcctgtaatcccaacactttgggaggtcgaggcaggtggatcacctgaggtcaggagttcgagaccagcctgaccaacatggcgaaaccccatctctactaaaaatacaaaaattagccaggcgtgatagcactcgcctgtaatcccagccattcaggaggctgaggcgggagaatcacttgatgcagtgagccga

SEQ ID NO: 2582 - protein, 283 aa, Homosapiens; identical to SEQ ID NO: 2580

SEQ ID NO: 2583 - DNA, 1563 bp, Homosapiens
gggaaagcagcaggttggggcttcttgtggccaacttcagagcctgtcaccaggaaaggtaagcatgggaggaaggaagatggcgacagatgaagaaaatgtctatggtaagaccagcgccactgggaacagcatcctgggccagagacggttcttctccaggctgggggccacgtctgtgaccagggcctgcaccacgggcagccgcaggtgggacaagtgccacgtggaagtcgtggacactccggacattttcagctcccaagtgtccaagacagatcctggctgtgaggagagaggtcactgctacctgctctcggcccccggaccccacgcgctgctcctggtgacccagttgggtcggttcaccgcccaggaccagcaggcggtgaggcagctgagtcatggagctttcagccccagcacatggctcctccttaactgcgtctgctcaacctccctcagccctgtgaacagcatccccgcacacagacgcagagcaggactctctctgctgccacttcaccttcctgagagaggaccagcggccagagcctcagtgactgccaccctggaggacagggcacaacaaccgtttctggagagaatgggaggattccagaggggcaaatatggaactatggctgaaggtagatcagaagataacttgtctgcaacaccaccggcattgaggattatcctagtgggcaaaacaggctgcgggaaaagtgccacagggaacagcatccttggccagcccgtgtttgagtccaagctgagggcccagtcagtgaccaggacgtgccaggtgaaaacaggaacatggaacgggaggaaagtcctggtggttgacacgccctccatctttgagtcacaggccgatacccaagagctgtacaagaacatcggggactgctacctgctctctgccccggggccccacgtcctgcttctggtgatccagctggggcgtttcactgctcaggacacagtggccatcaggaaggtgaaagaggtctttgggacaggggccatgagacatgtggtcatcctcttcacccacaaagaggacttagggggccaggccctggatgactatgtagcaaacacggacaactgcagcctgaaagacctggtgcgggagtgtgagagaaggtactgtgccttcaacaactggggctctgtggaggagcagaggcagcagcaggcagagctcctggctgtgattgagaggctggggagggagcgagagggctccttccacagcaatgacctcttcttggatgcccagctgctccaaagaactggagctggggcctgccaggaagactacaggcagtaccaggccaaagtggaatggcaggtggagaagcacaagcaagagctgagggagaacgagagtaactgggcatacaaggcgctcctcagagtcaaacacttgatgcttttgcattatgagatttttgtttttctattgttgtgcagcatactttttttcattatttttctgttcatctttcattacatttaaatctctggaccctggagcacttctaatgtatc

SEQ ID NO: 2584 - protein, 488 aa, Homosapiens
MGGRKMATDEENVYGKTSATGNSILGQRRFFSRLGATSVTRACTTGSRRWDKCHVEVVDTPDIFSSQVSKTDPGCEERGHCYLLSAPGPHALLLVTQLGRFTAQDQQAVRQLSHGAFSPSTWLLLNCVCSTSLSPVNSIPAHRRRAGLSLLPLHLPERGPAARASVTATLEDRAQQPFLERMGGFQRGKYGTMAEGRSEDNLSATPPALRIILVGKTGCGKSATGNSILGQPVFESKLRAQSVTRTCQVKTGTWNGRKVLVVDTPSIFESQADTQELYKNIGDCYLLSAPGPHVLLLVIQLGRFTAQDTVAIRKVKEVFGTGAMRHVVILFTHKEDLGGQALDDYVANTDNCSLKDLVRECERRYCAFNNWGSVEEQRQQQAELLAVIERLGREREGSFHSNDLFLDAQLLQRTGAGACQEDYRQYQAKVEWQVEKHKQELRENESNWAYKALLRVKHLMLLHYEIFVFLLLCSILFFIIFLFIFHYI

SEQ ID NO: 2585 - DNA, 2049 bp, Homosapiens
gggaaagcagcaggttggggcttcttgtggccaacttcagagcctgtcaccaggaaaggtaagcatgggaggaaggaagatggcgacagatgaagaaaatgtctatggtaagaccagcgccactgggaacagcatcctgggccagagacggttcttctccaggctgggggccacgtctgtgaccagggcctgcaccacgggcagccgcaggtgggacaagtgccacgtggaagtcgtggacactccggacattttcagctcccaagtgtccaagacagatcctggctgtgaggagagaggtcactgctacctgctctcggcccccggaccccacgcgctgctcctggtgacccagttgggtcggttcaccgcccaggaccagcaggcggtgaggcagctgagtcatggagctttcagccccagcacatggctcctccttaactgcgtctgctcaacctccctcagccctgtgaacagcatccccgcacacagacgcagagcaggactctctctgctgccacttcaccttcctgagagaggaccagcggccagagcctcagtgactgccaccctggaggacagggcacaacaaccgtttctggagagaatgggaggattccagaggggcaaatatggaactatggctgaaggtagatcagaagataacttgtctgcaacaccaccggcattgaggattatcctagtgggcaaaacaggctgcgggaaaagtgccacagggaacagcatccttggccagcccgtgtttgagtccaagctgagggcccagtcagtgaccaggacgtgccaggtgaaaacaggaacatggaacgggaggaaagtcctggtggttgacacgccctccatctttgagtcacaggccgatacccaagagctgtacaagaacatcggggactgctacctgctctctgccccggggccccacgtcctgcttctggtgatccagctggggcgtttcactgctcaggacacagtggccatcaggaaggtgaaagaggtctttgggacaggggccatgagacatgtggtcatcctcttcacccacaaagaggacttagggggccaggccctggatgactatgtagcaaacacggacaactgcagcctgaaagacctggtgcgggagtgtgagagaaggtactgtgccttcaacaactggggctctgtggaggagcagaggcagcagcaggcagagctcctggctgtgattgagaggctggggagggagcgagagggctccttccacagcaatgacctcttcttggatgcccagctgctccaaagaactggagctggggcctgccaggaagactacaggcagtaccaggccaaagtggaatggcaggtggagaagcacaagcaagagctgagggagaacgagagtaactgggcatacaaggcgctcctcagagtcaaacacttgatgcttttgcattatgagatttttgtttttctattgttgtgcagcatactttttttcattatttttctgttcatctttcattacatttaaatctctggaccctggagcacttctaatgtatcaccccatggagtcattgttctaataatcaccaattcagactcagatcctcgtggtctatggagcatgctgcttgctgtctgtgcagctcccatttccccttcttcctgatagacttggagctgtgtgcctccactccaaggctgcctgcctgctgtaaacactattccactctgtctgccaacaactgcttcaggaatgggcctgagatcccatgcaggtccctgagaagtgagtaaaagtccgcagaggtggggatggaagatctctccttagatagaacctgtcttcctccctggcattgtggggtctgggcgtgacactgggactctcagcagctttgtgctgccaacctgagattgaaggcagtgcctcagagcagcacagagagttggggccccctgagccctgagccaccagccctgcagcctgccctatctccgcatttccagttgtattagccaatagatttcctacttatttaagct

SEQ ID NO: 2586 - protein, 488 aa, Homosapiens; identical to SEQ ID NO: 2584

SEQ ID NO: 2587 - DNA, 2117 bp, Homosapiens
gggaaagcagcaggttggggcttcttgtggccaacttcagagcctgtcaccaggaaaggtaagcatgggaggaaggaagatggcgacagatgaagaaaatgtctatggtaagaccagcgccactgggaacagcatcctgggccagagacggttcttctccaggctgggggccacgtctgtgaccagggcctgcaccacgggcagccgcaggtgggacaagtgccacgtggaagtcgtggacactccggacattttcagctcccaagtgtccaagacagatcctggctgtgaggagagaggtcactgctacctgctctcggcccccggaccccacgcgctgctcctggtgacccagttgggtcggttcaccgcccaggaccagcaggcggtgaggcagctgagtcatggagctttcagccccagcacatggctcctccttaactgcgtctgctcaacctccctcagccctgtgaacagcatccccgcacacagacgcagagcaggactctctctgctgccacttcaccttcctgagagaggaccagcggccagagcctcagtgactgccaccctggaggacagggcacaacaaccgtttctggagagaatgggaggattccagaggggcaaatatggaactatggctgaaggtagatcagaagataacttgtctgcaacaccaccggcattgaggattatcctagtgggcaaaacaggctgcgggaaaagtgccacagggaacagcatccttggccagcccgtgtttgagtccaagctgagggcccagtcagtgaccaggacgtgccaggtgaaaacaggaacatggaacgggaggaaagtcctggtggttgacacgccctccatctttgagtcacaggccgatacccaagagctgtacaagaacatcggggactgctacctgctctctgccccggggccccacgtcctgcttctggtgatccagctggggcgtttcactgctcaggacacagtggccatcaggaaggtgaaagaggtctttgggacaggggccatgagacatgtggtcatcctcttcacccacaaagaggacttagggggccaggccctggatgactatgtagcaaacacggacaactgcagcctgaaagacctggtgcgggagtgtgagagaaggtactgtgccttcaacaactggggctctgtggaggagcagaggcagcagcaggcagagctcctggctgtgattgagaggctggggagggagcgagagggctccttccacagcaatgacctcttcttggatgcccagctgctccaaagaactggagctggggcctgccaggaagactacaggcagtaccaggccaaagtggaatggcaggtggagaagcacaagcaagagctgagggagaacgagagtaactgggcatacaaggcgctcctcagagtcaaacacttgatgcttttgcattatgagatttttgtttttctattgttgtgcagcatactttttttcattatttttctgttcatctttcattacatttaaatctctggaccctggagcacttctaatgtatcaccccatggagtcattgttctaataatcaccaattcagactcagatcctcgtggtctatggagcatgctgcttgctgtctgtgcagctcccatttccccttcttcctgatagacttggagctgtgtgcctccactccaaggctgcctgcctgctgtaaacactattccactctgtctgccaacaactgcttcaggaatgggcctgagatcccatgcaggtccctgagaagtgagtaaaagtccgcagaggtggggatggaagatctctccttagatagaacctgtcttcctccctggcattgtggggtctgggcgtgacactgggactctcagcagctttgtgctgccaacctgagattgaaggcagtgcctcagagcagcacagagagttggggccccctgagccctgagccaccagccctgcagcctgccctatctccgcatttccagttgtattagccaatagatttcctacttatttaagctatttgagctccgggtctcttctacctgcattctaaaacattcaaagtaataaaaatttctccacattc

SEQ ID NO: 2588 - protein, 488 aa, Homosapiens; identical to SEQ ID NO: 2584

SEQ ID NO: 2589 - DNA, 2531 bp, Homosapiens
gggaaagcagcaggttggggcttcttgtggccaacttcagagcctgtcaccaggaaaggtaagcatgggaggaaggaagatggcgacagatgaagaaaatgtctatggtaagaccagcgccactgggaacagcatcctgggccagagacggttcttctccaggctgggggccacgtctgtgaccagggcctgcaccacgggcagccgcaggtgggacaagtgccacgtggaagtcgtggacactccggacattttcagctcccaagtgtccaagacagatcctggctgtgaggagagaggtcactgctacctgctctcggcccccggaccccacgcgctgctcctggtgacccagttgggtcggttcaccgcccaggaccagcaggcggtgaggcagctgagtcatggagctttcagccccagcacatggctcctccttaactgcgtctgctcaacctccctcagccctgtgaacagcatccccgcacacagacgcagagcaggactctctctgctgccacttcaccttcctgagagaggaccagcggccagagcctcagtgactgccaccctggaggacagggcacaacaaccgtttctggagagaatgggaggattccagaggggcaaatatggaactatggctgaaggtagatcagaagataacttgtctgcaacaccaccggcattgaggattatcctagtgggcaaaacaggctgcgggaaaagtgccacagggaacagcatccttggccagcccgtgtttgagtccaagctgagggcccagtcagtgaccaggacgtgccaggtgaaaacaggaacatggaacgggaggaaagtcctggtggttgacacgccctccatctttgagtcacaggccgatacccaagagctgtacaagaacatcggggactgctacctgctctctgccccggggccccacgtcctgcttctggtgatccagctggggcgtttcactgctcaggacacagtggccatcaggaaggtgaaagaggtctttgggacaggggccatgagacatgtggtcatcctcttcacccacaaagaggacttagggggccaggccctggatgactatgtagcaaacacggacaactgcagcctgaaagacctggtgcgggagtgtgagagaaggtactgtgccttcaacaactggggctctgtggaggagcagaggcagcagcaggcagagctcctggctgtgattgagaggctggggagggagcgagagggctccttccacagcaatgacctcttcttggatgcccagctgctccaaagaactggagctggggcctgccaggaagactacaggcagtaccaggccaaagtggaatggcaggtggagaagcacaagcaagagctgagggagaacgagagtaactgggcatacaaggcgctcctcagagtcaaacacttgatgcttttgcattatgagatttttgtttttctattgttgtgcagcatactttttttcattatttttctgttcatctttcattacatttaaatctctggaccctggagcacttctaatgtatcaccccatggagtcattgttctaataatcaccaattcagactcagatcctcgtggtctatggagcatgctgcttgctgtctgtgcagctcccatttccccttcttcctgatagacttggagctgtgtgcctccactccaaggctgcctgcctgctgtaaacactattccactctgtctgccaacaactgcttcaggaatgggcctgagatcccatgcaggtccctgagaagtgagtaaaagtccgcagaggtggggatggaagatctctccttagatagaacctgtcttcctccctggcattgtggggtctgggcgtgacactgggactctcagcagctttgtgctgccaacctgagattgaaggcagtgcctcagagcagcacagagagttggggccccctgagccctgagccaccagccctgcagcctgccctatctccgcatttccagttgtattagccaatagatttcctacttatttaagctatttgagctccgggtctcttctacctgcattctaaaacattcaaagtaataaaaatttctccacattcctttttatcctttaaatctgttggaacttcccagtccacatgcttcctttgagcaagtggcatctagaataaaggaacagggttggcttttcttgttcctaaaattaggaagaacctcctgctcctactgaagtgcctgccacatagtggacattccctgaactctgagtaaagcaaaacactttcagatggatggattgcattgacgaatgggagtgggagagggtcaaggaaatggggtgccctgtacgcagggctttctctgtgctttcttctcagtttggccaggggcccaaaagaaacacagctcacatttcaatgctctgcaaggaatcactttggcaaatgttcacacatgagaaaggttaagcaaactctttctccttctccactgtaaaatgtccttggatcaac

SEQ ID NO: 2590 - protein, 488 aa, Homosapiens; identical to SEQ ID NO: 2584

SEQ ID NO: 2591 - DNA, 1299 bp, Homosapiens
atgacaggaagtgacccgttaaggaagcagcacatcgctgcattcggctggttttcagggtcttgttcccaatcagtttccagccaacaccagggtgtcctagtccgcagaggtgtgggggacacactccataatctctacttttctttttgtgcagctgagtcatggagctttcagccccagcacatggctcctccttaactgcgtctgctcaacctccctcagccctgtgaacagcatccccgcacacagacgcagagcaggactctctctgctgccacttcaccttcctgagagaggaccagcggccagagcctcagtgactgccaccctggaggacagggcacaacaaccgtttctggagagaatgggaggattccagaggggcaaatatggaactatggctgaaggtagatcagaagataacttgtctgcaacaccaccggcattgaggattatcctagtgggcaaaacaggctgcgggaaaagtgccacagggaacagcatccttggccagcccgtgtttgagtccaagctgagggcccagtcagtgaccaggacgtgccaggtgaaaacaggaacatggaacgggaggaaagtcctggtggttgacacgccctccatctttgagtcacaggccgatacccaagagctgtacaagaacatcggggactgctacctgctctctgccccggggccccacgtcctgcttctggtgatccagctggggcgtttcactgctcaggacacagtggccatcaggaaggtgaaagaggtctttgggacaggggccatgagacatgtggtcatcctcttcacccacaaagaggacttagggggccaggccctggatgactatgtagcaaacacggacaactgcagcctgaaagacctggtgcgggagtgtgagagaaggtactgtgccttcaacaactggggctctgtggaggagcagaggcagcagcaggcagagctcctggctgtgattgagaggctggggagggagcgagagggctccttccacagcaatgacctcttcttggatgcccagctgctccaaagaactggagctggggcctgccaggaagactacaggcagtaccaggccaaagtggaatggcaggtggagaagcacaagcaagagctgagggagaacgagagtaactgggcatacaaggcgctcctcagagtcaaacacttgatgcttttgcattatgagatttttgtttttctattgttgtgcagcatactttttttcattatttttctgttcatctttcattacatttaaatctctgg

SEQ ID NO: 2592 - protein, 307 aa, Homosapiens; identical to SEQ ID NO: 308

SEQ ID NO: 2593 - DNA, 1809 bp, Homosapiens
atgacaggaagtgacccgttaaggaagcagcacatcgctgcattcggctggttttcagggtcttgttcccaatcagtttccagccaacaccagggtgtcctagtccgcagaggtgtgggggacacactccataatctctacttttctttttgtgcagctgagtcatggagctttcagccccagcacatggctcctccttaactgcgtctgctcaacctccctcagccctgtgaacagcatccccgcacacagacgcagagcaggactctctctgctgccacttcaccttcctgagagaggaccagcggccagagcctcagtgactgccaccctggaggacagggcacaacaaccgtttctggagagaatgggaggattccagaggggcaaatatggaactatggctgaaggtagatcagaagataacttgtctgcaacaccaccggcattgaggattatcctagtgggcaaaacaggctgcgggaaaagtgccacagggaacagcatccttggccagcccgtgtttgagtccaagctgagggcccagtcagtgaccaggacgtgccaggtgaaaacaggaacatggaacgggaggaaagtcctggtggttgacacgccctccatctttgagtcacaggccgatacccaagagctgtacaagaacatcggggactgctacctgctctctgccccggggccccacgtcctgcttctggtgatccagctggggcgtttcactgctcaggacacagtggccatcaggaaggtgaaagaggtctttgggacaggggccatgagacatgtggtcatcctcttcacccacaaagaggacttagggggccaggccctggatgactatgtagcaaacacggacaactgcagcctgaaagacctggtgcgggagtgtgagagaaggtactgtgccttcaacaactggggctctgtggaggagcagaggcagcagcaggcagagctcctggctgtgattgagaggctggggagggagcgagagggctccttccacagcaatgacctcttcttggatgcccagctgctccaaagaactggagctggggcctgccaggaagactacaggcagtaccaggccaaagtggaatggcaggtggagaagcacaagcaagagctgagggagaacgagagtaactgggcatacaaggcgctcctcagagtcaaacacttgatgcttttgcattatgagatttttgtttttctattgttgtgcagcatactttttttcattatttttctgttcatctttcattacatttaaatctctggaccctggagcacttctaatgtatcaccccatggagtcattgttctaataatcaccaattcagactcagatcctcgtggtctatggagcatgctgcttgctgtctgtgcagctcccatttccccttcttcctgatagacttggagctgtgtgcctccactccaaggctgcctgcctgctgtaaacactattccactctgtctgccaacaactgcttcaggaatgggcctgagatcccatgcaggtccctgagaagtgagtaaaagtccgcagaggtggggatggaagatctctccttagatagaacctgtcttcctccctggcattgtggggtctgggcgtgacactgggactctcagcagctttgtgctgccaacctgagattgaaggcagtgcctcagagcagcacagagagttggggccccctgagccctgagccaccagccctgcagcctgccctatctccgcatttccagttgtattagccaatagatttcctacttatttaagct

SEQ ID NO: 2594 - protein, 307 aa, Homosapiens; identical to SEQ ID NO: 308

SEQ ID NO: 2595 - DNA, 1877 bp, Homosapiens
atgacaggaagtgacccgttaaggaagcagcacatcgctgcattcggctggttttcagggtcttgttcccaatcagtttccagccaacaccagggtgtcctagtccgcagaggtgtgggggacacactccataatctctacttttctttttgtgcagctgagtcatggagctttcagccccagcacatggctcctccttaactgcgtctgctcaacctccctcagccctgtgaacagcatccccgcacacagacgcagagcaggactctctctgctgccacttcaccttcctgagagaggaccagcggccagagcctcagtgactgccaccctggaggacagggcacaacaaccgtttctggagagaatgggaggattccagaggggcaaatatggaactatggctgaaggtagatcagaagataacttgtctgcaacaccaccggcattgaggattatcctagtgggcaaaacaggctgcgggaaaagtgccacagggaacagcatccttggccagcccgtgtttgagtccaagctgagggcccagtcagtgaccaggacgtgccaggtgaaaacaggaacatggaacgggaggaaagtcctggtggttgacacgccctccatctttgagtcacaggccgatacccaagagctgtacaagaacatcggggactgctacctgctctctgccccggggccccacgtcctgcttctggtgatccagctggggcgtttcactgctcaggacacagtggccatcaggaaggtgaaagaggtctttgggacaggggccatgagacatgtggtcatcctcttcacccacaaagaggacttagggggccaggccctggatgactatgtagcaaacacggacaactgcagcctgaaagacctggtgcgggagtgtgagagaaggtactgtgccttcaacaactggggctctgtggaggagcagaggcagcagcaggcagagctcctggctgtgattgagaggctggggagggagcgagagggctccttccacagcaatgacctcttcttggatgcccagctgctccaaagaactggagctggggcctgccaggaagactacaggcagtaccaggccaaagtggaatggcaggtggagaagcacaagcaagagctgagggagaacgagagtaactgggcatacaaggcgctcctcagagtcaaacacttgatgcttttgcattatgagatttttgtttttctattgttgtgcagcatactttttttcattatttttctgttcatctttcattacatttaaatctctggaccctggagcacttctaatgtatcaccccatggagtcattgttctaataatcaccaattcagactcagatcctcgtggtctatggagcatgctgcttgctgtctgtgcagctcccatttccccttcttcctgatagacttggagctgtgtgcctccactccaaggctgcctgcctgctgtaaacactattccactctgtctgccaacaactgcttcaggaatgggcctgagatcccatgcaggtccctgagaagtgagtaaaagtccgcagaggtggggatggaagatctctccttagatagaacctgtcttcctccctggcattgtggggtctgggcgtgacactgggactctcagcagctttgtgctgccaacctgagattgaaggcagtgcctcagagcagcacagagagttggggccccctgagccctgagccaccagccctgcagcctgccctatctccgcatttccagttgtattagccaatagatttcctacttatttaagctatttgagctccgggtctcttctacctgcattctaaaacattcaaagtaataaaaatttctccacattc

SEQ ID NO: 2596 - protein, 307 aa, Homosapiens; identical to SEQ ID NO: 308

SEQ ID NO: 2597 - DNA, 2291 bp, Homosapiens
atgacaggaagtgacccgttaaggaagcagcacatcgctgcattcggctggttttcagggtcttgttcccaatcagtttccagccaacaccagggtgtcctagtccgcagaggtgtgggggacacactccataatctctacttttctttttgtgcagctgagtcatggagctttcagccccagcacatggctcctccttaactgcgtctgctcaacctccctcagccctgtgaacagcatccccgcacacagacgcagagcaggactctctctgctgccacttcaccttcctgagagaggaccagcggccagagcctcagtgactgccaccctggaggacagggcacaacaaccgtttctggagagaatgggaggattccagaggggcaaatatggaactatggctgaaggtagatcagaagataacttgtctgcaacaccaccggcattgaggattatcctagtgggcaaaacaggctgcgggaaaagtgccacagggaacagcatccttggccagcccgtgtttgagtccaagctgagggcccagtcagtgaccaggacgtgccaggtgaaaacaggaacatggaacgggaggaaagtcctggtggttgacacgccctccatctttgagtcacaggccgatacccaagagctgtacaagaacatcggggactgctacctgctctctgccccggggccccacgtcctgcttctggtgatccagctggggcgtttcactgctcaggacacagtggccatcaggaaggtgaaagaggtctttgggacaggggccatgagacatgtggtcatcctcttcacccacaaagaggacttagggggccaggccctggatgactatgtagcaaacacggacaactgcagcctgaaagacctggtgcgggagtgtgagagaaggtactgtgccttcaacaactggggctctgtggaggagcagaggcagcagcaggcagagctcctggctgtgattgagaggctggggagggagcgagagggctccttccacagcaatgacctcttcttggatgcccagctgctccaaagaactggagctggggcctgccaggaagactacaggcagtaccaggccaaagtggaatggcaggtggagaagcacaagcaagagctgagggagaacgagagtaactgggcatacaaggcgctcctcagagtcaaacacttgatgcttttgcattatgagatttttgtttttctattgttgtgcagcatactttttttcattatttttctgttcatctttcattacatttaaatctctggaccctggagcacttctaatgtatcaccccatggagtcattgttctaataatcaccaattcagactcagatcctcgtggtctatggagcatgctgcttgctgtctgtgcagctcccatttccccttcttcctgatagacttggagctgtgtgcctccactccaaggctgcctgcctgctgtaaacactattccactctgtctgccaacaactgcttcaggaatgggcctgagatcccatgcaggtccctgagaagtgagtaaaagtccgcagaggtggggatggaagatctctccttagatagaacctgtcttcctccctggcattgtggggtctgggcgtgacactgggactctcagcagctttgtgctgccaacctgagattgaaggcagtgcctcagagcagcacagagagttggggccccctgagccctgagccaccagccctgcagcctgccctatctccgcatttccagttgtattagccaatagatttcctacttatttaagctatttgagctccgggtctcttctacctgcattctaaaacattcaaagtaataaaaatttctccacattcctttttatcctttaaatctgttggaacttcccagtccacatgcttcctttgagcaagtggcatctagaataaaggaacagggttggcttttcttgttcctaaaattaggaagaacctcctgctcctactgaagtgcctgccacatagtggacattccctgaactctgagtaaagcaaaacactttcagatggatggattgcattgacgaatgggagtgggagagggtcaaggaaatggggtgccctgtacgcagggctttctctgtgctttcttctcagtttggccaggggcccaaaagaaacacagctcacatttcaatgctctgcaaggaatcactttggcaaatgttcacacatgagaaaggttaagcaaactctttctccttctccactgtaaaatgtccttggatcaac

SEQ ID NO: 2598 - protein, 307 aa, Homosapiens; identical to SEQ ID NO: 308

SEQ ID NO: 2599 - DNA, 4960 bp, Homosapiens
caccagggtgtcctagtccgcagaggtgtgggggacacactccataatctctacttttctttttgtgcagctgagtcatggagctttcagccccagcacatggctcctccttaactgcgtctgctcaacctccctcagccctgtgaacagcatccccgcacacagacgcagagcaggactctctctgctgccacttcaccttcctgagagaggaccagcggccagagcctcagtgactgccaccctggaggacagggcacaacaaccgtttctggtaaggagaactgggtttatgctcacagagactttgggaattgaaaggatcacagtttggtcacagctgttcatttctgacatgaccttgcacagatcccctcacttctgggttcgctggtcagtaaaacggggcaatggtgatgagtgttgcgggcatcagcaggtgcacagctggtggagcacagcctgaagaatctgtgcctgcactcacagcccagtcccaggacagcgggctttgctgccccattgcccattacttagccaagtcgatctccatgaaactctcagggagtaaggctgaactgatcctctcatcagtgggacagatgggagaactgaagctcccagagggtgataggctttcccccatctcccctagcatgccggggcattcttctcaattttaccctcctaatttctcctgtcccagaccagccagacacgtaccatgtctcagacaagcctgggagctgaggatggattcttagggctccccagggcaaatgtgggatattttcccaccccaggagcctcatgttccaaacaagacccctgagtggaccttgtcttgtgactttcaacttctgaaaactaccccatgctcccccagatgccccacatttttcctatgacaccctgccggacgcacaccaaaccgcaaaacacatgattccaatacctggaaatacatgggctggggcagatgggtgaaggagatacttatgaacaaggaagacaagaagtggtttgatcttttctaaaatagtatggaagaggctgctttcttgtaatttgctaaaataagctcttctcatggtaaaatcaggttcatgcaattttcaaatcggaatgtgcattttgttcatttgcttcacccttttccctgagccagaccctcccaccagcttgccagaggctgctactgtcttgcttgcacactgccttccaatctctcatgaactttggtctcttttgtgggacgattagtaaaatttttcctttggagaagacgcctgtcttcattctcaattcctccacttttgtctgccctgtagaccaacacgtatcacattccttcaagcctacggtgtgtccaccacgctctattcagttcttttataatcttctccatgactcattttagcattgccatcagtatcctttctgactcacctgtgaacactttgttatttgtgaatatctgccaaaaaatgtattcctcaatgcagcctgatccactcagaaagcttggattgggagagctattgttgctggtcattggctaacataacatagtttgactggcttttgtgacaggcaattggctgttttaaaagaaaagacctcaattcagagaaactcctgccaccagcaattttatttttgaataaccttttataagaaatgcactcaagattttgcaataaaattctgtgtgttggttttagggtaggcttctagctgtccaattaatttgtctcctgaccagggagtggcagcattgtacacatgttccaagaggtttgttgacttttttggaaaagtctctttttccacctgtggaatcaaggacaatacacagcaaaaggagccatttcctgatgctagctccattgtaaatatgtgacctttggcaggtcatttaatgctcagtttccttgcattttaatagaaattttaagatcagttttgatcacatcacagggaatttgagagagcaattaaaataagaaggatgaaataactttgaaaattataaatgtattcacagaggcttattacaattatgatgttcataatcaatatcattaccactgtcatcttgacccttaccacatcattatgttgattccaaacctcagaaaacgtcatctaaagtagagaggatgtcagggaactggtgctattttagcaaaagccagaagcataatttaccagagacgagaacagggtgtgggagagaggaaaatgttcttctctgggcttaagaaaaagaaagaaaggagagaggggagggtaaagaggaaaggaggaagaaaagaaagaagggaaagggagggaggcaggaagctgtcttaatacattctgataatataaaaatagatttcttgacctaaagaaggccaagaaaatccactgaatgaatagaaaaatgtggaaaagatagaaatcacagaagttattaaaaattgaagtttataaattaccaaaatagcaaataaaccatgaaaactgtttttaatttaatgataatcagtaaaatgtaagtttaagccaattaagacatccttatttatgcccataaggatgacaggaaattaaaagtgtaatattactaagtgcctgtgaagatttggggacttcttataaatgggtggtgcaaataggagttaactcaactccctgggagtcatatttggcaataaccagtcacgtggaaaatgtacatccccaatactgttgcacaatgctggaaacccggagcaggcaatgagttgttcttgaattcggcctgaagttgattctttctcttcaatcacctcactacctcctctccaccaaccgtcagggtgggaaagcggtcataccggtccccctataccatttcctctcacgtcagttcttcgtgtccctgatccccacttccatcctcccactggacagtaccttgtaatttcctctccgccgctggaatgtccatttgacacaaagactttctgggactggaagtttccactacttcaaataaaccaatcttatttacagcaaggcaatttttttttctctattctggtaagtttgttactttaatttcaatttttttaatgcctactctttgttccatagaagaatgctttctccatttcatgcctttctggttgggggagataatcaactgatttgcttcaaaatatttcctgattttctgtaagttgaggggagggaagtaatcgtgcactattttagcataacctaacatctaacatcacctgctttgtttaaagttatttacagatgtttcaaagtaaagtatgagttagaaaattagggatggaaatggctcatttgagaatgattattcttagatgtctgaattgaggtgccctcaggctctaccagctcccaaacgtacatctgctttttatccttttcctgtttttattccaggagagaatgggaggattccagaggggcaaatatggaactatggctgaaggtagatcagaagataacttgtctgcaacaccaccggcattgaggattatcctagtgggcaaaacaggctgcgggaaaagtgccacagggaacagcatccttggccagcccgtgtttgagtccaagctgagggcccagtcagtgaccaggacgtgccaggtgaaaacaggaacatggaacgggaggaaagtcctggtggttgacacgccctccatctttgagtcacaggccgatacccaagagctgtacaagaacatcggggactgctacctgctctctgccccggggccccacgtcctgcttctggtgatccagctggggcgtttcactgctcaggacacagtggccatcaggaaggtgaaagaggtctttgggacaggggccatgagacatgtggtcatcctcttcacccacaaagaggacttagggggccaggccctggatgactatgtagcaaacacggacaactgcagcctgaaagacctggtgcgggagtgtgagagaaggtactgtgccttcaacaactggggctctgtggaggagcagaggcagcagcaggcagagctcctggctgtgattgagaggctggggagggagcgagagggctccttccacagcaatgacctcttcttggatgcccagctgctccaaagaactggagctggggcctgccaggaagactacaggcagtaccaggccaaagtggaatggcaggtggagaagcacaagcaagagctgagggagaacgagagtaactgggcatacaaggcgctcctcagagtcaaacacttgatgcttttgcattatgagatttttgtttttctattgttgtgcagcatactttttttcattatttttctgttcatctttcattacatttaaatctctggaccctggagcacttctaatgtatcaccccatggagtcattgttctaataatcaccaattcagactcagatcctcgtggtctatggagcatgctgcttgctgtctgtgcagctcccatttccccttcttcctgatagacttggagctgtgtgcctccactccaaggctgcctgcctgctgtaaacactattccactctgtctgccaacaactgcttcaggaatgggcctgagatcccatgcaggtccctgagaagtgagtaaaagtccgcagaggtggggatggaagatctctccttagatagaacctgtcttcctccctggcattgtggggtctgggcgtgacactgggactctcagcagctttgtgctgccaacctgagattgaaggcagtgcctcagagcagcacagagagttggggccccctgagccctgagccaccagccctgcagcctgccctatctccgcatttccagttgtattagccaatagatttcctacttatttaagctatttgagctccgggtctcttctacctgcattctaaaacattcaaagtaataaaaatttctccacattc

SEQ ID NO: 2600 - protein, 307 aa, Homosapiens; identical to SEQ ID NO: 308

SEQ ID NO: 2601 - DNA, 827 bp, Homosapiens
caggacgtgccaggtgaaaacaggaacatggaacgggaggaaagtcctggtggttgacacgccctccatctttgagtcacaggccgatacccaagagctgtacaagaacatcggggactgctacctgctctctgccccggggccccacgtcctgcttctggtgatccagctggggcgtttcactgctcaggacacagtggccatcaggaaggtgaaagaggtctttgggacaggggccatgagacatgtggtcatcctcttcaccctgagccaccagccctgcagcctgccctatctccgcatttccagttgtattagccaatagatttcctacttatttaagctatttgagctccgggtctcttctacctgcattctaaaacattcaaagtaataaaaatttctccacattcctttttatcctttaaatctgttggaacttcccagtccacatgcttcctttgagcaagtggcatctagaataaaggaacagggttggcttttcttgttcctaaaattaggaagaacctcctgctcctactgaagtgcctgccacatagtggacattccctgaactctgagtaaagcaaaacactttcagatggatggattgcattgacgaatgggagtgggagagggtcaaggaaatggggtgccctgtacgcagggctttctctgtgctttcttctcagtttggccaggggcccaaaagaaacacagctcacatttcaatgctctgcaaggaatcactttggcaaatgttcacacatgagaaaggttaagcaaactctttctccttctccactgtaaaatgtccttggatcaac

SEQ ID NO: 2602 - protein, 58 aa, Homosapiens [sequence omitted]

SEQ ID NO: 2603 - DNA, 458 bp, Homosapiens
ggaacatggaacgggaggaaagtcctggtggttgacacgccctccatctttgagtcacaggccgatacccaagagctgtacaagaacatcggggactgctacctgctctctgccccggggccccacgtcctgcttctggtgatccagctggggcgtttcactgctcaggacacagtggccatcaggaaggtgaaagaggtctttgggacaggggccatgagacatgtggtcatcctcttcacccacaaagaggacttagggggccaggccctggatgactatgtagcaaacacggacaatctcagcagctttgtgctgccaacctgagattgaaggcagtgcctcagagcagcacagagagttggggccccctgagccctgagccaccagccctgcagcctgccctatctccgcatttccagttgtattagccaatagatttcctacttatttaagct

SEQ ID NO: 2604 - protein, 36 aa, Homosapiens
MRHVVILFTHKEDLGGQALDDYVANTDNLSSFVLPT

SEQ ID NO: 2605 - DNA, 665 bp, Homosapiens
gaccctgccccaaaaacctccttcaccttcctgatggccactgtgtcctgagcagtgaaacgcccagctggatcaccagaagcagcacatggggcccgagggcagagagcaggtagcagtccccgatgttcttgtacagctcttgagtctggaccttggactcaaagatggagagcgtgtcgaccaccaggactttcctcccattccatgttcctgtctccacctggcatgtcctggttactgactgggcccccagcttgcactcaaacacaggctggccaaggatgctgttccctgtggtgcttttcccacagcctgttttgcccaccaggaggatcagcagcagcagtgatcctggagccaacctgccttctcctcagcctgtgagagcgggtgaagagtgagggtataaaaactgcattctgaggaggaggtgccaaaagacagaaggcaaaggcatccagaggcactggcaccctggcacaatgaagcatgcaggcctgggtgaaggaatacctcctgacaactccgggaatgatggctatgctaataatgggtatagtgcccgtgaagaagaaaatgagacactcactgaaaatctgagaagcaaagtaactgctataaaatctttttccattgaaataggccatgaagttaaaacccaa

SEQ ID NO: 2606 - protein, 78 aa, Homosapiens
MESVSTTRTFLPFHVPVSTWHVLVTDWAPSLHSNTGWPRMLFPVVLFPQPVLPTRRISSSSDPGANLPSPQPVRAGEE

SEQ ID NO: 2607 - DNA, 486 bp, Homosapiens
atgaagcatgcaggcctgggtgaaggaatacctcctgacaactccgggaatgatggctatgctaataatgggtatagtgcccgtgaagaagaaaatgagacactcactgaaaatctgagaagcaaagtaactgctataaaatctttttccattgaaataggccatgaagttaaaacccaaaataaattattagctgtaatggattcacaatttgattctacaactggatttctaggcttctttacaagcctctatgtaaagcacaggctggtgagggccccaggaagagcagcaccgccctcggcacaggcccctactccaagtcctgtgcaggagcaggtcttgcccagcgcagcagctctgcacctctgtggcaccgctctgccaagagggaaggtgcaggccctgcagcccatcgccttggatctgaagaccagccctgtggggctgctaagtcatgaaactggcctcatggagatttcataa

SEQ ID NO: 2608 - protein, 161 aa, Homosapiens
MKHAGLGEGIPPDNSGNDGYANNGYSAREEENETLTENLRSKVTAIKSFSIEIGHEVKTQNKLLAVMDSQFDSTTGFLGFFTSLYVKHRLVRAPGRAAPPSAQAPTPSPVQEQVLPSAAALHLCGTALPRGKVQALQPIALDLKTSPVGLLSHETGLMEIS

SEQ ID NO: 2609 - DNA, 672 bp, Homosapiens
agaaataaggtgaagttagcttgaggaaagagctgtaaggaagagtgaagtcagctgagtcaaggacacaagcggaaaatgtgcaaagatgagccagaagcatggaaaagtacctccaagacagaggagaactgatccaagagaaaggagatgggagtgggcatcacgtacagccagagggcgccacctgccggctttggtactcaatgaaataaaagagggcacaaacaaatgctcatggataggaagaatcagtatcatgaaagtggccatactgcccaaggtaatttatagattcaatgccatctccatcaagctaccaatgactttcttcacagaattggaaaaaactactttaaagttcatatggaaccgaaaaagaggccgcattgccaagtcaatcctaagccaaaagaacaaagctggaggcaccacgctacctgacttcaaactatactacaaggctacagtaaccaaaacagcatggtacttgtacaaagcagagatatagaccaatggaacagaacagagtcctcacaaataatatcacatctacaaccatctgatctttgacaaacctgacaaaaacaagcaatggggaaaggattccctatttaataaatggtgctgggaaaactggctagccatatgtagaaagctgaaactggatcc

SEQ ID NO: 2610 - protein, 140 aa, Homosapiens
MSQKHGKVPPRQRRTDPRERRWEWASRTARGRHLPALVLNEIKEGTNKCSWIGRISIMKVAILPKVIYRFNAISIKLPMTFFTELEKTTLKFIWNRKRGRIAKSILSQKNKAGGTTLPDFKLYYKATVTKTAWYLYKAEI

SEQ ID NO: 2611 - DNA, 641 bp, Homosapiens
agatgcagggacatgtggccatgctgaggctgcaggagccaggaaccccaggagatgggccttgcccttcttcagcaaagacggatgtaagctggagctgtggcagccatcattgccctgtgaaaagtccacttggagctgccaaagaccaccccaggagcttcagaatgaagacaacctggaagtcagagctgacagaaataaggtgaagttagcttgaggaaagagctgtaaggaagagtgaagtcagctgagtcaaggacacaagcggaaaatgtgcaaagatgagccagaagcatggaaaagtacctccaagacagaggagaactgatccaagagaaaggagatgggagtgggcatcacgtacagccagagggcgccacctgccgaaatgcctcttattgtttacattatgaagtctcaacttggatggaagcccaactgcaacacggcctcctaaaatgagacgcaactgttcaactgaactgttctcaggactaaaaggctgtgtcaataagatacggggaatatttgttcttctgtgtgttccgatccttgtttttctttcccttcgttgatctcttgtttcacaacttccaacccaaatctgctcacagctactaacttggcttttaacatat

SEQ ID NO: 2612 - protein, 68 aa, Homosapiens
MQGHVAMLRLQEPGTPGDGPCPSSAKTDVSWSCGSHHCPVKSPLGAAKDHPRSFRMKTTWKSELTEIR

SEQ ID NO: 2613 - DNA, 2309 bp, Homosapiens
gtgctagcatagaatctaacaagaaatggccctgcatccattctcttttcttctaataacagccccagatttccatttttggacctaccttttcctttttatcaggctaagtgttcatggtggggctctgtccttagttccagggataaagcctgtgacccaaacttaaaccgcagatcattttccccaggccatggagattgtttcaaatgtgggcacatggcctgaatgggtcatatcagagtaaatcttagggcttctgggttatgccaccatcacaggctcttgctttcctcactgaacttgaacctagacggatgtaagctggagctgtggcagccatcattgccctgtgaaaagtccacttggagctgccaaagaccaccccaggagcttcagaatgaagacaacctggaagtcagagctgacagaaataaggtgaagttagcttgaggaaagagctgtaaggaagagtgaagtcagctgagtcaaggacacaagcggaaaatgtgcaaagatgagccagaagcatggaaaagtacctccaagacagaggagaactgatccaagagaaaggagatgggagtgggcatcacgtacagccagagggcgccacctgccggtaagagctgaatagtgaacttcgtgtttcttgggataaaacattgtataatacacagtactgggaagaaaatcatatacgcactaatgtgcctctacgttataccgccgtcattcccctaatttatcacccccttatgagtaaattcgggttacaaaaacttgtgtaacataacattgtatatattctttgcaatgtatgcaaatacacacaaatatgtaaatatatgtttatttgtttgtatacgcgtaggatagtttcagatggaaacacccaaagtagcaacactgactgcctctagggggggaaaccgagcatctagaaggtgaggtgtgtgtgggtgtacttttgaggtgttgcccacctgtatgttttgaatattctctaatcaaaaaaaaaatttaaatagaatcattaaaattttttaaaactgaagacttcccctggatcctttccatcatctttaactagaaccattctggctttatgactaaacctatctgctttggtcatttacttctttaaaacgagacaaccatgtgacatcctaggatccatcgaatgacctggttcacaagagaagccagagtgcagtcaggacaaggcaaacagccctttactggaagaattgggcaatctatctggtgagaggtaagtttaaatagggcagtgacactgcacaacaaagtcccattttttggactttatgggggttgaaaaccctgcctgacagactcagagtccttaaccagactgccccagcggggagaagggtaccaggagggtttccacgagggcagaggcagcaggtgtctgactacctactccatttgcaaggacgaatggaaagccagggctcaccacacaggtgaacagtagaagactgcatgagccgatggaaaaacagaccctaagagcagcagaagaggagaaagtccaaataacatcttcagtgagattaagactatagtttatggcagtctcgtgcatctatcaacaataagaacatgctatatagagagacaattagaagacaagagttacctagagattgaaaatataattgctgaagttaaaaaaccctttattggccgggcgcagtggctcacacctgtaatcctagcactttgggaggctgaggcaggcaggtcacttgagcccaggagttcaagaccagcctggacaacacagggagaccctgtctctacaaaaaaattgcaaagattagccgagcatggtggcatgcacttgtagcttgggactacatcctagctacgtgggaggcatagatgggaggatcacctgggcccgggaagtgtgaggctgcagtgagctgtgattgcaccactgtactccagtctgggcaacagagtgagattctgtctcaaaaaacaaaaaaacaaacaaacaaaaaaacaaaacaaacaacaaaaaccacctaaactaaactccccccaaaaaccctttacttagaaaatgatgaaaaagagaaagtggcataaaatattagtgaaaagttaacaattcaagagggccatctgagattggacatccactggcaggcatctctgagtgagaacagaagaaagaggaaatatgaaggcatgggaagggagctgcacagagttaaggaagactttggtttgcagagcgaaaaggattgcctaatggaagcacaataagtagg

SEQ ID NO: 2614 - protein, 74 aa, Homosapiens
MGHIRVNLRASGLCHHHRLLLSSLNLNLDGCKLELWQPSLPCEKSTWSCQRPPQELQNEDNLEVRADRNKVKLA

SEQ ID NO: 2615 - DNA, 608 bp, Homosapiens
ctgctgttgtcctctgcgtgaatagcttcatctggcaaactgaaccctttttatacatcgacactgtgtgtgatcgagcaatccgtgccctgttcctggctgtctgtgtcttgaaggtcattgtgtccttggtttccttgggagtaggtcttcgaaacttgtgtggccagagctcccagcccctgaatgaggaaggatcagagaagaggctactgggggagaattcagtgcccccttcgccctctagggagcagacctccactgccattgtcctgtgagctgccaaagaccccacggggtgcccgcatgtccctgtctagggcagcccagggcccccactcctggctcctcacacttgcctcccctatggccgctctccagaccctcctcctttcttctccccacatccgcacctgctgttcccactctggggttctcaagtccatgaacagatattgttgcattttccacaatgctgattaaacataataaacaatccagaaaagcagttttgcccagaaagatatggtttccctttgtttatacacctcgtgcgccatgaaaggcctttctttgtgtcgctatgtatgaggttaaatgggagctga

SEQ ID NO: 2616 - protein, 98 aa, Homosapiens
MRKDQRRGYWGRIQCPLRPLGSRPPLPLSCELPKTPRGARMSLSRAAQGPHSWLLTLASPMAALQTLLLSSPHIRTCCSHSGVLKSMNRYCCIFHNAD

SEQ ID NO: 2617 - DNA, 1222 bp, Homosapiens
caacaccccatctctctctctaaaaaaagagaactggcgtgagctattgtgcccagctgggatcttgacaaagacactatttctctcctttcacctgtgctgtgtatttttccctcgcctagttcccagacctcactgctatatgtcttctccctggcaggcaggatgacgcaaaacacggtgattgtgaatggagttgctatggcctctaggccatcccagcccacccacgtcaacgtccacatccaccaggagtcagctttgacacaactgctgaaagctggaggttctctgaagaagtttctttttcaccctggggacactgtgccttccacagccaggattggttatgagcagctggctctaggggtgactcagatattgctgggggttgtgagttgtgttcttggagtgtgtctcagcttggggccctggactgtgctgagtgcctcaggctgtgccttctgggcggggtctgtggtgatcgcagcaggagctggggccattgtccatgagaagcacccgggcaaacttgctggctatatatccagcctgctcaccctggcaggctttgctacagctatggctgctgttgtcctctgcgtgaatagcttcatctggcaaactgaaccctttttatacatcgacactgtgtgtgatcgctcagaccctgtcttccctaccactgggtacagatggatgcggcgaagtcaagagaaccaatggcagaaggaggagtgtagagcttacatgcagatgctgaggaagttgttcacagcaatccgtgccctgttcctggctgtctgtgtcttgaaggtcattgtgtccttggtttccttgggagtaggtcttcgaaacttgtgtggccagagctcccagcccctgaatgaggaaggatcagagaagaggctactgggggagaattcagtgcccccttcgccctctagggagcagacctccactgccattgtcctgtgagctgccaaagaccccacggggtgcccgcatgtccctgtctagggcagcccagggcccccactcctggctcctcacacttgcctcccctatggccgctctccagaccctcctcctttcttctccccacatccgcacctgctgttcccactctggggttctcaagtccatgaacagatattgttgcattttccacaatgctgattaaacataataaacaatccagaaaagcagttttgcccagaaa

SEQ ID NO: 2618 - protein, 270 aa, Homosapiens
MTQNTVIVNGVAMASRPSQPTHVNVHIHQESALTQLLKAGGSLKKFLFHPGDTVPSTARIGYEQLALGVTQILLGVVSCVLGVCLSLGPWTVLSASGCAFWAGSVVIAAGAGAIVHEKHPGKLAGYISSLLTLAGFATAMAAVVLCVNSFIWQTEPFLYIDTVCDRSDPVFPTTGYRWMRRSQENQWQKEECRAYMQMLRKLFTAIRALFLAVCVLKVIVSLVSLGVGLRNLCGQSSQPLNEEGSEKRLLGENSVPPSPSREQTSTAIVL

SEQ ID NO: 2619 - DNA, 1023 bp, Homosapiens
ctcccgtcgctcccctgctcggggtcagctagtgtccgctctgctcggccgcgggctcccggaggactgcaggcaggatgacgcaaaacacggtgattgtgaatggagttgctatggcctctaggccatcccagcccacccacgtcaacgtccacatccaccaggagtcagctttgacacaactgctgaaagctggaggttctctgaagaagtttctttttcaccctggggacactgtgccttccacagccaggattggttatgagcagctggctctaggggtgatcgcagcaggagctggggccattgtccatgagaagcacccgggcaaacttgctggctatatatccagcctgctcaccctggcaggctttgctacagctatggctgctgttgtcctctgcgtgaatagcttcatctggcaaactgaaccctttttatacatcgacactgtgtgtgatcgctcagaccctgtcttccctaccactgggtacagatggatgcggcgaagtcaagagaaccaatggcagaaggaggagtgtagagcttacatgcagatgctgaggaagttgttcacagcaatccgtgccctgttcctggctgtctgtgtcttgaaggtcattgtgtccttggtttccttgggagtaggtcttcgaaacttgtgtggccagagctcccagcccctgaatgaggaaggatcagagaagaggctactgggggagaattcagtgcccccttcgccctctagggagcagacctccactgccattgtcctgtgagctgccaaagaccccacggggtgcccgcatgtccctgtctagggcagcccagggcccccactcctggctcctcacacttgcctcccctatggccgctctccagaccctcctcctttcttctccccacatccgcacctgctgttcccactctggggttctcaagtccatgaacagatattgttgcattttccacaatgctgattaaacataataaacaatccagaaaagcagttttgcccagaaa

SEQ ID NO: 2620 - protein, 233 aa, Homosapiens
MTQNTVIVNGVAMASRPSQPTHVNVHIHQESALTQLLKAGGSLKKFLFHPGDTVPSTARIGYEQLALGVIAAGAGAIVHEKHPGKLAGYISSLLTLAGFATAMAAVVLCVNSFIWQTEPFLYIDTVCDRSDPVFPTTGYRWMRRSQENQWQKEECRAYMQMLRKLFTAIRALFLAVCVLKVIVSLVSLGVGLRNLCGQSSQPLNEEGSEKRLLGENSVPPSPSREQTSTAIVL

SEQ ID NO: 2621 - DNA, 1298 bp, Homosapiens
cgagtgggagcgcagggggcgcgcgggggctcggtcttctcccgcccggtccgctcctccgggcggaaccccctttgccgggcccccgggccgcagctggtttcgggaaaccgcgcagcctgggcggggccgcagcccccacccgtgcatctgccgtctccgccctcccgtcgctcccctgctcggggtcagctagtgtccgctctgctcggccgcgggctcccggaggactgcaggcaggatgacgcaaaacacggtgattgtgaatggagttgctatggcctctaggccatcccagcccacccacgtcaacgtccacatccaccaggagtcagctttgacacaactgctgaaagctggaggttctctgaagaagtttctttttcaccctggggacactgtgccttccacagccaggattggttatgagcagctggctctaggggtgactcagatattgctgggggttgtgagttgtgttcttggagtgtgtctcagcttggggccctggactgtgctgagtgcctcaggctgtgccttctgggcggggtctgtggtgatcgcagcaggagctggggccattgtccatgagaagcacccgggcaaacttgctggctatatatccagcctgctcaccctggcaggctttgctacagctatggctgctgttgtcctctgcgtgaatagcttcatctggcaaactgaaccctttttatacatcgacactgtgtgtgatcgctcagaccctgtcttccctaccactgggtacagatggatgcggcgaagtcaagagaaccaatggcagaaggaggagtgtagagcttacatgcagatgctgaggaagttgttcacagcaatccgtgccctgttcctggctgtctgtgtcttgaaggtcattgtgtccttggtttccttgggagtaggtcttcgaaacttgtgtggccagagctcccagcccctgaatgaggaaggatcagagaagaggctactgggggagaattcagtgcccccttcgccctctagggagcagacctccactgccattgtcctgtgagctgccaaagaccccacggggtgcccgcatgtccctgtctagggcagcccagggcccccactcctggctcctcacacttgcctcccctatggccgctctccagaccctcctcctttcttctccccacatccgcacctgctgttcccactctggggttctcaagtccatgaacagatattgttgcattttccacaatgctgattaaacataataaacaatccagaaaagcagttttgcccagaaa

SEQ ID NO: 2622 - protein, 270 aa, Homosapiens; identical to SEQ ID NO: 2618

SEQ ID NO: 2623 - DNA, 2267 bp, Homosapiens
gtgctgaccatgctggaactgcggcgactacagagcctgcgggaacctcccctttcgcccaagatctgctctgtccccctcatcctcctcccagggccctggcgtctgggtcaagcagcgccccacacctcgacccctcaccccctcctcccgggctcttcctgcggcctcccctccacagtccgcaggctctgggacaggaccgagtccttggctgcctgacgctttccccagccccggggcacgggaagagctggacagaggaaagtgttcggggcagccgggaagagcccaccacctaccaggcgtcgggcggcccgcaggggaatctccgtggtgccggcctggttcagatccgactcttcaggcgggggcgaggcagatctaggggttggcgtggggcgggggaagcggtggtcctgggggcccggaggtagctggaacccgaggtgccctcagggcgaggcctgggccgtcaagggaaggtctggctggaatctggggctgggctggaagcagtctgaagctcctttgtacgtgtgcggaattgtctaactcctgtcctttctaaccccaaggaggccaggtgggtgaaagagtgaaactgctttgaaaagtaggtagagtacgaatgggaggtgttattagaattgttaataatatttgatttaaactgtgatacttagccaggatgtccattagaattgcctatgcaggatttattttagagccaggcaagctgattctaaagtgcatgtgaagaagtagtctagcaaaaatggccatgacaattctgaaagaaaaaccacacgaggggatcatgaaacagcccaattagcattaagctccatgttaaaattgtggtaatgatgcctagcccatgagacatgccaatgggcagaatataaggactagaataggcctacattcctaggggaacttcatttctgctcaggagagaattttaaatcactgagaaaaagaggatgtattttccgcaaatggaacgtatctttcagaagttaaacatctgaatgacagcaacagaacttggatccgtgtctcccaacggcgaaggttggtcacccagctcccaaattccagatggtcggcatttaaaagtgaaaactgaaagcataaaggcacttagaagaaaatgtggaagattattttataatctcgaaacggggaagtcctttaaaagtgcaggatgacgcaaaacacggtgattgtgaatggagttgctatggcctctaggccatcccagcccacccacgtcaacgtccacatccaccaggagtcagctttgacacaactgctgaaagctggaggttctctgaagaagtttctttttcaccctggggacactgtgccttccacagccaggattggttatgagcagctggctctaggggtgactcagatattgctgggggttgtgagttgtgttcttggagtgtgtctcagcttggggccctggactgtgctgagtgcctcaggctgtgccttctgggcggggtctgtggtgatcgcagcaggagctggggccattgtccatgagaagcacccgggcaaacttgctggctatatatccagcctgctcaccctggcaggctttgctacagctatggctgctgttgtcctctgcgtgaatagcttcatctggcaaactgaaccctttttatacatcgacactgtgtgtgatcgctcagaccctgtcttccctaccactgggtacagatggatgcggcgaagtcaagagaaccaatggcagaaggaggagtgtagagcttacatgcagatgctgaggaagttgttcacagcaatccgtgccctgttcctggctgtctgtgtcttgaaggtcattgtgtccttggtttccttgggagtaggtcttcgaaacttgtgtggccagagctcccagcccctgaatgaggaaggatcagagaagaggctactgggggagaattcagtgcccccttcgccctctagggagcagacctccactgccattgtcctgtgagctgccaaagaccccacggggtgcccgcatgtccctgtctagggcagcccagggcccccactcctggctcctcacacttgcctcccctatggccgctctccagaccctcctcctttcttctccccacatccgcacctgctgttcccactctggggttctcaagtccatgaacagatattgttgcattttccacaatgctgattaaacataataaacaatccagaaaagcagttttgcccagaaa

SEQ ID NO: 2624 - protein, 270 aa, Homosapiens; identical to SEQ ID NO: 2618

SEQ ID NO: 2625 - DNA, 2305 bp, Homosapiens
ccccagcacgatctgcatcacctgaaagacaaaggacccaagatcccggctcctaggtggacctgccactgcagggattaaccgctaaaaccccaaaaagagagggagaggtagagagagagagaaagaaagaagagaagagaagagaagagaagagaaaaggagaagaaagaggaggagaaggagaaagaagaagaggcaggaggaggagaaaagagaagggaaaggaaggagaggagagccggcccatcctgagtttggcccagaggaaaggatggactcagggctccactgattgggactctgcatggtcagtggctcctccacaccccttcagcccagagcctcccctccccaggctcttactgagaaggccagagaatcacatcgctaagtaagaagacataactggctcggtgtcctgttcagagggaggctggcagagagtgctgctgcggctggaggtggggagttcctcccgccgcccgacgaggcaggccgtcacactcacccacgaggccaccagcagccggctgctgcccctggcctgggtggcccggggccgcagcgcagagcagcaggtgagcaggagcttggccagggcagactcctggtggatgtgcacatcgatgtgggtgtgctgtggggcctccggggccatctcatcactgtcggctgttcccattgtcagggacacagtctatgaggaagggagcaccagagaggaacggctgtcagaagattttcgcagatttcattggagttggggaggtcaggggccagtggtggctcaaagtcacccaatgaatggctgtcctggtcacagggccgcacccctggcccctcacgaggggaatgtgtgtagcagagggggtgctgaccatgctggaactgcggcgactacagagcctgcgggaacctcccctttcgcccaagatctgctctgtccccctcatcctcctcccagggccctggcgtctgggtcaagcagcgccccacacctcgacccctcaccccctcctcccgggctcttcctgcggcctcccctccacagtccgcaggctctgggacaggaccgagtccttggctgcctgtggagctcctgtgccagcagctgcgccccggctgcgctccggatacccccatccccgccaccgccgacctcccgctccaccgactgctgctcacgcccgacgggttcacgccgcccctgccccgtgaaggaccgcgctgcggtgcggaggcaggatgacgcaaaacacggtgattgtgaatggagttgctatggcctctaggccatcccagcccacccacgtcaacgtccacatccaccaggagtcagctttgacacaactgctgaaagctggaggttctctgaagaagtttctttttcaccctggggacactgtgccttccacagccaggattggttatgagcagctggctctaggggtgactcagatattgctgggggttgtgagttgtgttcttggagtgtgtctcagcttggggccctggactgtgctgagtgcctcaggctgtgccttctgggcggggtctgtggtgatcgcagcaggagctggggccattgtccatgagaagcacccgggcaaacttgctggctatatatccagcctgctcaccctggcaggctttgctacagctatggctgctgttgtcctctgcgtgaatagcttcatctggcaaactgaaccctttttatacatcgacactgtgtgtgatcgctcagaccctgtcttccctaccactgggtacagatggatgcggcgaagtcaagagaaccaatggcagaaggaggagtgtagagcttacatgcagatgctgaggaagttgttcacagcaatccgtgccctgttcctggctgtctgtgtcttgaaggtcattgtgtccttggtttccttgggagtaggtcttcgaaacttgtgtggccagagctcccagcccctgaatgaggaaggatcagagaagaggctactgggggagaattcagtgcccccttcgccctctagggagcagacctccactgccattgtcctgtgagctgccaaagaccccacggggtgcccgcatgtccctgtctagggcagcccagggcccccactcctggctcctcacacttgcctcccctatggccgctctccagaccctcctcctttcttctccccacatccgcacctgctgttcccactctggggttctcaagtccatgaacagatattgttgcattttccacaatgctgattaaacataataaacaatccagaaaagcagttttgcccagaaa

SEQ ID NO: 2626 - protein, 270 aa, Homosapiens; identical to SEQ ID NO: 2618

SEQ ID NO: 2627 - DNA, 519 bp, Homosapiens
ctgctgttgtcctctgcgtgaatagcttcatctggcaaactgaaccctttttatacatcgacactgtgtgtgatcgagcaatccgtgccctgttcctggctgtctgtgtcttgaaggtcattgtgtccttggtttccttgggagtaggtcttcgaaacttgtgtggccagagctcccagcccctgaatgaggaaggatcagagaagaggctactgggggagaattcagtgcccccttcgccctctagggagcagacctccactgccattgtcctgtgagctgccaaagaccccacggggtgcccgcatgtccctgtctagggcagcccagggcccccactcctggctcctcacacttgcctcccctatggccgctctccagaccctcctcctttcttctccccacatccgcacctgctgttcccactctggggttctcaagtccatgaacagatattgttgcattttccacaatgctgattaaacataataaacaatccagaaaagcagttttgcccag

SEQ ID NO: 2628 - protein, 98 aa, Homosapiens; identical to SEQ ID NO: 2616

SEQ ID NO: 2629 - DNA, 179 bp, Homosapiens
actgggggagaattcagtgcccccttcgccctctagggagcagaccctcctcctttcttctccccacatccgcacctgctgttcccactctggggttctcaagtccatgaacagatattgttgcattttccacaatgctgattaaacataataaacaatccagaaaagcagttttgccc

SEQ ID NO: 2630 - protein, 35 aa, Homosapiens
WGRIQCPLRPLGSRPSSFLLPTSAPAVPTLGFSSP

SEQ ID NO: 2631 - DNA, 1201 bp, Homosapiens
cgagtgggagcgcagggggcgcgcgggggctcggtcttctcccgcccggtccgctcctccgggcggaaccccctttgccgggcccccgggccgcagctggtttcgggaaaccgcgcagcctgggcggggccgcagcccccacccgtgcatctgccgtctccgccctcccgtcgctcccctgctcggggtcagctagtgtccgctctgctcggccgcgggctcccggaggactgcaggcaggatgacgcaaaacacggtgattgtgaatggagttgctatggcctctaggccatcccagcccacccacgtcaacgtccacatccaccaggagtcagctttgacacaactgctgaaagctggaggttctctgaagaagtttctttttcaccctggggacactgtgccttccacagccaggattggttatgagcagctggctctaggggtgactcagatattgctgggggttgtgagttgtgttcttggagtgtgtctcagcttggggccctggactgtgctgagtgcctcaggctgtgccttctgggcggggtctgtggtgatcgcagcaggagctggggccattgtccatgagaagcacccgggcaaacttgctggctatatatccagcctgctcaccctggcaggctttgctacagctatggctgctgttgtcctctgcgtgaatagcttcatctggcaaactgaaccctttttatacatcgacactgtgtgtgatcgctcagaccctgtcttccctaccactgggtacagatggatgcggcgaagtcaagagaaccaatggcagaaggaggagtgtagagcttacatgcagatgctgaggaagttgttcacagcaatccgtgccctgttcctggctgtctgtgtcttgaaggtcattgtgtccttggtttccttgggagtaggtcttcgaaacttgtgtggccagagctcccagcccctggtgagttgtcggggaggggcctctgggcagcgtgagtctgggtggtgagtgtgtgggacaggtaggagtgcggggccaggggcacccgaacctgaggctgggcctggtgcccctcagcttctttccatatgcagctctcccctttgctgtctggggaatgtggccatcaccatggtcctgggccaactgtcgccgccctgtgcctctctgcgccctcctctgctctgatctccccactct

SEQ ID NO: 2632 - protein, 255 aa, Homosapiens
MTQNTVIVNGVAMASRPSQPTHVNVHIHQESALTQLLKAGGSLKKFLFHPGDTVPSTARIGYEQLALGVTQILLGVVSCVLGVCLSLGPWTVLSASGCAFWAGSVVIAAGAGAIVHEKHPGKLAGYISSLLTLAGFATAMAAVVLCVNSFIWQTEPFLYIDTVCDRSDPVFPTTGYRWMRRSQENQWQKEECRAYMQMLRKLFTAIRALFLAVCVLKVIVSLVSLGVGLRNLCGQSSQPLVSCRGGASGQRESGW

SEQ ID NO: 2633 - DNA, 582 bp, Homosapiens
cagcgccccacacctcgacccctcaccccctcctcccgggctcttcctgcggcctcccctccacagtccgcaggctctgggacaggaccgagtccttggctgcctgtggagctcctgtgccagcagctgcgccccggctgcgctccggatacccccatccccgccaccgccgacctcccgctccaccgactgctgctcacgcccgacgggttcacgccgcccctgccccgtgaaggaccgcgctgcggtgcggaggcaggatgacgcaaaacacggtgattgtgaatggagttgctatggcctctaggccatcccagcccacccacgtcaacgtccacatccaccaggagtcagctttgacacaactgctgaaagctggaggttctctgaagaagtttctttttcaccctggggacactgtgccttccacagccaggattggttatgagcagctggctctaggggtgactcagatattgctgggggttgtgagttgtgttcttggagtgtgtctcagcttggggccctggactgtgctgagtgcctcaggctgtgccttctgggcggggtctgtggtgagta

SEQ ID NO: 2634 - protein, 106 aa, Homosapiens
MTQNTVIVNGVAMASRPSQPTHVNVHIHQESALTQLLKAGGSLKKFLFHPGDTVPSTARIGYEQLALGVTQILLGVVSCVLGVCLSLGPWTVLSASGCAFWAGSVV

SEQ ID NO: 2635 - DNA, 893 bp, Homosapiens
gctggaagcagtctgaagctcctttgtacgtgtgcggaattgtctaactcctgtcctttctaaccccaaggaggccaggtgggtgaaagagtgaaactgctttgaaaagtaggtagagtacgaatgggaggtgttattagaattgttaataatatttgatttaaactgtgatacttagccaggatgtccattagaattgcctatgcaggatttattttagagccaggcaagctgattctaaagtgcatgtgaagaagtagtctagcaaaaatggccatgacaattctgaaagaaaaaccacacgaggggatcatgaaacagcccaattagcattaagctccatgttaaaattgtggtaatgatgcctagcccatgagacatgccaatgggcagaatataaggactagaataggcctacattcctaggggaacttcatttctgctcaggagagaattttaaatcactgagaaaaagaggatgtattttccgcaaatggaacgtatctttcagaagttaaacatctgaatgacagcaacagaacttggatccgtgtctcccaacggcgaaggcaggatgacgcaaaacacggtgattgtgaatggagttgctatggcctctaggccatcccagcccacccacgtcaacgtccacatccaccaggagtcagctttgacacaactgctgaaagctggaggttctctgaagaagtttctttttcaccctggggacactgtgccttccacagccaggattggttatgagcagctggctctaggggtgactcagatattgctgggggttgtgagttgtgttcttggagtgtgtctcagcttggggccctggactgtgctgagtgcctcaggctgtgccttctgggcggggtctgtggtga

SEQ ID NO: 2636 - protein, 121 aa, Homosapiens
MTATELGSVSPNGEGRMTQNTVIVNGVAMASRPSQPTHVNVHIHQESALTQLLKAGGSLKKFLFHPGDTVPSTARIGYEQLALGVTQILLGVVSCVLGVCLSLGPWTVLSASGCAFWAGSV

SEQ ID NO: 2637 - DNA, 699 bp, Homosapiens
gtctggggttctcctgctgcgcgagggtcactgggctctggggagctgggagggtccgcgggcggacggccctgggaaagcccgtggggtcgttctcgcctccagccccgcccggccagggccggcgtgcaagtgtgcgcgagtgggagcgcagggggcgcgcgggggctcggtcttctcccgcccggtccgctcctccgggcggaaccccctttgccgggcccccgggccgcagctggtttcgggaaaccgcgcagcctgggcggggccgcagcccccacccgtgcatctgccgtctccgccctcccgtcgctcccctgctcggggtcagctagtgtccgctctgctcggccgcgggctcccggaggactgcaggcaggatgacgcaaaacacggtgattgtgaatggagttgctatggcctctaggccatcccagcccacccacgtcaacgtccacatccaccaggagtcagctttgacacaactgctgaaagctggaggttctctgaagaagtttctttttcaccctggggacactgtgccttccacagccaggattggttatgagcagctggctctaggggtgactcagatattgctgggggttgtgagttgtgttcttggagtgtgtctcagcttggggccctggactgtgctgagtgcctcaggctgtgccttctgggcggggtctgtggtga

SEQ ID NO: 2638 - protein, 105 aa, Homosapiens
MTQNTVIVNGVAMASRPSQPTHVNVHIHQESALTQLLKAGGSLKKFLFHPGDTVPSTARIGYEQLALGVTQILLGVVSCVLGVCLSLGPWTVLSASGCAFWAGSV

SEQ ID NO: 2639 - DNA, 1051 bp, Homosapiens
ctccaactctcaacccacttctccagccagcgccccagccctcccgccgcccgctcgcaggtcccgaggagcgcagactgtgtccctgacaatgggaacagccgacagtgatgagatggccccggaggccccacagcacacccacatcgatgtgcacatccaccaggagtctgccctggccaagctcctgctcacctgctgctctgcgctgcggccccgggccacccaggccaggggcagcagccggctgctggtggcctcgtgggtgatgcagatcgtgctggggatcttgagtgcagtcctaggaggatttttctacatccgcgactacaccctcctcgtcacctcgggagctgccatctggacaggggctgtggctgtgctggctggagctgctgccttcatttacgagaaacggggtggtacatactgggccctgctgaggactctgctaacgctggcagctttctccacagccatcgctgccctcaaactttggaatgaagatttccgatatggctactcttattacaacagtgcctgccgcatctccagctcgagtgactggaacactccagcccccactcagagtccagaagaagtcagaaggctacacctatgtacctccttcatggacatgctgaaggccttgttcagaacccttcaggccatgctcttgggtgtctggattctgctgcttctggcatctctgacccctctgtggctgtactgctggagaatgttcccaaccaaagggaaaagagaccagaaggaaatgttggaagtgagtggaatctagccatgcctctcctgattattagtgcctggtgcttctgcaccgggcgtccctgcatctgactgctggaagaagaaccagactgaggaaaagaggctcttcaacagccccagttatcctggccccatgaccgtggccacagccctgctccagcagcacttgcccattccttacaccccttccccatcctgctccgcttcatgtcccctcctgagtagtcatgtgataataaactctcatgttattgttcccagg

SEQ ID NO: 2640 - protein, 235 aa, Homosapiens; identical to SEQ ID NO: 312

SEQ ID NO: 2641 - DNA, 835 bp, Homosapiens
ttctccagccagcgccccagccctcccgccgcccgctcgcaggtcccgaggagcgcagactgtgtccctgacaatgggaacagccgacagtgatgagatggccccggaggccccacagcacacccacatcgatgtgcacatccaccaggagtctgccctggccaagctcctgctcacctgctgctctgcgctgcggccccgggccacccaggccaggggcagcagccggctgctggtggcctcgtgggtgatgcagatcgtgctggggatcttgagtgcagtcctaggaggatttttctacatccgcgactacaccctcctcgtcacctcgggagctgccatctggacaggggctgtggctgtgctggctggagctgctgccttcatttacgagaaacggggtggtacatactgggccctgctgaggactctgctaacgctggcagctttctccacagctcttgggtgtctggattctgctgcttctggcatctctgacccctctgtggctgtactgctggagaatgttcccaaccaaagggaaaagagaccagaaggaaatgttggaagtgagtggaatctagccatgcctctcctgattattagtgcctggtgcttctgcaccgggcgtccctgcatctgactgctggaagaagaaccagactgaggaaaagaggctcttcaacagccccagttatcctggccccatgaccgtggccacagccctgctccagcagcacttgcccattccttacaccccttccccatcctgctccgcttcatgtcccctcctgagtagtcatgtgataataaactctcatgttattgttcccag

SEQ ID NO: 2642 - protein, 189 aa, Homosapiens
MGTADSDEMAPEAPQHTHIDVHIHQESALAKLLLTCCSALRPRATQARGSSRLLVASWVMQIVLGILSAVLGGFFYIRDYTLLVTSGAAIWTGAVAVLAGAAAFIYEKRGGTYWALLRTLLTLAAFSTALGCLDSAASGISDPSVAVLLENVPNQREKRPEGNVGSEWNLAMPLLIISAWCFCTGRPCI

SEQ ID NO: 2643 - DNA, 832 bp, Homosapiens
cagccctcccgccgcccgctcgcaggtcccgaggagcgcagactgtgtccctgacaatgggaacagccgacagtgatgagatggccccggaggccccacagcacacccacatcgatgtgcacatccaccaggagtctgccctggccaagctcctgctcacctgctgctctgcgctgcggccccgggccacccaggccaggggcagcagccggctgctggtggcctcgtgggtgagtgtgacggcctgcctcgtcgggcggcgggaggaactccccacctccagccgcagcagcactctctgccagcctccctctgaacaggacaccgagccagttatgtcttcttacttagcgatgtgattctctggccttctcagtaagagcctggggaggggaggctctgggctgaaggggtgtggaggagccactgaccatgcagagtcccaatcagtggagccctgagtccatcctttcctctgggccaaactcaggatgggccggctctcctctccttcctttcccttctcttttctcctcctcctgcctcttcttctttctccttctcctcctctttcttctccttttctcttctcttctcttctcttctcttctttctttctctctctctctacctctccctctctttttggggttttagcggttaatccctgcagtggcaggtccacctaggagccgggatcttgggtcctttgtctttcaggtgatgcagatcgtgctggggatcttgagtgcagtcctaggaggatttttctacatccgcgactacaccctcctcgtcacctcgggagctgccatctggacaggggctgtgg

SEQ ID NO: 2644 - protein, 100 aa, Homosapiens [sequence omitted]

SEQ ID NO: 2645 - DNA, 1154 bp, Homosapiens
gccctcccgccgcccgctcgcaggtcccgaggagcgcaggtgaggcggcaccccactcccggcggcccccgggcctccttccgcacgcaccccgagctgcctccgcacagttggaggagcgtaggagggacccccacccagggatgacactccaggaaggggactgcagaggaagccagactgtgtccctgacaatgggaacagccgacagtgatgagatggccccggaggccccacagcacacccacatcgatgtgcacatccaccaggagtctgccctggccaagctcctgctcacctgctgctctgcgctgcggccccgggccacccaggccaggggcagcagccggctgctggtggcctcgtgggtgatgcagatcgtgctggggatcttgagtgcagtcctaggaggatttttctacatccgcgactacaccctcctcgtcacctcgggagctgccatctggacaggggctgtggctgtgctggctggagctgctgccttcatttacgagaaacggggtggtacatactgggccctgctgaggactctgctaacgctggcagctttctccacagccatcgctgccctcaaactttggaatgaagatttccgatatggctactcttattacaacagtgcctgccgcatctccagctcgagtgactggaacactccagcccccactcagagtccagaagaagtcagaaggctacacctatgtacctccttcatggacatgctgaaggccttgttcagaacccttcaggccatgctcttgggtgtctggattctgctgcttctggcatctctgacccctctgtggctgtactgctggagaatgttcccaaccaaagggaaaagagaccagaaggaaatgttggaagtgagtggaatctagccatgcctctcctgattattagtgcctggtgcttctgcaccgggcgtccctgcatctgactgctggaagaagaaccagactgaggaaaagaggctcttcaacagccccagttatcctggccccatgaccgtggccacagccctgctccagcagcacttgcccattccttacaccccttccccatcctgctccgcttcatgtcccctcctgagtagtcatgtgataataaactctcatgttattgttcccagg

SEQ ID NO: 2646 - protein, 252 aa, Homosapiens
MTLQEGDCRGSQTVSLTMGTADSDEMAPEAPQHTHIDVHIHQESALAKLLLTCCSALRPRATQARGSSRLLVASWVMQIVLGILSAVLGGFFYIRDYTLLVTSGAAIWTGAVAVLAGAAAFIYEKRGGTYWALLRTLLTLAAFSTAIAALKLWNEDFRYGYSYYNSACRISSSSDWNTPAPTQSPEEVRRLHLCTSFMDMLKALFRTLQAMLLGVWILLLLASLTPLWLYCWRMFPTKGKRDQKEMLEVSGI

SEQ ID NO: 2647 - DNA, 798 bp, Homosapiens
gccgcccgctcgcaggtcccgaggagcgcaggtgaggcggcaccccactcccggcggcccccgggcctccttccgcacgcaccccgagctgcctccgcacagttggaggagcgtaggagggacccccacccagggatgacactccaggaaggggactgcagaggaagccagactgtgtccctgacaatgggaacagccgacagtgatgagatggccccggaggccccacagcacacccacatcgatgtgcacatccaccaggagtctgccctggccaagctcctgctcacctgctgctctgcgctgcggccccgggccacccaggccaggggcagcagccggctgctggtggcctcgtgggtgagtgtgacggcctgcctcgtcgggcggcgggaggaactccccacctccagccgcagcagcactctctgccagcctccctctgaacaggacaccgagccagttatgtcttcttacttagcgatgtgattctctggccttctcagtaagagcctggggaggggaggctctgggctgaaggggtgtggaggagccactgaccatgcagagtcccaatcagtggagccctgagtccatcctttcctctgggccaaactcaggatgggccggctctcctctccttcctttcccttctcttttctcctcctcctgcctcttcttctttctccttctcctcctctttcttctccttttctcttctcttctcttctcttctcttctttctttctctctctctctacctctccctctctttttggggttttagcggttaatccc

SEQ ID NO: 2648 - protein, 117 aa, Homosapiens
MTLQEGDCRGSQTVSLTMGTADSDEMAPEAPQHTHIDVHIHQESALAKLLLTCCSALRPRATQARGSSRLLVASWVSVTACLVGRREELPTSSRSSTLCQPPSEQDTEPVMSSYLAM

SEQ ID NO: 2649 - DNA, 670 bp, Homosapiens
ctcatagactgtgtccctgacaatgggaacagccgacagtggtacatactgggccctgctgaggactctgctaacgctggcagctttctccacagccatcgctgccctcaaactttggaatgaagatttccgatatggctactcttattacaacagtgcctgccgcatctccagctcgagtgactggaacactccagcccccactcagagtccagaagaagtcagaaggctacacctatgtacctccttcatggacatgctgaaggccttgttcagaacccttcaggccatgctcttgggtgtctggattctgctgcttctggcatctctgacccctctgtggctgtactgctggagaatgttcccaaccaaagggaaaagagaccagaaggaaatgttggaagtgagtggaatctagccatgcctctcctgattattagtgcctggtgcttctgcaccgggcgtccctgcatctgactgctggaagaagaaccagactgaggaaaagaggctcttcaacagccccagttatcctggccccatgaccgtggccacagccctgctccagcagcacttgcccattccttacaccccttccccatcctgctccgcttcatgtcccctcctgagtagtcatgtgataataaactctcatgttattgttcccagg

SEQ ID NO: 2650 - protein, 131 aa, Homosapiens
MGTADSGTYWALLRTLLTLAAFSTAIAALKLWNEDFRYGYSYYNSACRISSSSDWNTPAPTQSPEEVRRLHLCTSFMDMLKALFRTLQAMLLGVWILLLLASLTPLWLYCWRMFPTKGKRDQKEMLEVSGI

SEQ ID NO: 2651 - DNA, 824 bp, Homosapiens
ctcatagactgtgtccctgacaatgggaacagccgacagtgatgcagatcgtgctggggatcttgagtgcagtcctaggaggatttttctacatccgcgactacaccctcctcgtcacctcgggagctgccatctggacaggggctgtggctgtgctggctggagctgctgccttcatttacgagaaacggggtggtacatactgggccctgctgaggactctgctaacgctggcagctttctccacagccatcgctgccctcaaactttggaatgaagatttccgatatggctactcttattacaacagtgcctgccgcatctccagctcgagtgactggaacactccagcccccactcagagtccagaagaagtcagaaggctacacctatgtacctccttcatggacatgctgaaggccttgttcagaacccttcaggccatgctcttgggtgtctggattctgctgcttctggcatctctgacccctctgtggctgtactgctggagaatgttcccaaccaaagggaaaagagaccagaaggaaatgttggaagtgagtggaatctagccatgcctctcctgattattagtgcctggtgcttctgcaccgggcgtccctgcatctgactgctggaagaagaaccagactgaggaaaagaggctcttcaacagccccagttatcctggccccatgaccgtggccacagccctgctccagcagcacttgcccattccttacaccccttccccatcctgctccgcttcatgtcccctcctgagtagtcatgtgataataaactctcatgttattgttcccagg

SEQ ID NO: 2652 - protein, 176 aa, Homosapiens
MQIVLGILSAVLGGFFYIRDYTLLVTSGAAIWTGAVAVLAGAAAFIYEKRGGTYWALLRTLLTLAAFSTAIAALKLWNEDFRYGYSYYNSACRISSSSDWNTPAPTQSPEEVRRLHLCTSFMDMLKALFRTLQAMLLGVWILLLLASLTPLWLYCWRMFPTKGKRDQKEMLEVSGI

SEQ ID NO: 2653 - DNA, 2069 bp, Homosapiens
ctcctcctctttcttctccttttctcttctcttctcttctcttctcttctttctttctctctctctctacctctccctctctttttggggttttagcggttaatccctgcagtggcaggtccacctaggagccgggatcttgggtcctttgtctttcaggtgatgcagatcgtgctggggatcttgagtgcagtcctaggaggatttttctacatccgcgactacaccctcctcgtcacctcgggagctgccatctggacaggggctgtggtgagtagagcaggacagtgcttgactgcctgtgagaggggtggggcattgctctcctgattgccttcctccaacatggcgccacagaatgctggcagtcggagagatctgattatctaggaccattccctgcctgttcagatgagcaaacagctgagggcggtggtggcatgtcctattcacactgtctgctctcccatacccttcccagtgctgttcccaccaggctggctgcctctccctgccttcaacagttaatgtcaactaaggatctaaggacctgctcatctccagatacttgcattgagatggggaaggcagagcgttccagatagtatgtggtcccccaggaagcatcaccccctggttattctcattgtcctccacaggccctgtacacaatggaaacccaggaattgttgtcaacagatgggtgtgtgcagtttgcacaggagctgggtaggctggtcatggtacctacactctcagaatagcactaaaacactcatatttactgacagaagccgagagtaattaccttcacccagcctgtggcaaaatacccagcttaattacagaattagccaaacaggattcaggtccacctgtccactgggacatactagatttcctgttcttcaagcccagctgagtggattattgggcactgttaggacaggcttctagacctaacagtgcccactctgtatagactcacccttcattgagatcttctccagcaccccatgacttttatccacaggatcccaccatccctagaactttcataaagcacttggtgttgtttaaaaaggaaggtttagaagggaagaggggctcacacctggcttgaccacaagctcttaggtgtcactaaagcagggccttttgcagcctcaggagttggatccaggctccaccctctcagcaattatcttaccatggataataaagcttagcatgaaacctcccgcccaagctgtgtgctggggaagggcctgcatggaggctctctcgtgggagaggagttgcatttcctgtactaagcctgctcctggctcaatctctccccaggctgtgctggctggagctgctgccttcatttacgagaaacggggtggtacatactgggtaagttcagggaagggcatgggaggggaccaggttcaggctggaggtcaccccaatctcctgccctgttgcaggcttctctgggccttgcccttttttcccccgactggactctgagagagactgaaacacaaagatttctctctgcctcctccctccccaggccctgctgaggactctgctaacgctggcagctttctccacagccatcgctgccctcaaactttggaatgaagatttccgatatggctactcttattacaacagtgcctgccgcatctccagctcgagtgactggaacactccagcccccactcagagtccagaagaagtcagaaggctacacctatgtacctccttcatggacatgctgaagaaaagagaccagaaggaaatgttggaagtgagtggaatctagccatgcctctcctgattattagtgcctggtgcttctgcaccgggcgtccctgcatctgactgctggaagaagaaccagactgaggaaaagaggctcttcaacagccccagttatcctggccccatgaccgtggccacagccctgctccagcagcacttgcccattccttacaccccttccccatcctgctccgcttcatgtcccctcctgagtagtcatgtgataataaactctcatgttattgttccca

SEQ ID NO: 2654 - protein, 42 aa, Homosapiens
MYLLHGHAEEKRPEGNVGSEWNLAMPLLIISAWCFCTGRPCI

SEQ ID NO: 2655 - DNA, 864 bp, Homosapiens
tttttggggttttagcggttaatccctgcagtggcaggtccacctaggagccgggatcttgggtcctttgtctttcaggtgatgcagatcgtgctggggatcttgagtgcagtcctaggaggatttttctacatccgcgactacaccctcctcgtcacctcgggagctgccatctggacaggggctgtggctgtgctggctggagctgctgccttcatttacgagaaacggggtggtacatactgggccctgctgaggactctgctaacgctggcagctttctccacagccatcgctgccctcaaactttggaatgaagatttccgatatggctactcttattacaacagtgcctgccgcatctccagctcgagtgactggaacactccagcccccactcagagtccagaagaagtcagaaggctacacctatgtacctccttcatggacatgctgaaggccttgttcagaacccttcaggccatgctcttgggtgtctggattctgctgcttctggcatctctgacccctctgtggctgtactgctggagaatgttcccaaccaaagggaaaagagaccagaaggaaatgttggaagtgagtggaatctagccatgcctctcctgattattagtgcctggtgcttctgcaccgggcgtccctgcatctgactgctggaagaagaaccagactgaggaaaagaggctcttcaacagccccagttatcctggccccatgaccgtggccacagccctgctccagcagcacttgcccattccttacaccccttccccatcctgctccgcttcatgtcccctcctgagtagtcatgtgataataaactctcatgttattgttcccagg

SEQ ID NO: 2656 - protein, 176 aa, Homosapiens; identical to SEQ ID NO: 2652

SEQ ID NO: 2657 - DNA, 815 bp, Homosapiens
tcttaccatggataataaagcttagcatgaaacctcccgcccaagctgtgtgctggggaagggcctgcatggaggctctctcgtgggagaggagttgcatttcctgtactaagcctgctcctggctcaatctctccccaggctgtgctggctggagctgctgccttcatttacgagaaacggggtggtacatactgggccctgctgaggactctgctaacgctggcagctttctccacagccatcgctgccctcaaactttggaatgaagatttccgatatggctactcttattacaacagtgcctgccgcatctccagctcgagtgactggaacactccagcccccactcagagtccagaagaagtcagaaggctacacctatgtacctccttcatggacatgctgaaggccttgttcagaacccttcaggccatgctcttgggtgtctggattctgctgcttctggcatctctgacccctctgtggctgtactgctggagaatgttcccaaccaaagggaaaagagaccagaaggaaatgttggaagtgagtggaatctagccatgcctctcctgattattagtgcctggtgcttctgcaccgggcgtccctgcatctgactgctggaagaagaaccagactgaggaaaagaggctcttcaacagccccagttatcctggccccatgaccgtggccacagccctgctccagcagcacttgcccattccttacaccccttccccatcctgctccgcttcatgtcccctcctgagtagtcatgtgataataaactctcatgttattgttcccagg

SEQ ID NO: 2658 - protein, 178 aa, Homosapiens
MKPPAQAVCWGRACMEALSWERSCISCTKPAPGSISPQAVLAGAAAFIYEKRGGTYWALLRTLLTLAAFSTAIAALKLWNEDFRYGYSYYNSACRISSSSDWNTPAPTQSPEEVRRLHLCTSFMDMLKALFRTLQAMLLGVWILLLLASLTPLWLYCWRMFPTKGKRDQKEMLEVSGI

SEQ ID NO: 2659 - DNA, 638 bp, Homosapiens
ctgcatggaggctctctcgtgggagaggagttgcatttcctgtactaagcctgctcctggctcaatctctccccaggctgtgctggctggagctgctgccttcatttacgagaaacggggtggtacatactgggccctgctgaggactctgctaacgctggcagctttctccacagccatcgctgccctcaaactttggaatgaagatttccgatatggctactcttattacaacagtgcctgccgcatctccagctcgagtgactggaacactccagcccccactcagagtccagaagaagtcagaaggctacacctatgtacctccttcatggacatgctgaagaaaagagaccagaaggaaatgttggaagtgagtggaatctagccatgcctctcctgattattagtgcctggtgcttctgcaccgggcgtccctgcatctgactgctggaagaagaaccagactgaggaaaagaggctcttcaacagccccagttatcctggccccatgaccgtggccacagccctgctccagcagcacttgcccattccttacaccccttccccatcctgctccgcttcatgtcccctcctgagtagtcatgtgataataaactctcatgttattgttccca

SEQ ID NO: 2660 - protein, 127 aa, Homosapiens
MEALSWERSCISCTKPAPGSISPQAVLAGAAAFIYEKRGGTYWALLRTLLTLAAFSTAIAALKLWNEDFRYGYSYYNSACRISSSSDWNTPAPTQSPEEVRRLHLCTSFMDMLKKRDQKEMLEVSGI

SEQ ID NO: 2661 - DNA, 408 bp, Homosapiens
ccaaccaaagggtggtggcccagcccagaaagcccctatccccaaccaagtggcccccaagtcaaagagcccaggaatccagggaagtccatatccatgctatgcctttggatcagaaaagagaccagaaggaaatgttggaagtgagtggaatctagccatgcctctcctgattattagtgcctggtgcttctgcaccgggcgtccctgcatctgactgctggaagaagaaccagactgaggaaaagaggctcttcaacagccccagttatcctggccccatgaccgtggccacagccctgctccagcagcacttgcccattccttacaccccttccccatcctgctccgcttcatgtcccctcctgagtagtcatgtgataataaactctcatgttattgttccca

SEQ ID NO: 2662 - protein, 41 aa, Homosapiens
MTVATALLQQHLPIPYTPSPSCSASCPLLSSHVIINSHVIV

SEQ ID NO: 2663 - DNA, 3195 bp, Homosapiens
ggccggctggaggagctgaggttccgagtgcggccgctgctgggctggcgggcgggcagagcacggcaccctggcagcagggcccacgccacggggccatgggcagctcgagccaggcaggctgctgcccacgcttactgccagggtgaccccagccctggggcccagccacaaccaccctggcttcatgccaggggctgctctggttgccagtcggccagcctcgggggtgcagcctgggctgggactgctgctggggtgcaggtgaggcagtggccgggccctcaggccccagggcaggcaggctgcagggagccaagtcctccatggcggccccagccgggaaggcgagcaggacaggggctctgcggcccagggcccagaaaggccgggtgaggcgggccgtgcgcatctccagcctcgtggcccaggaggtcctgtccctgggcgccgacgtgctgcctgagtacaagctgcaggcaccgcgcatccaccgctggaccatcctgcattacagccccttcaaggccgtgtgggactggctcatcctgctgctggtcatctacacggctgtcttcacaccctactcggctgccttcctgctgaaggagacggaagaaggcccgcctgctaccgagtgtggctacgcctgccagccgctggctgtggtggacctcatcgtggacatcatgttcattgtggacatcctcatcaacttccgcaccacctacgtcaatgccaacgaggaggtggtcagccaccccggccgcatcgccgtccactacttcaagggctggttcctcatcgacatggtggccgccatccccttcgacctgctcatcttcggctctggctctgaggagctgatcgggctgctgaagactgcgcggctgctgcggctggtgcgcgtggcgcggaagctggatcgctactcagagtacggcgcggccgtgctgttcttgctcatgtgcacctttgcgctcatcgcgcactggctagcctgcatctggtacgccatcggcaacatggagcagccacacatggactcacgcatcggctggctgcacaacctgggcgaccagataggcaaaccctacaacagcagcggcctgggcggcccctccatcaaggacaagtatgtgacggcgctctacttcaccttcagcagcctcaccagtgtgggcttcggcaacgtctctcccaacaccaactcagagaagatcttctccatctgcgtcatgctcattggctccctcatgtatgctagcatcttcggcaacgtgtcggccatcatccagcggctgtactcgggcacagcccgctaccacacacagatgctgcgggtgcgggagttcatccgcttccaccagatccccaatcccctgcgccagcgcctcgaggagtacttccagcacgcctggtcctacaccaacggcatcgacatgaacgcggtgctgaagggcttccctgagtgcctgcaggctgacatctgcctgcacctgaaccgctcactgctgcagcactgcaaacccttccgaggggccaccaagggctgccttcgggccctggccatgaagttcaagaccacacatgcaccgccaggggacacactggtgcatgctggggacctgctcaccgccctgtacttcatctcccggggctccatcgagatcctgcggggcgacgtcgtcgtggccatcctggggaagaatgacatctttggggagcctctgaacctgtatgcaaggcctggcaagtcgaacggggatgtgcgggccctcacctactgtgacctacacaagatccatcgggacgacctgctggaggtgctggacatgtaccctgagttctccgaccacttctggtccagcctggagatcaccttcaacctgcgagataccaacatgatcccgggctcccccggcagtacggagttagagggtggcttcagtcggcaacgcaagcgcaagttgtccttccgcaggcgcacggacaaggacacggagcagccaggggaggtgtcggccttggggccgggccgggcgggggcagggccgagtagccggggccggccgggggggccgtggggggagagcccgtccagtggcccctccagccctgagagcagtgaggatgagggcccaggccgcagctccagccccctccgcctggtgcccttctccagccccaggccccccggagagccgccgggtggggagcccctgatggaggactgcgagaagagcagcgacacttgcaaccccctgtcaggcgccttctcaggagtgtccaacattttcagcttctggggggacagtcggggccgccagtaccaggagctccctcgatgccccgcccccacccccagcctcctcaacatccccctctccagcccgggtcggcggccccggggcgacgtggagagcaggctggatgccctccagcgccagctcaacaggctggagacccggctgagtgcagacatggccactgtcctgcagctgctacagaggcagatgacgctggtcccgcccgcctacagtgctgtgaccaccccggggcctggccccacttccacatccccgctgttgcccgtcagccccctccccaccctcaccttggactcgctttctcaggtttcccagttcatggcgtgtgaggagctgcccccgggggccccagagcttccccaagaaggccccacacgacgcctctccctaccgggccagctgggggccctcacctcccagcccctgcacagacacggctcggacccgggcagttagtggggctgcccagtgtggacacgtggctcacccagggatcaaggcgctgctgggccgctccccttggaggccctgctcaggaggccctgaccgtggaaggggagaggaactcgaaagcacagctcctcccccagcccttgggaccatcttctcctgcagtcccctgggccccagtgagaggggcaggggcagggccggcagtaggtggggcctgtggtccccccactgccctgagggcattagctggtctaactgcccggaggcacccggccctgggccttaggcacctcaaggacttttctgctatttactgctcttattgttaaggataataattaaggatcatatgaataattaatgaagatgctgatgactatgaataataaataattatcctgaggagactcca

SEQ ID NO: 2664 - protein, 819 aa, Homosapiens; identical to SEQ ID NO: 318

SEQ ID NO: 2665 - DNA, 891 bp, Homosapiens
ctttctgggggccaggggaagggagaatcgagaaaggtgggaggaggccaagtcctgatggcctgggcctatctcagggtgccctgctgcagcccagctttgcacgtaggattgcctagggctgcaacctgagggctatgcttgctggggaggggaggggaagggagggggagaattccaactgctactgaaagccccagcattacaggcagatgacgctggtcccgcccgcctacagtgctgtgaccaccccggggcctggccccacttccacatccccgctgttgcccgtcagccccctccccaccctcaccttggactcgctttctcaggtttcccagttcatggcgtgtgaggagctgcccccgggggccccagagcttccccaagaaggccccacacgacgcctctccctaccgggccagctgggggccctcacctcccagcccctgcacagacacggctcggacccgggcagttagtggggctgcccagtgtggacacgtggctcacccagggatcaaggcgctgctgggccgctccccttggaggccctgctcaggaggccctgaccgtggaaggggagaggaactcgaaagcacagctcctcccccagcccttgggaccatcttctcctgcagtcccctgggccccagtgagaggggcaggggcagggccggcagtaggtggggcctgtggtccccccactgccctgagggcattagctggtctaactgcccggaggcacccggccctgggccttaggcacctcaaggacttttctgctatttactgctcttattgttaaggataataattaaggatcatatgaataattaatgaagatgctgatgactatgaataataaataattatcctgaggagactcca

SEQ ID NO: 2666 - protein, 89 aa, Homosapiens
MTLVPPAYSAVTTPGPGPTSTSPLLPVSPLPTLTLDSLSQVSQFMACEELPPGAPELPQEGPTRRLSLPGQLGALTSQPLHRHGSDPGS

SEQ ID NO: 2667 - DNA, 4291 bp, Homosapiens
tccgcggccgggccgagccgcaggcgctgcccgagccgcgggcgctggagcggctgtcggcgcggtggcaggcgggagccaggagtccggggctcgggcgggcggagcgcagcgcggggacgcggcggagcgggccccgcggctcggcgggggccggcagacaggtgtgccggcggcgggcggctcgcgctcaggcggctccaggccgggcccggggtccggagcggggagccgggagccgagcgaggacccggcgcccgcagtccagtcttggccgcgcccgtgctcggcttggccgcggggtgcggggaccacggcccggccgggccacccgaagcctagtgctgggccgggccgggccggggtgggtgggggcccgcccggcccgcccatgggctcaggatgccggtgcggaggggccacgtcgcgccgcagaacaccttcctggacaccatcatccgcaagtttgagggccagagccgtaagttcatcatcgccaacgctcgggtggagaactgcgccgtcatctactgcaacgacggcttctgcgagctgtgcggctactcgcgggccgaggtgatgcagcgaccctgcacctgcgacttcctgcacgggccgcgcacgcagcgccgcgctgccgcgcagatcgcgcaggcactgctgggcgccgaggagcgcaaagtggaaatcgccttctaccggaaagatgggagctgcttcctatgtctggtggatgtggtgcccgtgaagaacgaggatggggctgtcatcatgttcatcctcaatttcgaggtggtgatggagaaggacatggtggggtccccggctcatgacaccaaccaccggggcccccccaccagctggctggccccaggccgcgccaagaccttccgcctgaagctgcccgcgctgctggcgctgacggcccgggagtcgtcggtgcggtcgggcggcgcgggcggcgcgggcgccccgggggccgtggtggtggacgtggacctgacgcccgcggcacccagcagcgagtcgctggccctggacgaagtgacagccatggacaaccacgtggcagggctcgggcccgcggaggagcggcgtgcgctggtgggtcccggctctccgccccgcagcgcgcccggccagctcccatcgccccgggcgcacagcctcaaccccgacgcctcgggctccagctgcagcctggcccggacgcgctcccgagaaagctgcgccagcgtgcgccgcgcctcgtcggccgacgacatcgaggccatgcgcgccggggtgctgcccccgccaccgcgccacgccagcaccggggccatgcacccactgcgcagcggcttgctcaactccacctcggactccgacctcgtgcgctaccgcaccattagcaagattccccaaatcaccctcaactttgtggacctcaagggcgaccccttcttggcttcgcccaccagtgaccgtgagatcatagcacctaagataaaggagcgaacccacaatgtcactgagaaggtcacccaggtcctgtccctgggcgccgacgtgctgcctgagtacaagctgcaggcaccgcgcatccaccgctggaccatcctgcattacagccccttcaaggccgtgtgggactggctcatcctgctgctggtcatctacacggctgtcttcacaccctactcggctgccttcctgctgaaggagacggaagaaggcccgcctgctaccgagtgtggctacgcctgccagccgctggctgtggtggacctcatcgtggacatcatgttcattgtggacatcctcatcaacttccgcaccacctacgtcaatgccaacgaggaggtggtcagccaccccggccgcatcgccgtccactacttcaagggctggttcctcatcgacatggtggccgccatccccttcgacctgctcatcttcggctctggctctgaggagctgatcgggctgctgaagactgcgcggctgctgcggctggtgcgcgtggcgcggaagctggatcgctactcagagtacggcgcggccgtgctgttcttgctcatgtgcacctttgcgctcatcgcgcactggctagcctgcatctggtacgccatcggcaacatggagcagccacacatggactcacgcatcggctggctgcacaacctgggcgaccagataggcaaaccctacaacagcagcggcctgggcggcccctccatcaaggacaagtatgtgacggcgctctacttcaccttcagcagcctcaccagtgtgggcttcggcaacgtctctcccaacaccaactcagagaagatcttctccatctgcgtcatgctcattggctccctcatgtatgctagcatcttcggcaacgtgtcggccatcatccagcggctgtactcgggcacagcccgctaccacacacagatgctgcgggtgcgggagttcatccgcttccaccagatccccaatcccctgcgccagcgcctcgaggagtacttccagcacgcctggtcctacaccaacggcatcgacatgaacgcggtgctgaagggcttccctgagtgcctgcaggctgacatctgcctgcacctgaaccgctcactgctgcagcactgcaaacccttccgaggggccaccaagggctgccttcgggccctggccatgaagttcaagaccacacatgcaccgccaggggacacactggtgcatgctggggacctgctcaccgccctgtacttcatctcccggggctccatcgagatcctgcggggcgacgtcgtcgtggccatcctggggaagaatgacatctttggggagcctctgaacctgtatgcaaggcctggcaagtcgaacggggatgtgcgggccctcacctactgtgacctacacaagatccatcgggacgacctgctggaggtgctggacatgtaccctgagttctccgaccacttctggtccagcctggagatcaccttcaacctgcgagataccaacatgatcccgggctcccccggcagtacggagttagagggtggcttcagtcggcaacgcaagcgcaagttgtccttccgcaggcgcacggacaaggacacggagcagccaggggaggtgtcggccttggggccgggccgggcgggggcagggccgagtagccggggccggccgggggggccgtggggggagagcccgtccagtggcccctccagccctgagagcagtgaggatgagggcccaggccgcagctccagccccctccgcctggtgcccttctccagccccaggccccccggagagccgccgggtggggagcccctgatggaggactgcgagaagagcagcgacacttgcaaccccctgtcaggcgccttctcaggagtgtccaacattttcagcttctggggggacagtcggggccgccagtaccaggagctccctcgatgccccgcccccacccccagcctcctcaacatccccctctccagcccgggtcggcggccccggggcgacgtggagagcaggctggatgccctccagcgccagctcaacaggctggagacccggctgagtgcagacatggccactgtcctgcagctgctacagaggcagatgacgctggtcccgcccgcctacagtgctgtgaccaccccggggcctggccccacttccacatccccgctgttgcccgtcagccccctccccaccctcaccttggactcgctttctcaggtttcccagttcatggcgtgtgaggagctgcccccgggggccccagagcttccccaagaaggccccacacgacgcctctccctaccgggccagctgggggccctcacctcccagcccctgcacagacacggctcggacccgggcagttagtggggctgcccagtgtggacacgtggctcacccagggatcaaggcgctgctgggccgctccccttggaggccctgctcaggaggccctgaccgtggaaggggagaggaactcgaaagcacagctcctcccccagcccttgggaccatcttctcctgcagtcccctgggccccagtgagaggggcaggggcagggccggcagtaggtggggcctgtggtccccccactgccctgagggcattagctggtctaactgcccggaggcacccggccctgggccttaggcacctcaaggacttttctgctatttactgctcttattgttaaggataataattaaggatcatatgaataattaatgaagatgctgatgactatgaataataaataattatcctgaggagactcca

SEQ ID NO: 2668 - protein, 1159 aa, Homosapiens; identical to SEQ ID NO: 314

SEQ ID NO: 2669 - DNA, 431 bp, Homosapiens
gtgcccagaggtggggaattgggtggagcccctgacctcggatgggttgggatgctgggcaggaacagtgccccccaccccaggtagactgctgggtgtggattggcaccaaatgaaagcaagccggcgttgtgttctgagaagtgatggacaccttctgtggtagcaggatggcgctgtacctgccaccctgggccccagtgagaggggcaggggcagggccggcagtaggtggggcctgtggtccccccactgccctgagggcattagctggtctaactgcccggaggcacccggccctgggccttaggcacctcaaggacttttctgctatttactgctcttattgttaaggataataattaaggatcatatgaataattaatgaagatgctgatgactatgaataataaataattatcctgaggaga

SEQ ID NO: 2670 - protein, 68 aa, Homosapiens
MDTFCGSRMALYLPPWAPVRGAGAGPAVGGACGPPTALRALAGLTARRHPALGLRHLKDFSAIYCSYC

SEQ ID NO: 2671 - DNA, 2462 bp, Homosapiens
ggccggctggaggagctgaggttccgagtgcggccgctgctgggctggcgggcgggcagagcacggcaccctggcagcagggcccacgccacggggccatgggcagctcgagccaggcaggctgctgcccacgcttactgccagggtgaccccagccctggggcccagccacaaccaccctggcttcatgccaggggctgctctggttgccagtcggccagcctcgggggtgcagcctgggctgggactgctgctggggtgcaggtgaggcagtggccgggccctcaggccccagggcaggcaggctgcagggagccaagtcctccatggcggccccagccgggaaggcgagcaggacaggggctctgcggcccagggcccagaaaggccgggtgaggcgggccgtgcgcatctccagcctcgtggcccaggaggtcctgtccctgggcgccgacgtgctgcctgagtacaagctgcaggcaccgcgcatccaccgctggaccatcctgcattacagccccttcaaggccgtgtgggactggctcatcctgctgctggtcatctacacggctgtcttcacaccctactcggctgccttcctgctgaaggagacggaagaaggcccgcctgctaccgagtgtggctacgcctgccagccgctggctgtggtggacctcatcgtggacatcatgttcattgtggacatcctcatcaacttccgcaccacctacgtcaatgccaacgaggaggtggtcagccaccccggccgcatcgccgtccactacttcaagggctggttcctcatcgacatggtggccgccatccccttcgacctgctcatcttcggctctggctctgaggagctgatcgggctgctgaagactgcgcggctgctgcggctggtgcgcgtggcgcggaagctggatcgctactcagagtacggcgcggccgtgctgttcttgctcatgtgcacctttgcgctcatcgcgcactggctagcctgcatctggtacgccatcggcaacatggagcagccacacatggactcacgcatcggctggctgcacaacctgggcgaccagataggcaaaccctacaacagcagcggcctgggcggcccctccatcaaggacaagtatgtgacggcgctctacttcaccttcagcagcctcaccagtgtgggcttcggcaacgtctctcccaacaccaactcagagaagatcttctccatctgcgtcatgctcattggctccctcatgtatgctagcatcttcggcaacgtgtcggccatcatccagcggctgtactcgggcacagcccgctaccacacacagatgctgcgggtgcgggagttcatccgcttccaccagatccccaatcccctgcgccagcgcctcgaggagtacttccagcacgcctggtcctacaccaacggcatcgacatgaacgcggtgctgaagggcttccctgagtgcctgcaggctgacatctgcctgcacctgaaccgctcactgctgcagcactgcaaacccttccgaggggccaccaagggctgccttcgggccctggccatgaagttcaagaccacacatgcaccgccaggggacacactggtgcatgctggggacctgctcaccgccctgtacttcatctcccggggctccatcgagatcctgcggggcgacgtcgtcgtggccatcctgggtatggggtggggggcgggcactggactggaaatgccctctgcagcctcaagaggtgcgagccttctgaatatgcagtcactggggctgtggacctgggactgcctgcagggtcactgggctcctttaattcacctaaactcaggccctccaagcggggccatggagaggagccccacgtggggtgaggctgctgaactctggggttcccacattctccttcccttcaggatccgccacaaacagacactttttgcttccttaaagtaggatcaaatctagatcctctagcctgggcagtagaggaagaaatgctagcctggaagctcggcatttggtttcactaagggccatgtggttccctgcagcctcatgcctggccccttgacacatccaaagcaaagggagtcctgccccctccccccacttcctttctaccctgcctgtgcacagtgggtgggttggtgtgtctggacactgaggacttcctccccctttgcctgtccttccctcggccctgtgtgcctcagggcagatatagcaagctctttcgaccatagttgatggtaggacattttagactttgtttctcagctctgtacaaacacaaatacacacccccacaaaactaaaatcaaagtttcactacataacactgggccttactgcatgtggttcattctagcatttctgttctgtgctgtgctaagctatactactgtatgttctttcagtaaaaaaaaaaaaaaaaaaaaaaaa

SEQ ID NO: 2672 - protein, 548 aa, Homosapiens
MAAPAGKASRTGALRPRAQKGRVRRAVRISSLVAQEVLSLGADVLPEYKLQAPRIHRWTILHYSPFKAVWDWLILLLVIYTAVFTPYSAAFLLKETEEGPPATECGYACQPLAVVDLIVDIMFIVDILINFRTTYVNANEEVVSHPGRIAVHYFKGWFLIDMVAAIPFDLLIFGSGSEELIGLLKTARLLRLVRVARKLDRYSEYGAAVLFLLMCTFALIAHWLACIWYAIGNMEQPHMDSRIGWLHNLGDQIGKPYNSSGLGGPSIKDKYVTALYFTFSSLTSVGFGNVSPNTNSEKIFSICVMLIGSLMYASIFGNVSAIIQRLYSGTARYHTQMLRVREFIRFHQIPNPLRQRLEEYFQHAWSYTNGIDMNAVLKGFPECLQADICLHLNRSLLQHCKPFRGATKGCLRALAMKFKTTHAPPGDTLVHAGDLLTALYFISRGSIEILRGDVVVAILGMGWGAGTGLEMPSAASRGASLLNMQSLGLWTWDCLQGHWAPLIHLNSGPPSGAMERSPTWGEAAELWGSHILLPFRIRHKQTLFASLK

SEQ ID NO: 2673 - DNA, 2813 bp, Homosapiens
gaggtgatgcagcgaccctgcacctgcgacttcctgcacgggccgcgcacgcagcgccgcgctgccgcgcagatcgcgcaggcactgctgggcgccgaggagcgcaaagtggaaatcgccttctaccggaaagatgggagctgcttcctatgtctggtggatgtggtgcccgtgaagaacgaggatggggctgtcatcatgttcatcctcaatttcgaggtggtgatggagaaggacatggtggggacgtggacctgacgcccgcggcacccagcagcgagtcgctggccctggacgaagtgacagccatggacaaccacgtggcagggctcgggcccgcggaggagcggcgtgcgctggtgggtcccggctctccgccccgcagcgcgcccggccagctcccatcgccccgggcgcacagcctcaaccccgacgcctcgggctccagctgcagcctggcccggacgcgctcccgagaaagctgcgccagcgtgcgccgcgcctcgtcggccgacgacatcgaggccatgcgcgccggggtgctgcccccgccaccgcgccacgccagcaccggggccatgcacccactgcgcagcggcttgctcaactccacctcggactccgacctcgtgcgctaccgcaccattagcaagattccccaaatcaccctcaactttgtggacctcaagggcgaccccttcttggcttcgcccaccagtgaccgtgagatcatagcacctaagataaaggagcgaacccacaatgtcactgagaaggtcacccaggtcctgtccctgggcgccgacgtgctgcctgagtacaagctgcaggcaccgcgcatccaccgctggaccatcctgcattacagccccttcaaggccgtgtgggactggctcatcctgctgctggtcatctacacggctgtcttcacaccctactcggctgccttcctgctgaaggagacggaagaaggcccgcctgctaccgagtgtggctacgcctgccagccgctggctgtggtggacctcatcgtggacatcatgttcattgtggacatcctcatcaacttccgcaccacctacgtcaatgccaacgaggaggtggtcagccaccccggccgcatcgccgtccactacttcaagggctggttcctcatcgacatggtggccgccatccccttcgacctgctcatcttcggctctggctctgaggagctgatcgggctgctgaagactgcgcggctgctgcggctggtgcgcgtggcgcggaagctggatcgctactcagagtacggcgcggccgtgctgttcttgctcatgtgcacctttgcgctcatcgcgcactggctagcctgcatctggtacgccatcggcaacatggagcagccacacatggactcacgcatcggctggctgcacaacctgggcgaccagataggcaaaccctacaacagcagcggcctgggcggcccctccatcaaggacaagtatgtgacggcgctctacttcaccttcagcagcctcaccagtgtgggcttcggcaacgtctctcccaacaccaactcagagaagatcttctccatctgcgtcatgctcattggctccctcatgtatgctagcatcttcggcaacgtgtcggccatcatccagcggctgtactcgggcacagcccgctaccacacacagatgctgcgggtgcgggagttcatccgcttccaccagatccccaatcccctgcgccagcgcctcgaggagtacttccagcacgcctggtcctacaccaacggcatcgacatgaacgcggtgctgaagggcttccctgagtgcctgcaggctgacatctgcctgcacctgaaccgctcactgctgcagcactgcaaacccttccgaggggccaccaagggctgccttcgggccctggccatgaagttcaagaccacacatgcaccgccaggggacacactggtgcatgctggggacctgctcaccgccctgtacttcatctcccggggctccatcgagatcctgcggggcgacgtcgtcgtggccatcctgggtatggggtggggggcgggcactggactggaaatgccctctgcagcctcaagaggtgcgagccttctgaatatgcagtcactggggctgtggacctgggactgcctgcagggtcactgggctcctttaattcacctaaactcaggccctccaagcggggccatggagaggagccccacgtggggtgaggctgctgaactctggggttcccacattctccttcccttcaggatccgccacaaacagacactttttgcttccttaaagtaggatcaaatctagatcctctagcctgggcagtagaggaagaaatgctagcctggaagctcggcatttggtttcactaagggccatgtggttccctgcagcctcatgcctggccccttgacacatccaaagcaaagggagtcctgccccctccccccacttcctttctaccctgcctgtgcacagtgggtgggttggtgtgtctggacactgaggacttcctccccctttgcctgtccttccctcggccctgtgtgcctcagggcagatatagcaagctctttcgaccatagttgatggtaggacattttagactttgtttctcagctctgtacaaacacaaatacacacccccacaaaactaaaatcaaagtttcactacataacactgggccttactgcatgtggttcattctagcatttctgttctgtgctgtgctaagctatactactgtatgttctttcagtaaaaaaaaaaaaaaaaaaaaaaaa

SEQ ID NO: 2674 - protein, 724 aa, Homosapiens
MSGGCGAREERGWGCHHVHPQFRGGDGEGHGGDVDLTPAAPSSESLALDEVTAMDNHVAGLGPAEERRALVGPGSPPRSAPGQLPSPRAHSLNPDASGSSCSLARTRSRESCASVRRASSADDIEAMRAGVLPPPPRHASTGAMHPLRSGLLNSTSDSDLVRYRTISKIPQITLNFVDLKGDPFLASPTSDREIIAPKIKERTHNVTEKVTQVLSLGADVLPEYKLQAPRIHRWTILHYSPFKAVWDWLILLLVIYTAVFTPYSAAFLLKETEEGPPATECGYACQPLAVVDLIVDIMFIVDILINFRTTYVNANEEVVSHPGRIAVHYFKGWFLIDMVAAIPFDLLIFGSGSEELIGLLKTARLLRLVRVARKLDRYSEYGAAVLFLLMCTFALIAHWLACIWYAIGNMEQPHMDSRIGWLHNLGDQIGKPYNSSGLGGPSIKDKYVTALYFTFSSLTSVGFGNVSPNTNSEKIFSICVMLIGSLMYASIFGNVSAIIQRLYSGTARYHTQMLRVREFIRFHQIPNPLRQRLEEYFQHAWSYTNGIDMNAVLKGFPECLQADICLHLNRSLLQHCKPFRGATKGCLRALAMKFKTTHAPPGDTLVHAGDLLTALYFISRGSIEILRGDVVVAILGMGWGAGTGLEMPSAASRGASLLNMQSLGLWTWDCLQGHWAPLIHLNSGPPSGAMERSPTWGEAAELWGSHILLPFRIRHKQTLFASLK

SEQ ID NO: 2675 - DNA, 3558 bp, Homosapiens
tccgcggccgggccgagccgcaggcgctgcccgagccgcgggcgctggagcggctgtcggcgcggtggcaggcgggagccaggagtccggggctcgggcgggcggagcgcagcgcggggacgcggcggagcgggccccgcggctcggcgggggccggcagacaggtgtgccggcggcgggcggctcgcgctcaggcggctccaggccgggcccggggtccggagcggggagccgggagccgagcgaggacccggcgcccgcagtccagtcttggccgcgcccgtgctcggcttggccgcggggtgcggggaccacggcccggccgggccacccgaagcctagtgctgggccgggccgggccggggtgggtgggggcccgcccggcccgcccatgggctcaggatgccggtgcggaggggccacgtcgcgccgcagaacaccttcctggacaccatcatccgcaagtttgagggccagagccgtaagttcatcatcgccaacgctcgggtggagaactgcgccgtcatctactgcaacgacggcttctgcgagctgtgcggctactcgcgggccgaggtgatgcagcgaccctgcacctgcgacttcctgcacgggccgcgcacgcagcgccgcgctgccgcgcagatcgcgcaggcactgctgggcgccgaggagcgcaaagtggaaatcgccttctaccggaaagatgggagctgcttcctatgtctggtggatgtggtgcccgtgaagaacgaggatggggctgtcatcatgttcatcctcaatttcgaggtggtgatggagaaggacatggtggggtccccggctcatgacaccaaccaccggggcccccccaccagctggctggccccaggccgcgccaagaccttccgcctgaagctgcccgcgctgctggcgctgacggcccgggagtcgtcggtgcggtcgggcggcgcgggcggcgcgggcgccccgggggccgtggtggtggacgtggacctgacgcccgcggcacccagcagcgagtcgctggccctggacgaagtgacagccatggacaaccacgtggcagggctcgggcccgcggaggagcggcgtgcgctggtgggtcccggctctccgccccgcagcgcgcccggccagctcccatcgccccgggcgcacagcctcaaccccgacgcctcgggctccagctgcagcctggcccggacgcgctcccgagaaagctgcgccagcgtgcgccgcgcctcgtcggccgacgacatcgaggccatgcgcgccggggtgctgcccccgccaccgcgccacgccagcaccggggccatgcacccactgcgcagcggcttgctcaactccacctcggactccgacctcgtgcgctaccgcaccattagcaagattccccaaatcaccctcaactttgtggacctcaagggcgaccccttcttggcttcgcccaccagtgaccgtgagatcatagcacctaagataaaggagcgaacccacaatgtcactgagaaggtcacccaggtcctgtccctgggcgccgacgtgctgcctgagtacaagctgcaggcaccgcgcatccaccgctggaccatcctgcattacagccccttcaaggccgtgtgggactggctcatcctgctgctggtcatctacacggctgtcttcacaccctactcggctgccttcctgctgaaggagacggaagaaggcccgcctgctaccgagtgtggctacgcctgccagccgctggctgtggtggacctcatcgtggacatcatgttcattgtggacatcctcatcaacttccgcaccacctacgtcaatgccaacgaggaggtggtcagccaccccggccgcatcgccgtccactacttcaagggctggttcctcatcgacatggtggccgccatccccttcgacctgctcatcttcggctctggctctgaggagctgatcgggctgctgaagactgcgcggctgctgcggctggtgcgcgtggcgcggaagctggatcgctactcagagtacggcgcggccgtgctgttcttgctcatgtgcacctttgcgctcatcgcgcactggctagcctgcatctggtacgccatcggcaacatggagcagccacacatggactcacgcatcggctggctgcacaacctgggcgaccagataggcaaaccctacaacagcagcggcctgggcggcccctccatcaaggacaagtatgtgacggcgctctacttcaccttcagcagcctcaccagtgtgggcttcggcaacgtctctcccaacaccaactcagagaagatcttctccatctgcgtcatgctcattggctccctcatgtatgctagcatcttcggcaacgtgtcggccatcatccagcggctgtactcgggcacagcccgctaccacacacagatgctgcgggtgcgggagttcatccgcttccaccagatccccaatcccctgcgccagcgcctcgaggagtacttccagcacgcctggtcctacaccaacggcatcgacatgaacgcggtgctgaagggcttccctgagtgcctgcaggctgacatctgcctgcacctgaaccgctcactgctgcagcactgcaaacccttccgaggggccaccaagggctgccttcgggccctggccatgaagttcaagaccacacatgcaccgccaggggacacactggtgcatgctggggacctgctcaccgccctgtacttcatctcccggggctccatcgagatcctgcggggcgacgtcgtcgtggccatcctgggtatggggtggggggcgggcactggactggaaatgccctctgcagcctcaagaggtgcgagccttctgaatatgcagtcactggggctgtggacctgggactgcctgcagggtcactgggctcctttaattcacctaaactcaggccctccaagcggggccatggagaggagccccacgtggggtgaggctgctgaactctggggttcccacattctccttcccttcaggatccgccacaaacagacactttttgcttccttaaagtaggatcaaatctagatcctctagcctgggcagtagaggaagaaatgctagcctggaagctcggcatttggtttcactaagggccatgtggttccctgcagcctcatgcctggccccttgacacatccaaagcaaagggagtcctgccccctccccccacttcctttctaccctgcctgtgcacagtgggtgggttggtgtgtctggacactgaggacttcctccccctttgcctgtccttccctcggccctgtgtgcctcagggcagatatagcaagctctttcgaccatagttgatggtaggacattttagactttgtttctcagctctgtacaaacacaaatacacacccccacaaaactaaaatcaaagtttcactacataacactgggccttactgcatgtggttcattctagcatttctgttctgtgctgtgctaagctatactactgtatgttctttcagtaaaaaaaaaaaaaaaaaaaaaaaa

SEQ ID NO: 2676 - protein, 888 aa, Homosapiens; identical to SEQ ID NO: 316

SEQ ID NO: 2677 - DNA, 2789 bp, Homosapiens
gaggtgatgcagcgaccctgcacctgcgacttcctgcacgggccgcgcacgcagcgccgcgctgccgcgcagatcgcgcaggcactgctgggcgccgaggagcgcaaagtggaaatcgccttctaccggaaagatgggagctgcttcctatgtctggtggatgtggtgcccgtgaagaacgaggatggggctgtcatcatgttcatcctcaatttcgaggtggtgatggagaaggacatggtggggacgtggacctgacgcccgcggcacccagcagcgagtcgctggccctggacgaagtgacagccatggacaaccacgtggcagggctcgggcccgcggaggagcggcgtgcgctggtgggtcccggctctccgccccgcagcgcgcccggccagctcccatcgccccgggcgcacagcctcaaccccgacgcctcgggctccagctgcagcctggcccggacgcgctcccgagaaagctgcgccagcgtgcgccgcgcctcgtcggccgacgacatcgaggccatgcgcgccggggtgctgcccccgccaccgcgccacgccagcaccggggccatgcacccactgcgcagcggcttgctcaactccacctcggactccgacctcgtgcgctaccgcaccattagcaagattccccaaatcaccctcaactttgtggacctcaagggcgaccccttcttggcttcgcccaccagtgaccgtgagatcatagcacctaagataaaggagcgaacccacaatgtcactgagaaggtcacccaggtcctgtccctgggcgccgacgtgctgcctgagtacaagctgcaggcaccgcgcatccaccgctggaccatcctgcattacagccccttcaaggccgtgtgggactggctcatcctgctgctggtcatctacacggctgtcttcacaccctactcggctgccttcctgctgaaggagacggaagaaggcccgcctgctaccgagtgtggctacgcctgccagccgctggctgtggtggacctcatcgtggacatcatgttcattgtggacatcctcatcaacttccgcaccacctacgtcaatgccaacgaggaggtggtcagccaccccggccgcatcgccgtccactacttcaagggctggttcctcatcgacatggtggccgccatccccttcgacctgctcatcttcggctctggctctgaggagctgatcgggctgctgaagactgcgcggctgctgcggctggtgcgcgtggcgcggaagctggatcgctactcagagtacggcgcggccgtgctgttcttgctcatgtgcacctttgcgctcatcgcgcactggctagcctgcatctggtacgccatcggcaacatggagcagccacacatggactcacgcatcggctggctgcacaacctgggcgaccagataggcaaaccctacaacagcagcggcctgggcggcccctccatcaaggacaagtatgtgacggcgctctacttcaccttcagcagcctcaccagtgtgggcttcggcaacgtctctcccaacaccaactcagagaagatcttctccatctgcgtcatgctcattggctccctcatgtatgctagcatcttcggcaacgtgtcggccatcatccagcggctgtactcgggcacagcccgctaccacacacagatgctgcgggtgcgggagttcatccgcttccaccagatccccaatcccctgcgccagcgcctcgaggagtacttccagcacgcctggtcctacaccaacggcatcgacatgaacgcggtgctgaagggcttccctgagtgcctgcaggctgacatctgcctgcacctgaaccgctcactgctgcagcactgcaaacccttccgaggggccaccaagggctgccttcgggccctggccatgaagttcaagaccacacatgcaccgccaggggacacactggtgcatgctggggacctgctcaccgccctgtacttcatctcccggggctccatcgagatcctgcggggcgacgtcgtcgtggccatcctgggtatggggtggggggcgggcactggactggaaatgccctctgcagcctcaagaggtgcgagccttctgaatatgcagtcactggggctgtggacctgggactgcctgcagggtcactgggctcctttaattcacctaaactcaggccctccaagcggggccatggagaggagccccacgtggggtgaggctgctgaactctggggttcccacattctccttcccttcaggatccgccacaaacagacactttttgcttccttaaagtaggatcaaatctagatcctctagcctgggcagtagaggaagaaatgctagcctggaagctcggcatttggtttcactaagggccatgtggttccctgcagcctcatgcctggccccttgacacatccaaagcaaagggagtcctgccccctccccccacttcctttctaccctgcctgtgcacagtgggtgggttggtgtgtctggacactgaggacttcctccccctttgcctgtccttccctcggccctgtgtgcctcagggcagatatagcaagctctttcgaccatagttgatggtaggacattttagactttgtttctcagctctgtacaaacacaaatacacacccccacaaaactaaaatcaaagtttcactacataacactgggccttactgcatgtggttcattctagcatttctgttctgtgctgtgctaagctatactactgtatgttctttcagt

SEQ ID NO: 2678 - protein, 724 aa, Homosapiens; identical to SEQ ID NO: 2674

SEQ ID NO: 2679 - DNA, 4376 bp, Homosapiens
agttcggagcaggtgatagaagctaggagggggttgtttactgaaactaggggcaaggagacgaagagaacatgaaagttaaactttaagatgaagaacaaagctgaacatactgatgcattggatctttggagaggatctcagaactcattgtacttaatttacaggctaaaaccttagaagaggaatttattatatcctacacaagactccagggaagcacatggccttggactgaaggctggcatctggaagctgtcagccaccagcaccttctgcagcaggaaaaggccagggctctgctggagcaggcagcagagtggacgcacagtaacatgggcaacttgaagagcgtggcccaggagcctgggccaccctgcggcctggggctggggctgggccttgggctgtgcggcaagcagggcccagccaccccggcccctgagcccagccgggccccagcatccctactcccaccagcgccagaacacagccccccgagctccccgctaacccagcccccagaggggcccaagttccctcgtgtgaagaactgggaggtggggagcatcacctatgacaccctcagcgcccaggcgcagcaggatgggccctgcaccccaagacgctgcctgggctccctggtatttccacggaaactacagggccggccctcccccggccccccggcccctgagcagctgctgagtcaggcccgggacttcatcaaccagtactacagctccattaagaggagcggctcccaggcccacgaacagcggcttcaagaggtggaagccgaggtggcagccacaggcacctaccagcttagggagagcgagctggtgttcggggctaagcaggcctggcgcaacgctccccgctgcgtgggccggatccagtgggggaagctgcaggtgttcgatgcccgggactgcaggtctgcacaggaaatgttcacctacatctgcaaccacatcaagtatgccaccaaccggggcaaccttcgctcggccatcacagtgttcccgcagcgctgccctggccgaggagacttccgaatctggaacagccagctggtgcgctacgcgggctaccggcagcaggatggctctgtgcggggggacccagccaacgtggagatcaccgagctctgcattcagcacggctggaccccaggaaacggtcgcttcgacgtgctgcccctgctgctgcaggccccagatgatcccccagaactcttccttctgccccccgagctggtccttgaggtgcccctggagcaccccacgctggagtggtttgcagccctgggcctgcgctggtacgccctcccggcagtgtccaacatgctgctggaaattgggggcctggagttccccgcagcccccttcagtggctggtacatgagcactgagatcggcacgaggaacctgtgtgaccctcaccgctacaacatcctggaggatgtggctgtctgcatggacctggatacccggaccacctcgtccctgtggaaagacaaggcagcagtggaaatcaacgtggccgtgctgcacagttaccagctagccaaagtcaccatcgtggaccaccacgccgccacggcctctttcatgaagcacctggagaatgagcagaaggccagggggggctgccctgcagactgggcctggatcgtgccccccatctcgggcagcctcactcctgttttccatcaggagatggtcaactatttcctgtccccggccttccgctaccagccagacccctggaaggggagtgccgccaagggcaccggcatcaccaggaagaagacctttaaagaagtggccaacgccgtgaagatctccgcctcgctcatgggcacggtgatggcgaagcgagtgaaggcgacaatcctgtatggctccgagaccggccgggcccagagctacgcacagcagctggggagactcttccggaaggcttttgatccccgggtcctgtgtatggatgagtatgacgtggtgtccctcgaacacgagacgctggtgctggtggtaaccagcacatttgggaatggggatcccccggagaatggagagagctttgcagctgccctgatggagatgtccggcccctacaacagctcccctcggccggaacagcacaagagttataagatccgcttcaacagcatctcctgctcagacccactggtgtcctcttggcggcggaagaggaaggagtccagtaacacagacagtgcaggggccctgggcaccctcaggttctgtgtgttcgggctcggctcccgggcatacccccacttctgcgcctttgctcgtgccgtggacacacggctggaggaactgggcggggagcggctgctgcagctgggccagggcgacgagctgtgcggccaggaggaggccttccgaggctgggcccaggctgccttccaggccgcctgtgagaccttctgtgtgggagaggatgccaaggccgccgcccgagacatcttcagccccaaacggagctggaagcgccagaggtaccggctgagcgcccaggccgagggcctgcagttgctgccaggtctgatccacgtgcacaggcggaagatgttccaggctacaatccgctcagtggaaaacctgcaaagcagcaagtccacgagggccaccatcctggtgcgcctggacaccggaggccaggaggggctgcagtaccagccgggggaccacataggtgtctgcccgcccaaccggcccggccttgtggaggcgctgctgagccgcgtggaggacccgccggcgcccactgagcccgtggcagtagagcagctggagaagggcagccctggtggccctccccccggctgggtgcgggacccccggctgcccccgtgcacgctgcgccaggctctcaccttcttcctggacatcacctccccacccagccctcagctcttgcggctgctcagcaccttggcagaagagcccagggaacagcaggagctggaggccctcagccaggatccccgacgctacgaggagtggaagtggttccgctgccccacgctgctggaggtgctggagcagttcccgtcggtggcgctgcctgccccactgctcctcacccagctgcctctgctccagccccggtactactcagtcagctcggcacccagcacccacccaggagagatccacctcactgtagctgtgctggcatacaggactcaggatgggctgggccccctgcactatggagtctgctccacgtggctaagccagctcaagcccggagaccctgtgccctgcttcatccggggggctccctccttccggctgccacccgatcccagcttgccctgcatcctggtgggtccaggcactggcattgcccccttccggggattctggcaggagcggctgcatgacattgagagcaaagggctgcagcccactcccatgactttggtgttcggctgccgatgctcccaacttgaccatctctaccgcgacgaggtgcagaacgcccagcagcgcggggtgtttggccgagtcctcaccgccttctcccgggaacctgacaaccccaagacctacgtgcaggacatcctgaggacggagctggctgcggaggtgcaccgcgtgctgtgcctcgagcggggccacatgtttgtctgcggcgatgttaccatggcaaccaacgtcctgcagaccgtgcagcgcatcctggcgacggagggcgacatggagctggacgaggccggcgacgtcatcggcgtgctgcgggatcagcaacgctaccacgaagacattttcgggctcacgctgcgcacccaggaggtgacaagccgcatacgcacccagagcttttccttgcaggagcgtcagttgcggggcgcagtgccctgggcgttcgaccctcccggctcagacaccaacagcccctgagagccgcctggctttcccttccagttccgggagagcggctgcccgactcaggtccgcccgaccaggatcagccccgctcctcccctcttgaggtggtgccttctcacatctgtccagaggctgcaaggattcagcattattcctccaggaaggagcaaaacgcctcttttccctctctaggcctgttgcctcgggcctgggtccgccttaatctggaaggcccctcccagcagcggtaccccagggcctactgccacccgcttcctgtttcttagtcgaatgttagattcctcttgcctctctcaggagtatcttacctgtaaagtctaatctctaaatcaagtatttattattgaagatttaccataagggactgtgccagatgttaggagaactactaaagtgcctaccccagctcatgtggattac

SEQ ID NO: 2680 - protein, 1203 aa, Homosapiens; identical to SEQ ID NO: 320

SEQ ID NO: 2681 - DNA, 390 bp, Homosapiens
tccccgggtcctgtgtatggatgagtatgacgtggtgtccctcgaacacgagacgctggtgctggtggtaaccagcacatttgggaatggggatcccccggagaatggagagtctgtctccctgccagaagtgtctgtcaccacagaatagtttcgcctgctctagaacggcacctagatggaagcacgcagtgttgcggcgtctcctgctgaggctgtttttgaggcgcactcgtgttgctgcgtgactcagtatttcactcattctgctgctgagtgccgttcattgtgtgaatatccccagtttgtttacccattctcttgttggtgacacttgggctgtttccaggtcggggctattatgaataaacctgttatgaacattcttgt

SEQ ID NO: 2682 - protein, 53 aa, Homosapiens
MGIPRRMESLSPCQKCLSPQNSFACSRTAPRWKHAVLRRLLLRLFLRRTRVAA

SEQ ID NO: 2683 - DNA, 1420 bp, Homosapiens
tcaagaagggaggttactaggaagggctatggggcctccaacccactgcatcctgccccgccaggatccccgacgctacgaggagtggaagtggttccgctgccccacgctgctggaggtgctggagcagttcccgtcggtggcgctgcctgccccactgctcctcacccagctgcctctgctccagccccggtactactcagtcagctcggcacccagcacccacccaggagagatccacctcactgtagctgtgctggcatacaggactcaggatgggctgggccccctgcactatggagtctgctccacgtggctaagccagctcaagcccggagaccctgtgccctgcttcatccggggggctccctccttccggctgccacccgatcccagcttgccctgcatcctggtgggtccaggcactggcattgcccccttccggggattctggcaggagcggctgcatgacattgagagcaaagggctgcagcccactcccatgactttggtgttcggctgccgatgctcccaacttgaccatctctaccgcgacgaggtgcagaacgcccagcagcgcggggtgtttggccgagtcctcaccgccttctcccgggaacctgacaaccccaagacctacgtgcaggacatcctgaggacggagctggctgcggaggtgcaccgcgtgctgtgcctcgagcggggccacatgtttgtctgcggcgatgttaccatggcaaccaacgtcctgcagaccgtgcagcgcatcctggcgacggagggcgacatggagctggacgaggccggcgacgtcatcggcgtgctgcgggatcagcaacgctaccacgaagacattttcgggctcacgctgcgcacccaggaggtgacaagccgcatacgcacccagagcttttccttgcaggagcgtcagttgcggggcgcagtgccctgggcgttcgaccctcccggctcagacaccaacagcccctgagagccgcctggctttcccttccagttccgggagagcggctgcccgactcaggtccgcccgaccaggatcagccccgctcctcccctcttgaggtggtgccttctcacatctgtccagaggctgcaaggattcagcattattcctccaggaaggagcaaaacgcctcttttccctctctaggcctgttgcctcgggcctgggtccgccttaatctggaaggcccctcccagcagcggtaccccagggcctactgccacccgcttcctgtttcttagtcgaatgttagattcctcttgcctctctcaggagtatcttacctgtaaagtctaatctctaaatcaagtatttattattgaagatttaccataagggactgtgccagatgttaggagaactactaaagtgcctaccccagctcatgtggattac

SEQ ID NO: 2684 - protein, 320 aa, Homosapiens [sequence omitted]

SEQ ID NO: 2685 - DNA, 1449 bp, Homosapiens
tcaagaagggaggttactaggaagggctatggggcctccaacccactgcatcctgccccgccaggatccccgacgctacgaggagtggaagtggttccgctgccccacgctgctggaggtgctggagcagttcccgtcggtggcgctgcctgccccactgctcctcacccagctgcctctgctccagccccggtactactcagtcagctcggcacccagcacccacccaggagagatccacctcactgtagctgtgctggcatacaggactcaggatgggctgggccccctgcactatggagtctgctccacgtggctaagccagctcaagcccggagaccctgtgccctgcttcatccggggggctccctccttccggctgccacccgatcccagcttgccctgcatcctggtgggtccaggcactggcattgcccccttccggggattctggcaggagcggctgcatgacattgagagcaaagggctgcagcccactcccatgactttggtgttcggctgccgatgctcccaacttgaccatctctaccgcgacgaggtgcagaacgcccagcagcgcggggtgtttggccgagtcctcaccgccttctcccgggaacctgacaaccccaagacctacgtgcaggacatcctgaggacggagctggctgcggaggtgcaccgcgtgctgtgcctcgagcggggccacatgtttgtctgcggcgatgttaccatggcaaccaacgtcctgcagaccgtgcagcgcatcctggcgacggagggcgacatggagctggacgaggccggcgacgtcatcggcgtgctgcgggatcagcaacgctaccacgaagacattttcgggctcacgctgcgcacccaggaggtgacaagccgcatacgcacccagagcttttccttgcaggagcgtcagttgcggggcgcagtgccctgggcgttcgaccctcccggctcagacaccaacagcccctgagagccgcctggctttcccttccagttccgggagagcggctgcccgactcaggtccgcccgaccaggatcagccccgctcctcccctcttgaggtggtgccttctcacatctgtccagaggctgcaaggattcagcattattcctccaggaaggagcaaaacgcctcttttccctctctaggcctgttgcctcgggcctgggtccgccttaatctggaaggcccctcccagcagcggtaccccagggcctactgccacccgcttcctgtttcttagtcgaatgttagattcctcttgcctctctcaggagtatcttacctgtaaagtctaatctctaaatcaagtatttattattgaagatttaccataagggactgtgccagatgttaggagaactactaaagtgcctaccccagctcatgtggattacagttttttttttttgtttttttttttttg

SEQ ID NO: 2686 - protein, 320 aa, Homosapiens [sequence omitted]

SEQ ID NO: 2687 - DNA, 712 bp, Homosapiens
aaccaccattactttggctgtttcatctctaagagagtgtagaatgctttcacagagaccctgcacagccctgatttacagagggaagggaagcgcgggtgaggtggtggcccctggtggagctgcgctagaatgcgcggcttcggactcagaattccatgccctttgcattgtgtgacatcgcagtccccttccccgctcccacttcatattctcccatacttataactctcctcccagtcacagccctcttcttttgattgacagaccaccctgggcaccccatgctcaatatgaacaccttgtagcatccttaggtcttggacagacctcggtcagctctggcacagtcaagaatccaccttgggcagttcttctttgagtcttagccctaatccctttgaaaattctattttcctttgtcctcaatccagtcaacacctactatgtaccaggcaccaggaagccagaagctcagggcccagcccttgcctttgccgctcctgccagaatccccggaagggggcaatgccagtgcctggacccaccaggatgcagggcaagctgggatcgggtggcagccggaaggagggagccctggcaggagagacactccatcaggtcccctttgcctttcctgctccaccattctcaccatgcagggtgggtggagcaaggaggacccaagttcttcccatctcaaaaaaaaatt

SEQ ID NO: 2688 - protein, 87 aa, Homosapiens
MYQAPGSQKLRAQPLPLPLLPESPEGGNASAWTHQDAGQAGIGWQPEGGSPGRRDTPSGPLCLSCSTILTMQGGWSKEDPSSSHLKK

SEQ ID NO: 2689 - DNA, 654 bp, Homosapiens
cccaggtgctttagttgggcaggacctgggagtcagtgaggaactcgccccgagaacagagaaaaggtaggcaaggagaggagatgctgatggcatctggaaacaagtcttagagatggtctgcacccagagggaataaggggagacatccccaactggaatgtgtcctggagcagctgcctgggaagaagtcctcgagtttcctcaaggccccactcctggcagctgagtgctgcacctgccttctcgatcacgagcctgagaactgcacgggggagcagcccagactggctggaaaccatgttttcagagtgcagggtcaagtggcgtgtaggactctgtcaaaagaatgacccctttccccaccacatacccacaactgcacagcctctggacagatgtgagaaggcaccacctcaagaggggaggagcggggctgatcctggtcgggcggacctgagtcgggcagccgctctcccggaactggaagggaaagccaggcggctctcaggggctgttggtgtctgagccgggagggtcgaacgcccagggcactgcgccccgcaactgacgctcctgcaaggaaaagctctggcacgccgatgacgtcgccggcctcgtccagctccatgtcgccctccgtcgccaggatgc

SEQ ID NO: 2690 - protein, 75 aa, Homosapiens
MFSECRVKWRVGLCQKNDPFPHHIPTTAQPLDRCEKAPPQEGRSGADPGRADLSRAAALPELEGKARRLSGAVGV

SEQ ID NO: 2691 - DNA, 1651 bp, Homosapiens
agctcagtgtcacagacctttgtggaagcaacaacagctcccatccttccaacctttctggagaagccgtggcctgatggtgagccgaatgggctggggggggagaagaaggcggctggggcggtggggagatctggggcccggatcggtgcccctcctccccatgccactgccacctcctcctcctccttcatgccggggacctgggggagggaggatctccatcttctctctgtcccctgcccctcatacaagaagctccccctcctcattttcccctcccaccgcagggcccccttgctcagtgctacaggggacaggggcttctcagtcttgccacagtgctctccctatcccagccacccccccaacacaggctcaacctgcaatgacacctgcctctgcatctccctcctggggatcccactccaccccacccctggccccggcaacccccactccctcacagcagtgcccccaggactctcctgggctgcgggtaggccctttgatccctgaacaggattatgagcggctggaggactgtgaccctgaggggtcccaagactcacccatccacggggaggagcagcaacccctgcttcatgtccctgaagggctccgaggctcctggcatcacatccagaacctggacagtttcttcaccaagatctacagctaccaccagcggaatggctttgcctgcatcttgctggaggatgtcttccagctgggacaatttattttcattgtcaccttcacaaccttcctccttcgatgcgtggattacaatgttctctttgccaaccaaccaagtaaccataccagacctgggccgttccacagcaaagtgaccctgtcagatgccatcctaccctcagcccagtgtgctgagaggatccgctccagcccgctgctggtcctcctcctggtcctggctgccggcttctggctggtccaactgcttcgctcagtctgcaacctcttcagctactgggacatccaggtgttttacagggaggccctgcacatccccccggggaagggaagggaagacactgggatgtactggagaggccagcctgggggacttgactaacctggactgggaaagctgagtgaaactgggctgaagtgaggtttgcagccttcaaatgagatctgacagtgccccactgccagatgtggacatagcccaggtcctgggaaggcttctggtgacagagccgaagatggcctggagtcgggtggggctgggagtgtaaagcatgcccaggcagaaggtggggaggattctgttccagagttggtgggtgcactagaaatgggaaggagagattctcccacgaactgccagacattctggttttttgtttttttgtttgttttgtttcttttgagacagggtctgggtctttcacccaggctggagtgcagtgctgtgatattggctcactgcagcctctgctccccagtagctgcaaccacaggtgcacaccaccacgccctgctattttttgtatttttagtagagacagtgtctcaccatgctgaggcaggagaatcacttgaacttgtggggtggaggttgcagtgagctgagatcacgccactgcactccagcccgggcggcagagggagactccgtttc

SEQ ID NO: 2692 - protein, 340 aa, Homosapiens
MVSRMGWGGRRRRLGRWGDLGPGSVPLLPMPLPPPPPPSCRGPGGGRISIFSLSPAPHTRSSPSSFSPPTAGPPCSVLQGTGASQSCHSALPIPATPPTQAQPAMTPASASPSWGSHSTPPLAPATPTPSQQCPQDSPGLRVGPLIPEQDYERLEDCDPEGSQDSPIHGEEQQPLLHVPEGLRGSWHHIQNLDSFFTKIYSYHQRNGFACILLEDVFQLGQFIFIVTFTTFLLRCVDYNVLFANQPSNHTRPGPFHSKVTLSDAILPSAQCAERIRSSPLLVLLLVLAAGFWLVQLLRSVCNLFSYWDIQVFYREALHIPPGKGREDTGMYWRGQPGGLD

SEQ ID NO: 2693 - DNA, 368 bp, Homosapiens
aacagtggggaacccagaaggcccggaatctgttccccggagggtttcaggtgaccacagacacccagaaggagcctgaccgggcctcttgcactgactgagacgactcctcagggccccactcctggcagctgagtgctgcacctgccttctcgatcacgagcctgagaactgcacgggggagcagcccagactggctggaaaccatgttttcagagtgcagggtcaagtggcgtgtaggactctgtcaaaagaatgacccctttccccaccacatacccacaactgcacaggttaaaacagaaatcttgtcattttataattgtaatccacgccgggtgcagtagctcacacctgtaatcccagca

SEQ ID NO: 2694 - protein, 46 aa, Homosapiens
MFSECRVKWRVGLCQKNDPFPHHIPTTAQVKTEILSFYNCNPRRVQ

SEQ ID NO: 2695 - DNA, 639 bp, Homosapiens
atctacagctaccaccagcggaatggctttgcctgcatcttgctggaggatgtcttccagctgggacaatttattttcattgtcaccttcacaaccttcctccttcgatgcgtggattacaatgttctctttgccaaccaaccaagtaaccataccagacctgggccgttccacagcaaagtgaccctgtcagatgccatcctaccctcagcccagtgtgctgagaggatccgctccagcccgctgctggtcctcctcctggtcctggctgccggcttctggctggtccaactgcttcgctcagtctgcaacctcttcagctactgggacatccaggtgttttacagggaggccctgcacatccccccggtgagctgggtggctgtgtctgtgcagagggtgccgtgagagggtgggcagaggagaggggaagaagtgggactgtacaggtggaagggccaactggaaagagggcagaaagagcgaggtcttattgacacctgccctaggcccagaataatgtcaggagggggctaccaccacctagagagcatggcccttaccctaagggagtttagtttatttagatggctcatataagatgacatatagttacatgtttgtgctaaaaacattgat

SEQ ID NO: 2696 - protein, 59 aa, Homosapiens
MPSYPQPSVLRGSAPARCWSSSWSWLPASGWSNCFAQSATSSATGTSRCFTGRPCTSPR

SEQ ID NO: 2697 - DNA, 5085 bp, Homosapiens
gttgtcgggatgggggcgggagccaacatagagccctcagtgggatgagggtgaaactgctattgccggcggctcctgttttaccgcgtcagcatgctggtgcatttatttcgggtcgggattcggggtggcccattcccaggcaggctgctaccgcccctccgcttccagacattctcagctgtcaggaggctcctgcgtctgcagccgcgtgtcagccagaaggaggggacgctcggggtcagtgaccacgcccagtccgcactcccgaccgggggtcccctttcctggccctggaggtactctgatggctaccgcagctcctccctcctccgggccgtggcccacctgcggtcccagctctgggcccacctccctcgagcccccctagctcccagatggagcccctctgcctggtgctgggttgggggagccctgctaggccccatggtactgagtaagcatccccacctctgccttgtggccctgtgtgaggcagaagaggcccctcctgccagctccacaccccatgtcgtggggtctcgctttaactggaagctcttctggcagtttctgcacccccacctgctggtcctgggggtagccgtcgtgctggccttgggtgcggcactcgtgaatgtacagatccccctgctcctgggccagctggtagaggtcgtggccaagtacacaagggaccacgtagggagtttcatgactgagtcccagaatctcagcacccacctgcttatcctctatggtgtccagggactgctgaccttcgggtacctggtgctgctgtcccacgttggcgagcgcatggctgtggacatgcggagggccctcttcagctccctgctccgacaagacatcaccttctttgacgccaataagacagggcagctggtgagccgcttgacaactgacgtgcaggagtttaagtcatccttcaagcttgtcatctcccaggggctgcgaagctgcacccaggtggcaggctgcctggtgtccctgtccatgctgtcgacacgcctcacgctgctgctgatggtggccacaccagccctgatgggagtgggcaccctgatgggctcaggcctccgaaaattgtctcgccagtgtcaggagcagatcgccagggcaatgggcgtagcagacgaggccctgggcaatgtgcggactgtgcgtgccttcgccatggagcaacgggaagaggagcgctatggggcagagctggaagcctgccgctgccgggcagaggagctgggccgcggcatcgccttgttccaagggctttccaacatcgccttcaactgcatggtcttgggtaccctatttattgggggctcccttgtggccggacagcagctgacagggggagacctcatgtccttcctggtggcctcccagacagtgcaaaggtccatggccaacctctctgtcctgtttgggcaggtggtccgggggctgagtgcaggtgcccgggtctttgagtacatggccctgaacccctgcatcccactgtctgggggctgctgcgtccccaaagagcagctgcgtggctccgttacatttcagaacgtctgcttcagctacccctgccgccccggcttcgaggtgctgaaagacttcaccctgacgctgccccctggcaagatcgtggccctcgtgggccagtctggcggaggaaagaccaccgtggcttccctgctggagcgcttctacgaccccacggcaggcgtggtgatgctggatgggcgggacctgcgcacccttgacccctcctggctccggggccaggttgtcggcttcatcagccaggagcccgtcctgtttgggacgaccatcatggaaaacatccgctttgggaagctggaagcttccgatgaagaggtgtacacagccgcccgggaagcgaatgctcacgagttcatcaccagcttccccgagggctacaacacggtcgtcggtgaacggggcactaccctgtctgggggccagaagcagcgcctggccatcgcccgagcccttatcaagcagcccacggtgctgatactggatgaagctaccagcgcgctggatgcagagtccgagcgggttgtacaggaggccctggaccgggccagtgcaggccgcacggtgctggtaattgcccaccggctcagcactgtccgtggggcccactgcattgtcgtcatggccgatggccgtgtctgggaggctgggacacatgaagagctcctgaagaaaggcgggctatacgccgagctcatccggaggcaggccctggatgccccgaggacagcggccccaccgcccaaaaagccagaaggccccaggagccaccagcacaagtcctgagaagggccccctgagtgctgacgagtacagagctaaatggagcagctactgcagaatccagtacagaatcggtccaggagggtgcggctgtggacaggccagcatccccagcaggttctgggaggcgcaccttgaaaggggaaggcagacatcctgagtgatgggcgcctgtggccctgagactgtggatgagggggctaggctccagctggcttctgaggggcctggaaaggcacacaagtaggtccttggctgaactggtgccccagcaggacctcgtgtccctgcactgctgcagatgcatcagccctccccatgttggtgccgctgtcacttcctactgggatccttcccctatccagccacatccaggctgtgggactacacggtgccctgttcccctgggcaggagaagaggtggtacctgcaatgcaccttcacagccagagaagcagtgaaaccccttggctagtccagctggaagagctagaccgcaggagccgcgccgtcttcctaacctcgcctcggccttcgctccacagtggagagtgggagcctagctgtgcttgatgctgaatgcctgttttgagagtcgccggctcagcaccgccggctcagcaccgctccgcagcccctgcctgccacggtcagctacgtcccacctggtctgctgcggagtccccagcccagtgcctagcccagtggagccaccgcctgttcctcgggaaggaacagtgggacctgaccggccagatcacctcctccaatcctgccaggctagtgcctccctgccttccaaccttggctgtctcccaccctctcttctcctctccttgcctggcctcctgaatcctatcttagcctccttagccccctgactgactctctctcgcttcttccaagcctctgtagctggttccgctcctgggttctggccatgaagcccacctcaggcccagaggaggcccggcggccagcctcggacatccgcgtgttcgccagcaactgctcgatgcacgggctgggccacgtcttcgggccaggcagcctgagcctgcgccgggggatgtgggcagcggccgtggtcctgtcagtggccaccttcctctaccaggtggctgagagggtgcgctactacagggagttccaccaccagactgccctggatgagcgagaaagccaccggctcatcttcccggctgtcaccctgtgcaacatcaacccactgcgccgctcgcgcctaacgcccaacgacctgcactgggctgggtctgcgctgctgggcctggatcccgcagagcacgccgccttcctgcgcgccctgggccggccccctgcaccgcccggcttcatgcccagtcccacctttgacatggcgcaactctatgcccgtgctgggcactccctggatgacatgctgctggactgtcgcttccgtggccaaccttgtgggcctgagaacttcaccacgatcttcacccggatgggaaagtgctacacatttaactctggcgctgatggggcagagctgctcaccactactaggggtggcatgggcaatgggctggacatcatgctggacgtgcagcaggaggaatatctacctgtgtggagggacaatgaggagaccccgtttgaggtggggatccgagtgcagatccacagccaggaggagccgcccatcatcgatcagctgggcttgggggtgtccccgggctaccagacctttgtttcttgccagcagcagcaggtacccttccgtgtgcctccacacctactacttcaagcccacaccacctcagaccctaaaccctcagctcctcagacctgtctaggggcctctccccagctggcctctcacgctctccgggaagcctccttaaccctgtccccccacagctgagcttcctgccaccgccctggggcgattgcagttcagcatctctgaaccccaactatgagccagagccctctgatcccctaggctcccccagccccagccccagccctccctatacccttatggggtgtcgcctggcctgcgaaacccgctacgtggctcggaagtgcggctgccgaatggtgtacatgccaggcgacgtgccagtgtgcagcccccagcagtacaagaactgtgcccacccggccatagatgccatgcttcgcaaggactcgtgcgcctgccccaacccgtgcgccagcacgcgctacgccaaggagctctccatggtgcggatcccgagccgcgccgccgcgcgcttcctggcccggaagctcaaccgcagcgaggcctacatcgcggagaacgtgctggccctggacatcttctttgaggccctcaactatgagaccgtggagcagaagaaggcctatgagatgtcagagctgcttggtgacattgggggccagatggggctgttcatcggggccagcctgctcaccatcctcgagatcctagactacctctgtgaggtgttccgagacaaggtcctgggatatttctggaaccgacagcactcccaaaggcactccagcaccaatctgacctcccacccctccctgtgccgtcaccaagactctctccgcctcccaccgcacctgctaccttgtcacacagctctagacctgctgtctgtgtcctcggagccccgccctgacatcctggacatgcctagcctgcacgtagcttttccgtcttcaccccaaataaagtcctaatgcatc

SEQ ID NO: 2698 - protein, 755 aa, Homosapiens
MLVHLFRVGIRGGPFPGRLLPPLRFQTFSAVRRLLRLQPRVSQKEGTLGVSDHAQSALPTGGPLSWPWRYSDGYRSSSLLRAVAHLRSQLWAHLPRAPLAPRWSPSAWCWVGGALLGPMVLSKHPHLCLVALCEAEEAPPASSTPHVVGSRFNWKLFWQFLHPHLLVLGVAVVLALGAALVNVQIPLLLGQLVEVVAKYTRDHVGSFMTESQNLSTHLLILYGVQGLLTFGYLVLLSHVGERMAVDMRRALFSSLLRQDITFFDANKTGQLVSRLTTDVQEFKSSFKLVISQGLRSCTQVAGCLVSLSMLSTRLTLLLMVATPALMGVGTLMGSGLRKLSRQCQEQIARAMGVADEALGNVRTVRAFAMEQREEERYGAELEACRCRAEELGRGIALFQGLSNIAFNCMVLGTLFIGGSLVAGQQLTGGDLMSFLVASQTVQRSMANLSVLFGQVVRGLSAGARVFEYMALNPCIPLSGGCCVPKEQLRGSVTFQNVCFSYPCRPGFEVLKDFTLTLPPGKIVALVGQSGGGKTTVASLLERFYDPTAGVVMLDGRDLRTLDPSWLRGQVVGFISQEPVLFGTTIMENIRFGKLEASDEEVYTAAREANAHEFITSFPEGYNTVVGERGTTLSGGQKQRLAIARALIKQPTVLILDEATSALDAESERVVQEALDRASAGRTVLVIAHRLSTVRGAHCIVVMADGRVWEAGTHEELLKKGGLYAELIRRQALDAPRTAAPPPKKPEGPRSHQHKS

SEQ ID NO: 2699 - DNA, 2449 bp, Homosapiens
gagccaacatagagccctcagtgggatgagggtgaaactgctattgccggcggctcctgttttaccgcgtcagcatgctggtgcatttatttcgggtcgggattcggggtggcccattcccaggcaggctgctaccgcccctccgcttccagacattctcagctgtcaggtactctgatggctaccgcagctcctccctcctccgggccgtggcccacctgcggtcccagctctgggcccacctccctcgagcccccctagctcccagatggagcccctctgcctggtgctgggttgggggagccctgctaggccccatggtactgagtaagcatccccacctctgccttgtggccctgtgtgaggcagaagaggcccctcctgccagctccacaccccatgtcgtggggtctcgctttaactggaagctcttctggcagtttctgcacccccacctgctggtcctgggggtagccgtcgtgctggccttgggtgcggcactcgtgaatgtacagatccccctgctcctgggccagctggtagaggtcgtggccaagtacacaagggaccacgtagggagtttcatgactgagtcccagaatctcagcacccacctgcttatcctctatggtgtccagggactgctgaccttcgggtacctggtgctgctgtcccacgttggcgagcgcatggctgtggacatgcggagggccctcttcagctccctgctccgacaagacatcaccttctttgacgccaataagacagggcagctggtgagccgcttgacaactgacgtgcaggagtttaagtcatccttcaagcttgtcatctcccaggggctgcgaagctgcacccaggtggcaggctgcctggtgtccctgtccatgctgtcgacacgcctcacgctgctgctgatggtggccacaccagccctgatgggagtgggcaccctgatgggctcaggcctccgaaaattgtctcgccagtgtcaggagcagatcgccagggcaatgggcgtagcagacgaggccctgggcaatgtgcggactgtgcgtgccttcgccatggagcaacgggaagaggagcgctatggggcagagctggaagcctgccgctgccgggcagaggagctgggccgcggcatcgccttgttccaagggctttccaacatcgccttcaactgcatggtcttgggtaccctatttattgggggctcccttgtggccggacagcagctgacagggggagacctcatgtccttcctggtggcctcccagacagtgcaaaggtccatggccaacctctctgtcctgtttgggcaggtggtccgggggctgagtgcaggtgcccgggtctttgagtacatggccctgaacccctgcatcccactgtctgggggctgctgcgtccccaaagagcagctgcgtggctccgttacatttcagaacgtctgcttcagctacccctgccgccccggcttcgaggtgctgaaagacttcaccctgacgctgccccctggcaagatcgtggccctcgtgggccagtctggcggaggaaagaccaccgtggcttccctgctggagcgcttctacgaccccacggcaggcgtggtgatgctggatgggcgggacctgcgcacccttgacccctcctggctccggggccaggttgtcggcttcatcagccaggagcccgtcctgtttgggacgaccatcatggaaaacatccgctttgggaagctggaagcttccgatgaagaggtgtacacagccgcccgggaagcgaatgctcacgagttcatcaccagcttccccgagggctacaacacggtcgtcggtgaacggggcactaccctgtctgggggccagaagcagcgcctggccatcgcccgagcccttatcaagcagcccacggtgctgatactggatgaagctaccagcgcgctggatgcagagtccgagcgggttgtacaggaggccctggaccgggccagtgcaggccgcacggtgctggtaattgcccaccggctcagcactgtccgtggggcccactgcattgtcgtcatggccgatggccgtgtctgggaggctgggacacatgaagagctcctgaagaaaggcgggctatacgccgagctcatccggaggcaggccctggatgccccgaggacagcggccccaccgcccaaaaagccagaaggccccaggagccaccagcacaagtcctgagaagggccccctgaggtgtggtcgctgccaagcatcagtgttagggctggggctcagcctgggggagcctactggggactgagcccccaggagggccagcatgtggagagtcgctgcggctgctcctgctcacaataaagccggggccgagcagctggcaggggaggccaatccctccctcccctccccagtcctgccggctgcctccctcccaccag

SEQ ID NO: 2700 - protein, 718 aa, Homosapiens
MLVHLFRVGIRGGPFPGRLLPPLRFQTFSAVRYSDGYRSSSLLRAVAHLRSQLWAHLPRAPLAPRWSPSAWCWVGGALLGPMVLSKHPHLCLVALCEAEEAPPASSTPHVVGSRFNWKLFWQFLHPHLLVLGVAVVLALGAALVNVQIPLLLGQLVEVVAKYTRDHVGSFMTESQNLSTHLLILYGVQGLLTFGYLVLLSHVGERMAVDMRRALFSSLLRQDITFFDANKTGQLVSRLTTDVQEFKSSFKLVISQGLRSCTQVAGCLVSLSMLSTRLTLLLMVATPALMGVGTLMGSGLRKLSRQCQEQIARAMGVADEALGNVRTVRAFAMEQREEERYGAELEACRCRAEELGRGIALFQGLSNIAFNCMVLGTLFIGGSLVAGQQLTGGDLMSFLVASQTVQRSMANLSVLFGQVVRGLSAGARVFEYMALNPCIPLSGGCCVPKEQLRGSVTFQNVCFSYPCRPGFEVLKDFTLTLPPGKIVALVGQSGGGKTTVASLLERFYDPTAGVVMLDGRDLRTLDPSWLRGQVVGFISQEPVLFGTTIMENIRFGKLEASDEEVYTAAREANAHEFITSFPEGYNTVVGERGTTLSGGQKQRLAIARALIKQPTVLILDEATSALDAESERVVQEALDRASAGRTVLVIAHRLSTVRGAHCIVVMADGRVWEAGTHEELLKKGGLYAELIRRQALDAPRTAAPPPKKPEGPRSHQHKS

SEQ ID NO: 2701 - DNA, 637 bp, Homosapiens
agccaacatagagccctcagtgggatgagggtgaaactgctattgccggcggctcctgttttaccgcgtcagcatgctggtgcatttatttcgggtcgggattcggggtggcccattcccaggcaggctgctaccgcccctccgcttccagacattctcagctgtcaggtactctgatggctaccgcagctcctccctcctccgggccgtggcccacctgcggtcccagctctgggcccacctccctcgagcccccctagctcccagatggagcccctctgcctggtgctgggttgggggagccctgctaggccccatggtactgagtaagcatccccacctctgccttgtggccctgtgtgaggcagaagaggcccctcctgccagctccacaccccatgtcgtggggtctcgctttaactggaagctcttctggcagtttctgcacccccacctgctggtcctgggggtagccgtcgtgctggccttgggtgcggcactcgtgaatgtacagatccccctgctcctgggccagctggtagaggtcgtggccaagtacacaagggaccacgtagggagtttcatgactgagtcccagaatctcagcacccacctgcttatcctctatggtgtccag

SEQ ID NO: 2702 - protein, 187 aa, Homosapiens
MLVHLFRVGIRGGPFPGRLLPPLRFQTFSAVRYSDGYRSSSLLRAVAHLRSQLWAHLPRAPLAPRWSPSAWCWVGGALLGPMVLSKHPHLCLVALCEAEEAPPASSTPHVVGSRFNWKLFWQFLHPHLLVLGVAVVLALGAALVNVQIPLLLGQLVEVVAKYTRDHVGSFMTESQNLSTHLLILYGV

SEQ ID NO: 2703 - DNA, 2204 bp, Homosapiens
atagagccctcagtgggatgagggtgaaactgctattgccggcggctcctgttttaccgcgtcagcatgctggtgcatttatttcgggtcgggattcggggtggcccattcccaggcaggctgctaccgcccctccgcttccagacattctcagctgtcagctggccttgggtgcggcactcgtgaatgtacagatccccctgctcctgggccagctggtagaggtcgtggccaagtacacaagggaccacgtagggagtttcatgactgagtcccagaatctcagcacccacctgcttatcctctatggtgtccaggtacagccgggagtggggctggggaccgccgaggagccacccgaggcatccctgagtgcactgggctctttcgcagggactgctgaccttcgggtacctggtgctgctgtcccacgttggcgagcgcatggctgtggacatgcggagggccctcttcagctccctgctccgacaagacatcaccttctttgacgccaataagacagggcagctggtgagccgcttgacaactgacgtgcaggagtttaagtcatccttcaagcttgtcatctcccaggggctgcgaagctgcacccaggtggcaggctgcctggtgtccctgtccatgctgtcgacacgcctcacgctgctgctgatggtggccacaccagccctgatgggagtgggcaccctgatgggctcaggcctccgaaaattgtctcgccagtgtcaggagcagatcgccagggcaatgggcgtagcagacgaggccctgggcaatgtgcggactgtgcgtgccttcgccatggagcaacgggaagaggagcgctatggggcagagctggaagcctgccgctgccgggcagaggagctgggccgcggcatcgccttgttccaagggctttccaacatcgccttcaactgcatggtcttgggtaccctatttattgggggctcccttgtggccggacagcagctgacagggggagacctcatgtccttcctggtggcctcccagacagtgcaaaggtccatggccaacctctctgtcctgtttgggcaggtggtccgggggctgagtgcaggtgcccgggtctttgagtacatggccctgaacccctgcatcccactgtctgggggctgctgcgtccccaaagagcagctgcgtggctccgttacatttcagaacgtctgcttcagctacccctgccgccccggcttcgaggtgctgaaagacttcaccctgacgctgccccctggcaagatcgtggccctcgtgggccagtctggcggaggaaagaccaccgtggcttccctgctggagcgcttctacgaccccacggcaggcgtggtgatgctggatgggcgggacctgcgcacccttgacccctcctggctccggggccaggttgtcggcttcatcagccaggagcccgtcctgtttgggacgaccatcatggaaaacatccgctttgggaagctggaagcttccgatgaagaggtgtacacagccgcccgggaagcgaatgctcacgagttcatcaccagcttccccgagggctacaacacggtcgtcggtgaacggggcactaccctgtctgggggccagaagcagcgcctggccatcgcccgagcccttatcaagcagcccacggtgctgatactggatgaagctaccagcgcgctggatgcagagtccgagcgggttgtacaggaggccctggaccgggccagtgcaggccgcacggtgctggtaattgcccaccggctcagcactgtccgtggggcccactgcattgtcgtcatggccgatggccgtgtctgggaggctgggacacatgaagagctcctgaagaaaggcgggctatacgccgagctcatccggaggcaggccctggatgccccgaggacagcggccccaccgcccaaaaagccagaaggccccaggagccaccagcacaagtcctgagaagggccccctgaggtgtggtcgctgccaagcatcagtgttagggctggggctcagcctgggggagcctactggggactgagcccccaggagggccagcatgtggagagtcgctgcggctgctcctgctcacaataaagccggggccgagcagctggcaggggaggccaatccctccctcccctccccagtcctgccggctgcctccctcccaccag

SEQ ID NO: 2704 - protein, 513 aa, Homosapiens
MAVDMRRALFSSLLRQDITFFDANKTGQLVSRLTTDVQEFKSSFKLVISQGLRSCTQVAGCLVSLSMLSTRLTLLLMVATPALMGVGTLMGSGLRKLSRQCQEQIARAMGVADEALGNVRTVRAFAMEQREEERYGAELEACRCRAEELGRGIALFQGLSNIAFNCMVLGTLFIGGSLVAGQQLTGGDLMSFLVASQTVQRSMANLSVLFGQVVRGLSAGARVFEYMALNPCIPLSGGCCVPKEQLRGSVTFQNVCFSYPCRPGFEVLKDFTLTLPPGKIVALVGQSGGGKTTVASLLERFYDPTAGVVMLDGRDLRTLDPSWLRGQVVGFISQEPVLFGTTIMENIRFGKLEASDEEVYTAAREANAHEFITSFPEGYNTVVGERGTTLSGGQKQRLAIARALIKQPTVLILDEATSALDAESERVVQEALDRASAGRTVLVIAHRLSTVRGAHCIVVMADGRVWEAGTHEELLKKGGLYAELIRRQALDAPRTAAPPPKKPEGPRSHQHKS

SEQ ID NO: 2705 - DNA, 2492 bp, Homosapiens
atagagccctcagtgggatgagggtgaaactgctattgccggcggctcctgttttaccgcgtcagcatgctggtgcatttatttcgggtcgggattcggggtggcccattcccaggcaggctgctaccgcccctccgcttccagacattctcagctgtcagaaacacatggcgtaatgggaaaactggacagttacacaaggcagaaggagagtactctgatggctaccgcagctcctccctcctccgggccgtggcccacctgcggtcccagctctgggcccacctccctcgagcccccctagctcccagatggagcccctctgcctggtgctgggttgggggagccctgctaggccccatggtactgagtaagcatccccacctctgccttgtggccctgtgtgaggcagaagaggcccctcctgccagctccacaccccatgtcgtggggtctcgctttaactggaagctcttctggcagtttctgcacccccacctgctggtcctgggggtagccgtcgtgctggccttgggtgcggcactcgtgaatgtacagatccccctgctcctgggccagctggtagaggtcgtggccaagtacacaagggaccacgtagggagtttcatgactgagtcccagaatctcagcacccacctgcttatcctctatggtgtccagggactgctgaccttcgggtacctggtgctgctgtcccacgttggcgagcgcatggctgtggacatgcggagggccctcttcagctccctgctccgacaagacatcaccttctttgacgccaataagacagggcagctggtgagccgcttgacaactgacgtgcaggagtttaagtcatccttcaagcttgtcatctcccaggggctgcgaagctgcacccaggtggcaggctgcctggtgtccctgtccatgctgtcgacacgcctcacgctgctgctgatggtggccacaccagccctgatgggagtgggcaccctgatgggctcaggcctccgaaaattgtctcgccagtgtcaggagcagatcgccagggcaatgggcgtagcagacgaggccctgggcaatgtgcggactgtgcgtgccttcgccatggagcaacgggaagaggagcgctatggggcagagctggaagcctgccgctgccgggcagaggagctgggccgcggcatcgccttgttccaagggctttccaacatcgccttcaactgcatggtcttgggtaccctatttattgggggctcccttgtggccggacagcagctgacagggggagacctcatgtccttcctggtggcctcccagacagtgcaaaggtccatggccaacctctctgtcctgtttgggcaggtggtccgggggctgagtgcaggtgcccgggtctttgagtacatggccctgaacccctgcatcccactgtctgggggctgctgcgtccccaaagagcagctgcgtggctccgttacatttcagaacgtctgcttcagctacccctgccgccccggcttcgaggtgctgaaagacttcaccctgacgctgccccctggcaagatcgtggccctcgtgggccagtctggcggaggaaagaccaccgtggcttccctgctggagcgcttctacgaccccacggcaggcgtggtgatgctggatgggcgggacctgcgcacccttgacccctcctggctccggggccaggttgtcggcttcatcagccaggagcccgtcctgtttgggacgaccatcatggaaaacatccgctttgggaagctggaagcttccgatgaagaggtgtacacagccgcccgggaagcgaatgctcacgagttcatcaccagcttccccgagggctacaacacggtcgtcggtgaacggggcactaccctgtctgggggccagaagcagcgcctggccatcgcccgagcccttatcaagcagcccacggtgctgatactggatgaagctaccagcgcgctggatgcagagtccgagcgggttgtacaggaggccctggaccgggccagtgcaggccgcacggtgctggtaattgcccaccggctcagcactgtccgtggggcccactgcattgtcgtcatggccgatggccgtgtctgggaggctgggacacatgaagagctcctgaagaaaggcgggctatacgccgagctcatccggaggcaggccctggatgccccgaggacagcggccccaccgcccaaaaagccagaaggccccaggagccaccagcacaagtcctgagaagggccccctgaggtgtggtcgctgccaagcatcagtgttagggctggggctcagcctgggggagcctactggggactgagcccccaggagggccagcatgtggagagtcgctgcggctgctcctgctcacaataaagccggggccgagcagctggcaggggaggccaatccctccctcccctccccagtcctgccggctgcctccctcccaccag

SEQ ID NO: 2706 - protein, 735 aa, Homosapiens
MLVHLFRVGIRGGPFPGRLLPPLRFQTFSAVRNTWRNGKTGQLHKAEGEYSDGYRSSSLLRAVAHLRSQLWAHLPRAPLAPRWSPSAWCWVGGALLGPMVLSKHPHLCLVALCEAEEAPPASSTPHVVGSRFNWKLFWQFLHPHLLVLGVAVVLALGAALVNVQIPLLLGQLVEVVAKYTRDHVGSFMTESQNLSTHLLILYGVQGLLTFGYLVLLSHVGERMAVDMRRALFSSLLRQDITFFDANKTGQLVSRLTTDVQEFKSSFKLVISQGLRSCTQVAGCLVSLSMLSTRLTLLLMVATPALMGVGTLMGSGLRKLSRQCQEQIARAMGVADEALGNVRTVRAFAMEQREEERYGAELEACRCRAEELGRGIALFQGLSNIAFNCMVLGTLFIGGSLVAGQQLTGGDLMSFLVASQTVQRSMANLSVLFGQVVRGLSAGARVFEYMALNPCIPLSGGCCVPKEQLRGSVTFQNVCFSYPCRPGFEVLKDFTLTLPPGKIVALVGQSGGGKTTVASLLERFYDPTAGVVMLDGRDLRTLDPSWLRGQVVGFISQEPVLFGTTIMENIRFGKLEASDEEVYTAAREANAHEFITSFPEGYNTVVGERGTTLSGGQKQRLAIARALIKQPTVLILDEATSALDAESERVVQEALDRASAGRTVLVIAHRLSTVRGAHCIVVMADGRVWEAGTHEELLKKGGLYAELIRRQALDAPRTAAPPPKKPEGPRSHQHKS

SEQ ID NO: 2707 - DNA, 523 bp, Homosapiens
tgggatgagggtgaaactgctattgccggcggctcctgttttaccgcgtcagcatgctggtgcatttatttcgggtcgggattcggggtggcccattcccaggcaggctgctaccgcccctccgcttccagacattctcagctgtcaggtactctgatggctaccgcagctcctccctcctccgggccgtggcccacctgcggtcccagctctgggcccacctccctcgagcccccctagctcccagatggagcccctctgcctggtgctgggttgggggagccctgctaggccccatggtactgagtaagcatccccacctctgccttgtggccctgtgtgaggcagaagaggcccctcctgccagctccacaccccatgtcgtggggtctcgctttaactggaagctcttctggcagtttctgcacccccacctgctggtcctgggggtagccgtcgtggtgaggactgggtggctgggcactcgtgaatgtacagatccccctgctcctgggccagctgg

SEQ ID NO: 2708 - protein, 155 aa, Homosapiens
MLVHLFRVGIRGGPFPGRLLPPLRFQTFSAVRYSDGYRSSSLLRAVAHLRSQLWAHLPRAPLAPRWSPSAWCWVGGALLGPMVLSKHPHLCLVALCEAEEAPPASSTPHVVGSRFNWKLFWQFLHPHLLVLGVAVVVRTGWLGTRECTDPPAPGP

SEQ ID NO: 2709 - DNA, 1004 bp, Homosapiens
cagggactgctgaccttcgggtacctggtgctgctgtcccacgttggcgagcgcatggctgtggacatgcggagggccctcttcagctccctgctccgacaagacatcaccttctttgacgccaataagacagggcagctggtgagccgcttgacaactgacgtgcaggagtttaagtcatccttcaagcttgtcatctcccaggggctgcgaagctgcacccaggtggcaggctgcctggtgtccctgtccatgctgtcgacacgcctcacgctgctgctgatggtggccacaccagccctgatgggagtgggcaccctgatgggctcaggcctccgaaaattgtctcgccagtgtcaggagcagatcgccagggcaatgggcgtagcagacgaggccctgggcaatgtgcggactgtgcgtgccttcgccatggagcaacgggaagaggagcgctatggggcagagctggaagcctgccgctgccgggcagaggagctgggccgcggcatcgccttgttccaagggctttccaacatcgccttcaactgcatggtcttgggtaccctatttattgggggctcccttgtggccggacagcagctgacagggggagacctcatgtccttcctggtggcctcccagacagtgcaaagcttcctccgtgttgcaccctgtccgaattcccttccgctgcaggctgtgacattccatgcatggaaggaccatccttgacaggctgtgtgagctgcccttccccatgcctgccacttccagggatgacaagctgacccctgtccccacacaccccacccttatagcttattgctttgcgttggtccaaaaccacccgctcagctgagcctctgggatgaccagagctgatcaccagacagctcaaggcgggcctcccccctcctatctctttccaagctaaacacaagcagttctacataaatatgttatggtaaataatgagatagtaaatatgctgtaacagatca

SEQ ID NO: 2710 - protein, 226 aa, Homosapiens
MAVDMRRALFSSLLRQDITFFDANKTGQLVSRLTTDVQEFKSSFKLVISQGLRSCTQVAGCLVSLSMLSTRLTLLLMVATPALMGVGTLMGSGLRKLSRQCQEQIARAMGVADEALGNVRTVRAFAMEQREEERYGAELEACRCRAEELGRGIALFQGLSNIAFNCMVLGTLFIGGSLVAGQQLTGGDLMSFLVASQTVQSFLRVAPCPNSLPLQAVTFHAWKDHP

SEQ ID NO: 2711 - DNA, 3738 bp, Homosapiens
attctactgaggcatgtgtcctcgccctgctgcatggtgcacccctgcgtgtgtgtccgccggatcagaacccctcactgcagggtgtactgtcccaggaagcgggaggcggacggagacaggctcccattttcagccccaaacctgacattccacagagacgttcctcccatttccgcagctgcatggacaccctcgcgtgccccgtttctgctcgtgctccctaatctgagcaccttcagaccctttctggtcccgggctcaggcctccttggcagcctcgccctcctccagcccaaggagctgttctgtcgtggctttggaattcagatgctctcactgtgatagagatggggtcttggggggctgggagctgttctgtcgtggctttggagttcagatgctctcactgtgatagagatggggtcttggggggctgcctccaccactgcctgccctgctcagcgctgacccacttcccttgaccagagttttggcctctctgaatgggacggtcgttttagtcctgagggcccataagaagcccagtggcggctgggtgcggtggcgcacacctgtaatcccagcactttgggaggccgaggtgggtggatcgtgaagttaagagatcgagaccatcctggccaacatggtgaaaccccgtctctactaaaaatacaaaaattagctgggcatggtggtagtcccagctactcgggaggctgaggcaagagaatcgcttgaacctggtaggcagaggttgcagtgacctgagattgcgccactgcaccccagcctggcaacagcaagactccgtctcaaaaaaaaaaaaagaagcccagtggctcccttaataaaatcaccccttagccctctgtggtgggcagtggtgggacagtctccctgtggggagggtggctgcactgtccagccccaaccctcccgcttcgggacccccacttcccctttagggcctgagactctgactttacctcccaccgtactgcttggccatccagcagctttatgacacacacaagaacccccaggggcttgtctgtgctgtttcgctggctgctcccacagccacaggccctagacccatcctcttggaggtccttctagcgctgcctatgtggagattcttccccactcatcttgggggtttggatttgttgcataaagcagctgatgtgtttcccacagggtcctgccagctaagccaagggcccatgcattggcactggggtctagcagagagaggggagcaggatggcccggcctacctcaggcagcctaacctatgagcccatcctgagtactcctgatggagatggggaggtgcccagacagacagcaagtggggcccagccgcctcatcagaatcagggccaggctccacctgggaacaggcccgtagcctacagcccacggcccctgagagcagggtcatcacactccaatgagtcatgtgcattttgaatttcagttgctgcccagcccctttgccaggccctaatgtcttccagatctctggtggagaatgtgcccctgctcatcaacagatagctggctgggctggctccttcctgcctggtgcctcccccggctgcctttagcaagtgctgactgcactgagtccactgggaccttttccttttgggtttcgaggctcctcccactcacccccaccctagtgctggaagaagtgagtctgcagctgaagggttgctggggagtcagtctttcctcttacttaggaggggaccaggcatacacacactgtcacaggtcagccaggccagtcagggaccagtgactcaccttcctcctcagcctcctggcagccggccagccctaccccggccctgccgggacgaaggaggccacccactgtctagacagataacactgtgggtatacttatctgcagggcaagctcatgagaaaaatttttttcagggaattttgttttggggtctcctgagagttcccctgtggcccagtgtcttctgttttcttctttctccaaaaagatttaacatcacttcttccacctaaatgtctgccaaagtcattgcttccccaagagtctgcagcattagatctgctctccccttctaagccacgcacccttgatctctgttcatggtggcggcctccgcatcctcagggccgagcagggagtccgtgggtcagctgggctcccttcctcgtgggctgatatcaccgctgcatgtgtgcacaggcctcaccctgcagaccacaggccagggcactggaggacacccacagaggcctgtgccttcacttccatttcctcgtggagcaccccctcccaggggcttgggctgagctgagggacagctgtcatcctcatctggccaaggagggagccagggctcagcgatctggtgttgctacgtcccagggctctacgcccccatggtgcaggagcagtctctgcatttggccacaggccacctgcttccttgctcccccgccccaccgtggcttccttcccctcctctggctcttcttgttcccatctattccacccctctctcctttttctgacaggtccatggccaacctctctgtcctgtttgggcaggtggtccgggggctgagtgcaggtgcccgggtctttgagtacatggccctgaacccctgcatcccactgtctgggggctgctgcgtccccaaagagcagctgcgtggctccgttacatttcagaacgtctgcttcagctacccctgccgccccggcttcgaggtgctgaaagacttcaccctgacgctgccccctggcaagatcgtggccctcgtgggccagtctggcggaggaaagaccaccgtggcttccctgctggagcgcttctacgaccccacggcaggcgtggtgatgctggatgggcgggacctgcgcacccttgacccctcctggctccggggccaggttgtcggcttcatcagccaggagcccgtcctgtttgggacgaccatcatggaaaacatccgctttgggaagctggaagcttccgatgaagaggtgtacacagccgcccgggaagcgaatgctcacgagttcatcaccagcttccccgagggctacaacacggtcgtcggtgaacggggcactaccctgtctgggggccagaagcagcgcctggccatcgcccgagcccttatcaagcagcccacggtgctgatactggatgaagctaccagcgcgctggatgcagagtccgagcgggttgtacaggaggccctggaccgggccagtgcaggccgcacggtgctggtaattgcccaccggctcagcactgtccgtggggcccactgcattgtcgtcatggccgatggccgtgtctgggaggctgggacacatgaagagctcctgaagaaaggcgggctatacgccgagctcatccggaggcaggccctggatgccccgaggacagcggccccaccgcccaaaaagccagaaggccccaggagccaccagcacaagtcctgagaagggccccctgaggtgtggtcgctgccaagcatcagtgttagggctggggctcagcctgggggagcctactggggactgagcccccaggagggccagcatgtggagagtcgctgcggctgctcctgctcacaataaagccggggccgagcagctggcaggggaggccaatccctccctcccctccccagtcctgccggctgcctccctcccaccag

SEQ ID NO: 2712 - protein, 427 aa, Homosapiens
MCAQASPCRPQARALEDTHRGLCLHFHFLVEHPLPGAWAELRDSCHPHLAKEGARAQRSGVATSQGSTPPWCRSSLCIWPQATCFLAPPPHRGFLPLLWLFLFPSIPPLSPFSDRSMANLSVLFGQVVRGLSAGARVFEYMALNPCIPLSGGCCVPKEQLRGSVTFQNVCFSYPCRPGFEVLKDFTLTLPPGKIVALVGQSGGGKTTVASLLERFYDPTAGVVMLDGRDLRTLDPSWLRGQVVGFISQEPVLFGTTIMENIRFGKLEASDEEVYTAAREANAHEFITSFPEGYNTVVGERGTTLSGGQKQRLAIARALIKQPTVLILDEATSALDAESERVVQEALDRASAGRTVLVIAHRLSTVRGAHCIVVMADGRVWEAGTHEELLKKGGLYAELIRRQALDAPRTAAPPPKKPEGPRSHQHKS

SEQ ID NO: 2713 - DNA, 434 bp, Homosapiens
agcgcgctggatgcagagtccgagcgggttgtacaggaggccctggaccgggccagtgcaggccgcacggtgctggctgggacacatgaagagctcctgaagaaaggcgggctatacgccgagctcatccggaggcaggccctggatgccccgaggacagcggccccaccgcccaaaaagccagaaggccccaggagccaccagcacaagtcctgagaagggccccctgaggtgtggtcgctgccaagcatcagtgttagggctggggctcagcctgggggagcctactggggactgagcccccaggagggccagcatgtggagagtcgctgcggctgctcctgctcacaataaagccggggccgagcagctggcaggggaggccaatccctccctcccctccccagtcctgccggctgcctccctcccaccag

SEQ ID NO: 2714 - protein, 50 aa, Homosapiens
MPRGQRPHRPKSQKAPGATSTSPEKGPLRCGRCQASVLGLGLSLGEPTGD

SEQ ID NO: 2715 - DNA, 2095 bp, Homosapiens
ctgaaacccaatcctctgcagcagcgccggctcagcaccgccggctcagcaccgctccgcagcccctgcctgccacggtcagctacgtcccacctggtctgctgcggagtccccagcccagtgcctagcccagtggagccaccgcctgttcctcgggaaggaacagtgggacctgaccggccagatcacctcctccaatcctgccaggctagtgcctccctgccttccaaccttggctgtctcccaccctctcttctcctctccttgcctggcctcctgaatcctatcttagcctccttagccccctgactgactctctctcgcttcttccaagcctctgtagctggttccgctcctgggttctggccatgaagcccacctcaggcccagaggaggcccggcggccagcctcggacatccgcgtgttcgccagcaactgctcgatgcacgggctgggccacgtcttcgggccaggcagcctgagcctgcgccgggggatgtgggcagcggccgtggtcctgtcagtggccaccttcctctaccaggtggctgagagggtgcgctactacagggagttccaccaccagactgccctggatgagcgagaaagccaccggctcatcttcccggctgtcaccctgtgcaacatcaacccactgcgccgctcgcgcctaacgcccaacgacctgcactgggctgggtctgcgctgctgggcctggatcccgcagagcacgccgccttcctgcgcgccctgggccggccccctgcaccgcccggcttcatgcccagtcccacctttgacatggcgcaactctatgcccgtgctgggcactccctggatgacatgctgctggactgtcgcttccgtggccaaccttgtgggcctgagaacttcaccacgatcttcacccggatgggaaagtgctacacatttaactctggcgctgatggggcagagctgctcaccactactaggggtggcatgggcaatgggctggacatcatgctggacgtgcagcaggaggaatatctacctgtgtggagggacaatgaggagaccccgtttgaggtggggatccgagtgcagatccacagccaggaggagccgcccatcatcgatcagctgggcttgggggtgtccccgggctaccagacctttgtttcttgccagcagcagcagctgagcttcctgccaccgccctggggcgattgcagttcagcatctctgaaccccaactatgagccagagccctctgatcccctaggctcccccagccccagccccagccctccctatacccttatggggtgtcgcctggcctgcgaaacccgctacgtggctcggaagtgcggctgccgaatggtgtacatgccaggcgacgtgccagtgtgcagcccccagcagtacaagaactgtgcccacccggccatagggagaacgtgctggccctggacatcttctttgaggccctcaactatgagaccgtggagcagaagaaggcctatgagatgtcagagctgcttggtgacattgggggccagatggggctgttcatcggggccagcctgctcaccatcctcgagatcctagactacctctgtgaggtgttccgagacaaggtcctgggatatttctggaaccgacagcactcccaaaggcactccagcaccaatctggtaacagcccctcttctggagcccttgcctgctccaagggtgctagggcccacccctgaagcctagaccaccatcccgccccagctgaggagaaacaggcaggagggtgtgcagtgacctcgactggtccctgggaggaggaccactccccacctctgaccctctcgtcctcacacagcttcaggaagggctgggcagccatcgaacccaagttccccacctcagcctgggccccagacctcccacccctccctgtgccgtcaccaagactctctccgcctcccaccgcacctgctaccttgtcacacagctctagacctgctgtctgtgtcctcggagccccgccctgacatcctggacatgcctagcctgcacgtagcttttccgtcttcaccccaaataaagtcctaatgcatc

SEQ ID NO: 2716 - protein, 407 aa, Homosapiens
MKPTSGPEEARRPASDIRVFASNCSMHGLGHVFGPGSLSLRRGMWAAAVVLSVATFLYQVAERVRYYREFHHQTALDERESHRLIFPAVTLCNINPLRRSRLTPNDLHWAGSALLGLDPAEHAAFLRALGRPPAPPGFMPSPTFDMAQLYARAGHSLDDMLLDCRFRGQPCGPENFTTIFTRMGKCYTFNSGADGAELLTTTRGGMGNGLDIMLDVQQEEYLPVWRDNEETPFEVGIRVQIHSQEEPPIIDQLGLGVSPGYQTFVSCQQQQLSFLPPPWGDCSSASLNPNYEPEPSDPLGSPSPSPSPPYTLMGCRLACETRYVARKCGCRMVYMPGDVPVCSPQQYKNCAHPAIGRTCWPWTSSLRPSTMRPWSRRRPMRCQSCLVTLGARWGCSSGPACSPSSRS

SEQ ID NO: 2717 - DNA, 2006 bp, Homosapiens
ctgaaacccaatcctctgcagcagcgccggctcagcaccgccggctcagcaccgctccgcagcccctgcctgccacggtcagctacgtcccacctggtctgctgcggagtccccagcccagtgcctagcccagtggagccaccgcctgttcctcgggaaggaacagtgggacctgaccggccagatcacctcctccaatcctgccaggctagtgcctccctgccttccaaccttggctgtctcccaccctctcttctcctctccttgcctggcctcctgaatcctatcttagcctccttagccccctgactgactctctctcgcttcttccaagcctctgtagctggttccgctcctgggttctggccatgaagcccacctcaggcccagaggaggcccggcggccagcctcggacatccgcgtgttcgccagcaactgctcgatgcacgggctgggccacgtcttcgggccaggcagcctgagcctgcgccgggggatgtgggcagcggccgtggtcctgtcagtggccaccttcctctaccaggtggctgagagggtgcgctactacagggagttccaccaccagactgccctggatgagcgagaaagccaccggctcatcttcccggctgtcaccctgtgcaacatcaacccactgcgccgctcgcgcctaacgcccaacgacctgcactgggctgggtctgcgctgctgggcctggatcccgcagagcacgccgccttcctgcgcgccctgggccggccccctgcaccgcccggcttcatgcccagtcccacctttgacatggcgcaactctatgcccgtgctgggcactccctggatgacatgctgctggactgtcgcttccgtggccaaccttgtgggcctgagaacttcaccacgatcttcacccggatgggaaagtgctacacatttaactctggcgctgatggggcagagctgctcaccactactaggggtggcatgggcaatgggctggacatcatgctggacgtgcagcaggaggaatatctacctgtgtggagggacaatgaggagaccccgtttgaggtggggatccgagtgcagatccacagccaggaggagccgcccatcatcgatcagctgggcttgggggtgtccccgggctaccagacctttgtttcttgccagcagcagcagctgagcttcctgccaccgccctggggcgattgcagttcagcatctctgaaccccaactatgagccagagccctctgatcccctaggctcccccagccccagccccagccctccctatacccttatggggtgtcgcctggcctgcgaaacccgctacgtggctcggaagtgcggctgccgaatggtgtacatgccaggcgacgtgccagtgtgcagcccccagcagtacaagaactgtgcccacccggccatagatgccatgcttcgcaaggactcgtgcgcctgccccaacccgtgcgccagcacgcgctacgccaaggagctctccatggtgcggatcccgagccgcgccgccgcgcgcttcctggcccggaagctcaaccgcagcgaggcctacatcgcggagaacgtgctggccctggacatcttctttgaggccctcaactatgagaccgtggagcagaagaaggcctatgagatgtcagagctgcttggtgacattgggggccagatggggctgttcatcggggccagcctgctcaccatcctcgagatcctagactacctctgtgaggtgttccgagacaaggtcctgggatatttctggaaccgacagcactcccaaaggcactccagcaccaatctgacctcccacccctccctgtgccgtcaccaagactctctccgcctcccaccgcacctgctaccttgtcacacagctctagacctgctgtctgtgtcctcggagccccgccctgacatcctggacatgcctagcctgcacgtagcttttccgtcttcaccccaaataaagtcctaatgcatc

SEQ ID NO: 2718 - protein, 543 aa, Homosapiens; identical to SEQ ID NO: 328

SEQ ID NO: 2719 - DNA, 1186 bp, Homosapiens
ctgaaacccaatcctctgcagcagcgccggctcagcaccgccggctcagcaccgctccgcagcccctgcctgccacggtcagctacgtcccacctggtctgctgcggagtccccagcccagtgcctagcccagtggagccaccgcctgttcctcgggaaggaacagtgggacctgaccggccagatcacctcctccaatcctgccaggctagtgcctccctgccttccaaccttggctgtctcccaccctctcttctcctctccttgcctggcctcctgaatcctatcttagcctccttagccccctgactgactctctctcgcttcttccaagcctctgtagctggttccgctcctgggttctggccatgaagcccacctcaggcccagaggaggcccggcggccagcctcggacatccgcgtgttcgccagcaactgctcgatgcacgggctgggccacgtcttcgggccaggcagcctgagcctgcgccgggggatgtgggcagcggccgtggtcctgtcagtggccaccttcctctaccaggtggctgagagggtgcgctactacagggagttccaccaccagactgccctggatgagcgagaaagccaccggctcatcttcccggctgtcaccctgtgcaacatcaacccactgcgccgctcgcgcctaacgcccaacgacctgcactgggctgggtctgcgctgctgggcctggatcccgcagagcacgccgccttcctgcgcgccctgggccggccccctgcaccgcccggcttcatgcccagtcccacctttgacatggcgcaactctatgcccgtgctgggcactccctggatgacatgctgctggactgtcgcttccgtggccaaccttgtgggcctgagaacttcaccacgatcttcacccggatgggaaagtgctacacatttaactctggcgctgatggggcagagctgctcaccactactaggggtggcatgggcaatgggctggacatcatgctggacgtgcagcaggaggaatatctacctgtgtggagggacaatgaggagaccccgtttgaggtggggatccgagtgcagatccacagccaggaggaccccgccctgacatcctggacatgcctagcctgcacgtagcttttccgtcttcaccccaaataaagtcctaatgcatcagc

SEQ ID NO: 2720 - protein, 258 aa, Homosapiens
MKPTSGPEEARRPASDIRVFASNCSMHGLGHVFGPGSLSLRRGMWAAAVVLSVATFLYQVAERVRYYREFHHQTALDERESHRLIFPAVTLCNINPLRRSRLTPNDLHWAGSALLGLDPAEHAAFLRALGRPPAPPGFMPSPTFDMAQLYARAGHSLDDMLLDCRFRGQPCGPENFTTIFTRMGKCYTFNSGADGAELLTTTRGGMGNGLDIMLDVQQEEYLPVWRDNEETPFEVGIRVQIHSQEDPALTSWTCLACT

SEQ ID NO: 2721 - DNA, 2068 bp, Homosapiens
ctgaaacccaatcctctgcagcagcgccggctcagcaccgccggctcagcaccgctccgcagcccctgcctgccacggtcagctacgtcccacctggtctgctgcggagtccccagcccagtgcctagcccagtggagccaccgcctgttcctcgggaaggaacagtgggacctgaccggccagatcacctcctccaatcctgccaggctagtgcctccctgccttccaaccttggctgtctcccaccctctcttctcctctccttgcctggcctcctgaatcctatcttagcctccttagccccctgactgactctctctcgcttcttccaagcctctgtagctggttccgctcctgggttctggccatgaagcccacctcaggcccagaggaggcccggcggccagcctcggacatccgcgtgttcgccagcaactgctcgatgcacgggctgggccacgtcttcgggccaggcagcctgagcctgcgccgggggatgtgggcagcggccgtggtcctgtcagtggccaccttcctctaccaggtggctgagagggtgcgctactacagggagttccaccaccagactgccctggatgagcgagaaagccaccggctcatcttcccggctgtcaccctgtgcaacatcaacccactgcgccgctcgcgcctaacgcccaacgacctgcactgggctgggtctgcgctgctgggcctggatcccgcagagcacgccgccttcctgcgcgccctgggccggccccctgcaccgcccggcttcatgcccagtcccacctttgacatggcgcaactctatgcccgtgctgggcactccctggatgacatgctgctggactgtcgcttccgtggccaaccttgtgggcctgagaacttcaccacgatcttcacccggatgggaaagtgctacacatttaactctggcgctgatggggcagagctgctcaccactactaggggtggcatgggcaatgggctggacatcatgctggacgtgcagcaggaggaatatctacctgtgtggagggacaatgaggagaccccgtttgaggtggggatccgagtgcagatccacagccaggaggagccgcccatcatcgatcagctgggcttgggggtgtccccgggctaccagacctttgtttcttgccagcagcagcagctgagcttcctgccaccgccctggggcgattgcagttcagcatctctgaaccccaactatgagccagagccctctgatcccctaggctcccccagccccagccccagccctccctatacccttatggggtgtcgcctggcctgcgaaacccgctacgtggctcggaagtgcggctgccgaatggtgtacatgccaggcgacgtgccagtgtgcagcccccagcagtacaagaactgtgcccacccggccatagatgccatgcttcgcaaggactcgtgcgcctgccccaacccgtgcgccagcacgcgctacgccaaggagctctccatggtgcggatcccgagccgcgccgccgcgcgcttcctggcccggaagctcaaccgcagcgaggcctacatcgcggagaacgtgctggccctggacatcttctttgaggccctcaactatgagaccgtggagcagaagaaggcctatgagatgtcagagctgcttggtgacattgggggccagatggggctgttcatcggggccagcctgctcaccatcctcgagatcctagactacctctgtgaggtgttccgagacaaggtcctgggatatttctggaaccgacagcactcccaaaggcactccagcaccaatctgcttcaggaagggctgggcagccatcgaacccaagttccccacctcagcctgggccccagacctcccacccctccctgtgccgtcaccaagactctctccgcctcccaccgcacctgctaccttgtcacacagctctagacctgctgtctgtgtcctcggagccccgccctgacatcctggacatgcctagcctgcacgtagcttttccgtcttcaccccaaataaagtcctaatgcatcagc

SEQ ID NO: 2722 - protein, 531 aa, Homosapiens; identical to SEQ ID NO: 324

SEQ ID NO: 2723 - DNA, 502 bp, Homosapiens
cggaagtgcggctgccgaatggtgtacatgccaggcgacgtgccagtgtgcagcccccagcagtacaagaactgtgcccacccggccatagggagaacgtgctggccctggacatcttctttgaggccctcaactatgagaccgtggagcagaagaaggcctatgagatgtcagagctgcttggtgacattgggggccagatggggctgttcatcggggccagcctgctcaccatcctcgagatcctagactacctctgtgaggtgttccgagacaaggtcctgggatatttctggaaccgacagcactcccaaaggcactccagcaccaatctgcttcaggaagggctgggcagccatcgaacccaagttccccacctcagcctgggccccagctctagacctgctgtctgtgtcctcggagccccgccctgacatcctggacatgcctagcctgcacgtagcttttccgtcttcaccccaaataaagtcctaatgcatca

SEQ ID NO: 2724 - protein, 88 aa, Homosapiens
MSELLGDIGGQMGLFIGASLLTILEILDYLCEVFRDKVLGYFWNRQHSQRHSSTNLLQEGLGSHRTQVPHLSLGPSSRPAVCVLGAPP

SEQ ID NO: 2725 - DNA, 520 bp, Homosapiens
tgcgccagcacgcgctacgccaaggagctctccatggtgcggatcccgagccgcgccgccgcgcgcttcctggcccggaagctcaaccgcagcgaggcctacatcgcggagaacgtgctggccctggacatcttctttgaggccctcaactatgagaccgtggagcagaagaaggcctatgagatgtcagagctgcttggtgacattgggggccagatggggctgttcatcggggccagcctgctcaccatcctcgagatcctagactacctctgtgaggtgttccgagacaaggtcctgggatatttctggaaccgacagcactcccaaaggcactccagcaccaatctgcttcaggaagggctgggcagccatcgaacccaagttccccacctcagcctgggccccagctctagacctgctgtctgtgtcctcggagccccgccctgacatcctggacatgcctagcctgcacgtagcttttccgtcttcaccccaaataaagtcctaatgcatcagc

SEQ ID NO: 2726 - protein, 138 aa, Homosapiens
MVRIPSRAAARFLARKLNRSEAYIAENVLALDIFFEALNYETVEQKKAYEMSELLGDIGGQMGLFIGASLLTILEILDYLCEVFRDKVLGYFWNRQHSQRHSSTNLLQEGLGSHRTQVPHLSLGPSSRPAVCVLGAPP

SEQ ID NO: 2727 - DNA, 822 bp, Homosapiens
aaggagctctccatggtgcggatcccgagccgcgccgccgcgcgcttcctggcccggaagctcaaccgcagcgaggcctacatcgcggagaacgtgctggccctggacatcttctttgaggccctcaactatgagaccgtggagcagaagaaggcctatgagatgtcagagctgcttggtgacattgggggccagatggggctgttcatcggggccagcctgctcaccatcctcgagatcctagactacctctgtgaggtgttccgagacaaggtcctgggatatttctggaaccgacagcactcccaaaggcactccagcaccaatctggtaacagcccctcttctggagcccttgcctgctccaagggtgctagggcccacccctgaagcctagaccaccatcccgccccagctgaggagaaacaggcaggagggtgtgcagtgacctcgactggtccctgggaggaggaccactccccacctctgaccctctcgtcctcacacagcttcaggaagggctgggcagccatcgaacccaagttccccacctcagcctgggccccaggtaacacataatggccccctaaaatcaagggagggcaggggcaggctcaggacagtgggtgtgcccgttcccaccccagcactctgctctgttccgaagacctcccacccctccctgtgccgtcaccaagactctctccgcctcccaccgcacctgctaccttgtcacacagctctagacctgctgtctgtgtcctcggagccccgccctgacatcctggacatgcctagcctgcacgtagcttttccgtcttca

SEQ ID NO: 2728 - protein, 127 aa, Homosapiens
MVRIPSRAAARFLARKLNRSEAYIAENVLALDIFFEALNYETVEQKKAYEMSELLGDIGGQMGLFIGASLLTILEILDYLCEVFRDKVLGYFWNRQHSQRHSSTNLVTAPLLEPLPAPRVLGPTPEA

SEQ ID NO: 2729 - DNA, 1141 bp, Homosapiens
cctctgcaacgccggggccagagtcttaaaaccgagggcccgcaggggtccccgcggccgccgcgatgcagaaatacgagaaactggaaaagattggggaaggcacctacggaactgtgttcaaggccaaaaaccgggagactcatgagatcgtggctctgaaacgggtgaggctggatgacgatgatgagggtgtgccgagttccgccctccgggagatctgcctactcaaggagctgaagcacaagaacatcgtcaggcttcatgacgtcctgcacagcgacaagaagctgactttggtttttgaattctgtgaccaggacctgaagaagtattttgacagttgcaatggtgacctcgatcctgagattgtaaagtcattcctcttccagctactaaaagggctgggattctgtcatagccgcaatgtgctacacagggacctgaagccccagaacctgctaataaacaggaatggggagctgaaattggctgattttggcctggctcgagcctttgggattcccgtccgctgttactcagctgaggtggtcacactgtggtaccgcccaccggatgtcctctttggggccaagctgtactccacgtccatcgacatgtggtcagccggctgcatctttgcagagctggccaatgctgggcggcctctttttcccggcaatgatgtcgatgaccagttgaagaggatcttccgattgctggggacgcccaccgaggagcagtggccctctatgaccaagctgccagactataagccctatccgatgtacccggccacaacatccctggtgaacgtcgtgcccaaactcaatgccacagggagggatctgctgcagaaccttctgaagtgtaaccctgtccagcgtatctcagcagaagaggccctgcagcacccctacttctccgacttctgtccgccctaggccccgggacccccggcctccaggctggggcctggcctatttaagccccctcttgagaggggtgagacagtgggggtgcctggtgcgctgtgctccagcagtgctgggcccagccggggtggggtgcctgagcccgaatttctcactccctttgtggactttatttaatttcataaattggctcctttcccacagtc

SEQ ID NO: 2730 - protein, 292 aa, Homosapiens; identical to SEQ ID NO: 330

SEQ ID NO: 2731 - DNA, 4109 bp, Homosapiens
ggcctgcccgcggcgcgggggaaagttgagttgggagaagttgggagcggcgggggcgcgccccggggtgggcacggggcagtcgtcgggagcgcgcgagtgcgccggaggacggggagagaccccgagacccccggggcacgaagtccagagcgagcgggttatgcctccgcctcgttgccctgaaagccgcagcgacagcgaaaagggctaagattcggccatgagcagcgcccctcggcgccccgccaagggcgcagattctttctgtacgccagagccagagagcttgggccctgggacgcctgggttccccgagcaggaggaagacgaacttcaccgcaccctgggcgtggagcggtttgaggagatcctacaggaggccgggtctcgtggaggggaggagccaggccgcagctatggggaggaagactttgagtaccaccgccagtcctcccaccacatccatcacccactgtccacccacctgcctccggatgcacgccgccgcaagacaccccagggcccaggacggaagcctcgaaggcgcccgggagcctccccgactggagaaaccccgaccattgaggagggggaggaagatgaggatgaggccagcgaggctgagggggcccgggctctcactcagccgtcccctgtctccacaccctcctcggtgcagttctttctccaagaggatgacagtgctgaccggaaggcagagaggaccagtccatcttcccctgcaccactgccccaccaggaggcgactcctcgggcctccaaaggggcccaggctggaacccaggtggaggaggcggaggcggaggcggtggcggtggccagtggcactgcagggggtgacgacgggggtgcctcggggcgccccctgcccaaagcccagcctgggcaccgcagctacaaccttcaggagaggaggcgcatcgggagcatgactggggctgagcaggcactgctgccccgggtccccacggatgagattgaggcccagacgctggccacggccgacctagacctcatgaagagtcaccggtttgaggacgttcctggggtgcggcggcacttggtgcggaagaatgccaaaggttccacacagagtggccgagaagggcgggagcctggccccacacctcgggcccgaccccgggccccccacaagccccatgaggtgtttgtggagctgaatgagttgctcctggacaaaaaccaggagccccagtggcgggagacagctcgctggatcaaatttgaagaggacgtggaggaggagactgagcgctgggggaagccccacgtggcctccctctccttccgcagtctcctggagctccgcaggaccctggcccatggggctgtgctcttggatctggaccagcagaccctgcccggagtggcccaccaggtggtggagcagatggtcatctctgaccagatcaaggccgaggacagggccaacgtgctgcgggctctgctgttgaaacacagccacccaagtgatgagaaggacttctccttcccccgcaacatctcagctggctccctgggctccctgctggggcatcaccatggtcagggggctgagagtgacccccacgtcaccgagcctctcatgggaggtgttcctgagacccggctggaggtggagcgagagcgtgagctgccgcctccagcaccaccagctggcatcacccgctccaagtccaagcacgagctgaaactgctggagaagattcctgagaatgccgaggccacggtggtccttgtgggctgcgtggagttcctctcccgccccaccatggcctttgtgcggctccgggaggctgtggagttggacgcagtgttggaggtgccggtgcctgtgcgtttcctcttcctgctgctgggcccgagtagtgccaacatggactaccacgagatcggccgctccatctccaccctcatgtcagacaagcaattccacgaggcagcctacctggctgacgagcgggaggacctgctgacggccatcaacgccttcctggactgcagcgtggtgctgccgccttcagaagtgcagggcgaggagctgctgcgctctgtggcccacttccagcgccagatgctcaagaagcgagaggagcagggccggctgctacctacaggggctgggctggagcccaaatctgcccaagataaggcgctcctgcagatggtagaggcggcaggggcagctgaagatgatccccttcggcggacggggcggccctttggggggctgatccgagatgtgcggcgccgctatccccactacctgagtgacttccgagatgcacttgaccctcagtgcctggccgcagtcatcttcatctactttgccgccctgtctcctgccatcacctttggggggctgctgggagagaagacgcaggacctgataggggtgtcggagctgattatgtccacagcgctccagggcgtggtcttctgcctgctgggtgcccagcccctgttggtgatcggcttctcagggcccctgctggtctttgaggaggccttcttctcgttctgtagcagcaaccacctggagtacctggtgggccgtgtgtggatcggcttctggctggtgttcctggccctgctcatggtggccctggaggggagcttcctggtccgcttcgtctcccgcttcacccaggagatcttcgccttcttgatctcactcatcttcatctatgagaccttctacaagctggtgaagatcttccaggagcaccccctgcatggctgctcagcctccaacagctcagaggtggacggcggtgagaacatgacatgggccggggcaagacccacgctggggccgggcaacaggagcttggctgggcagtctgggcaggggaagccccggggccagcccaacacggccctgctgtcgctggtgctcatggccggcaccttcttcatcgccttcttcctgcgcaaattcaagaacagccggttctttcctggccggatccggcgggtgattggggactttggggtgcccatcgccatcctcatcatggtgcttgtggattacagtattgaggacacctatacccagaagctgagcgttcccagtggattctcggtgactgccccagaaaagaggggctgggtcatcaaccccctgggagagaagagccccttccctgtgtggatgatggttgccagcctgctgcccgccatcctggtcttcattctcatcttcatggagacacagatcaccacgctcatcatctccaagaaggagcgcatgctgcagaagggctccggcttccacctggacctgctgctcatcgtggccatgggcggcatctgtgccctctttggcctgccctggttggctgctgccactgtccgctctgtcactcacgccaacgcgctcactgtcatgagcaaggctgtggcacctggggacaagcccaagattcaggaagtcaaggagcagcgggtgacggggctgctggttgccctgcttgtgggcctctccatagttatcggggatctgctccggcagatccccctggccgtgctctttggaattttcctgtacatgggagtcacctcccttaacgggatccagttctatgagcggctgcatctgctgctcatgccgcccaaacaccacccagatgtcacttacgtcaagaaggtccggaccctccgtatgcacctgttcacggccctgcagctgctctgcctggccctgctctgggccgtcatgtccacagctgcctccctggccttccccttcatcctcatcctcacagtgccgctccgcatggtggtgctcacccgtatcttcaccgaccgagagatgaaatgtctggatgctaacgaggcagagccggtgtttgatgagcgggagggtgtggacgagtacaatgagatgcccatgcctgtgtagccgccaccgagggacagccgagggaccgatggacgaggggacaggctggtgggatggggttccccctcccatgcccctccctcctttttatttaagtgaataatttaaagtcttctcctcccccactgcccctgcagtaaagtgctttggcccccaccta

SEQ ID NO: 2732 - protein, 1241 aa, Homosapiens
MSSAPRRPAKGADSFCTPEPESLGPGTPGFPEQEEDELHRTLGVERFEEILQEAGSRGGEEPGRSYGEEDFEYHRQSSHHIHHPLSTHLPPDARRRKTPQGPGRKPRRRPGASPTGETPTIEEGEEDEDEASEAEGARALTQPSPVSTPSSVQFFLQEDDSADRKAERTSPSSPAPLPHQEATPRASKGAQAGTQVEEAEAEAVAVASGTAGGDDGGASGRPLPKAQPGHRSYNLQERRRIGSMTGAEQALLPRVPTDEIEAQTLATADLDLMKSHRFEDVPGVRRHLVRKNAKGSTQSGREGREPGPTPRARPRAPHKPHEVFVELNELLLDKNQEPQWRETARWIKFEEDVEEETERWGKPHVASLSFRSLLELRRTLAHGAVLLDLDQQTLPGVAHQVVEQMVISDQIKAEDRANVLRALLLKHSHPSDEKDFSFPRNISAGSLGSLLGHHHGQGAESDPHVTEPLMGGVPETRLEVERERELPPPAPPAGITRSKSKHELKLLEKIPENAEATVVLVGCVEFLSRPTMAFVRLREAVELDAVLEVPVPVRFLFLLLGPSSANMDYHEIGRSISTLMSDKQFHEAAYLADEREDLLTAINAFLDCSVVLPPSEVQGEELLRSVAHFQRQMLKKREEQGRLLPTGAGLEPKSAQDKALLQMVEAAGAAEDDPLRRTGRPFGGLIRDVRRRYPHYLSDFRDALDPQCLAAVIFIYFAALSPAITFGGLLGEKTQDLIGVSELIMSTALQGVVFCLLGAQPLLVIGFSGPLLVFEEAFFSFCSSNHLEYLVGRVWIGFWLVFLALLMVALEGSFLVRFVSRFTQEIFAFLISLIFIYETFYKLVKIFQEHPLHGCSASNSSEVDGGENMTWAGARPTLGPGNRSLAGQSGQGKPRGQPNTALLSLVLMAGTFFIAFFLRKFKNSRFFPGRIRRVIGDFGVPIAILIMVLVDYSIEDTYTQKLSVPSGFSVTAPEKRGWVINPLGEKSPFPVWMMVASLLPAILVFILIFMETQITTLIISKKERMLQKGSGFHLDLLLIVAMGGICALFGLPWLAAATVRSVTHANALTVMSKAVAPGDKPKIQEVKEQRVTGLLVALLVGLSIVIGDLLRQIPLAVLFGIFLYMGVTSLNGIQFYERLHLLLMPPKHHPDVTYVKKVRTLRMHLFTALQLLCLALLWAVMSTAASLAFPFILILTVPLRMVVLTRIFTDREMKCLDANEAEPVFDEREGVDEYNEMPMPV

SEQ ID NO: 2733 - DNA, 3776 bp, Homosapiens
ggggtgggcacggggcagtcgtcgggagcgcgcgagtgcgccggaggacggggagagaccccgagacccccggggcacgaagtccagagcgagcgggttatgcctccgcctcgttgccctgaaagccgcagcgacagcgaaaagggctaagattcggccatgagcagcgcccctcggcgccccgccaagggcgcagattctttctgtacgccagagccagagagcttgggccctgggacgcctgggttccccgagcaggaggaagacgaacttcaccgcaccctgggcgtggagcggtttgaggagatcctacaggaggccgggtctcgtggaggggaggagccaggccgcagctatggggaggaagactttgagtaccaccgccagtcctcccaccacatccatcacccactcaccactgccccaccaggaggcgactcctcgggcctccaaaggggcccaggctggaacccaggtggaggaggcggaggcggaggcggtggcggtggccagtggcactgcagggggtgacgacgggggtgcctcggggcgccccctgcccaaagcccagcctgggcaccgcagctacaaccttcaggagaggaggcgcatcgggagcatgactggggctgagcaggcactgctgccccgggtccccacggatgagattgaggcccagacgctggccacggccgacctagacctcatgaagagtcaccggtttgaggacgttcctggggtgcggcggcacttggtgcggaagaatgccaaaggttccacacagagtggccgagaagggcgggagcctggccccacacctcgggcccgaccccgggccccccacaagccccatgaggtgtttgtggagctgaatgagttgctcctggacaaaaaccaggagccccagtggcgggagacagctcgctggatcaaatttgaagaggacgtggaggaggagactgagcgctgggggaagccccacgtggcctccctctccttccgcagtctcctggagctccgcaggaccctggcccatggggctgtgctcttggatctggaccagcagaccctgcccggagtggcccaccaggtggtggagcagatggtcatctctgaccagatcaaggccgaggacagggccaacgtgctgcgggctctgctgttgaaacacagccacccaagtgatgagaaggacttctccttcccccgcaacatctcagctggctccctgggctccctgctggggcatcaccatggtcagggggctgagagtgacccccacgtcaccgagcctctcatgggaggtgttcctgagacccggctggaggtggagcgagagcgtgagctgccgcctccagcaccaccagctggcatcacccgctccaagtccaagcacgagctgaaactgctggagaagattcctgagaatgccgaggccacggtggtccttgtgggctgcgtggagttcctctcccgccccaccatggcctttgtgcggctccgggaggctgtggagttggacgcagtgttggaggtgccggtgcctgtgcgtttcctcttcctgctgctgggcccgagtagtgccaacatggactaccacgagatcggccgctccatctccaccctcatgtcagacaagcaattccacgaggcagcctacctggctgacgagcgggaggacctgctgacggccatcaacgccttcctggactgcagcgtggtgctgccgccttcagaagtgcagggcgaggagctgctgcgctctgtggcccacttccagcgccagatgctcaagaagcgagaggagcagggccggctgctacctacaggggctgggctggagcccaaatctgcccaagataaggcgctcctgcagatggtagaggcggcaggggcagctgaagatgatccccttcggcggacggggcggccctttggggggctgatccgagatgtgcggcgccgctatccccactacctgagtgacttccgagatgcacttgaccctcagtgcctggccgcagtcatcttcatctactttgccgccctgtctcctgccatcacctttggggggctgctgggagagaagacgcaggacctgataggggtgtcggagctgattatgtccacagcgctccagggcgtggtcttctgcctgctgggtgcccagcccctgttggtgatcggcttctcagggcccctgctggtctttgaggaggccttcttctcgttctgtagcagcaaccacctggagtacctggtgggccgtgtgtggatcggcttctggctggtgttcctggccctgctcatggtggccctggaggggagcttcctggtccgcttcgtctcccgcttcacccaggagatcttcgccttcttgatctcactcatcttcatctatgagaccttctacaagctggtgaagatcttccaggagcaccccctgcatggctgctcagcctccaacagctcagaggtggacggcggtgagaacatgacatgggccggggcaagacccacgctggggccgggcaacaggagcttggctgggcagtctgggcaggggaagccccggggccagcccaacacggccctgctgtcgctggtgctcatggccggcaccttcttcatcgccttcttcctgcgcaaattcaagaacagccggttctttcctggccggatccggcgggtgattggggactttggggtgcccatcgccatcctcatcatggtgcttgtggattacagtattgaggacacctatacccagaagctgagcgttcccagtggattctcggtgactgccccagaaaagaggggctgggtcatcaaccccctgggagagaagagccccttccctgtgtggatgatggttgccagcctgctgcccgccatcctggtcttcattctcatcttcatggagacacagatcaccacgctcatcatctccaagaaggagcgcatgctgcagaagggctccggcttccacctggacctgctgctcatcgtggccatgggcggcatctgtgccctctttggcctgccctggttggctgctgccactgtccgctctgtcactcacgccaacgcgctcactgtcatgagcaaggctgtggcacctggggacaagcccaagattcaggaagtcaaggagcagcgggtgacggggctgctggttgccctgcttgtgggcctctccatagttatcggggatctgctccggcagatccccctggccgtgctctttggaattttcctgtacatgggagtcacctcccttaacgggatccagttctatgagcggctgcatctgctgctcatgccgcccaaacaccacccagatgtcacttacgtcaagaaggtccggaccctccgtatgcacctgttcacggccctgcagctgctctgcctggccctgctctgggccgtcatgtccacagctgcctccctggccttccccttcatcctcatcctcacagtgccgctccgcatggtggtgctcacccgtatcttcaccgaccgagagatgaaatgtctggatgctaacgaggcagagccggtgtttgatgagcgggagggtgtggacgagtacaatgagatgcccatgcctgtgtagccgccaccgagggacagccgagggaccgatggacgaggggacaggctggtgggatggggttccccctcccatgcccctccctcctttttatttaagtgaataatttaaagtcttctcctcccccactgcccctgcagtaaagtgctttggcccccaccta

SEQ ID NO: 2734 - protein, 1086 aa, Homosapiens
MGRKTLSTTASPPTTSITHSPLPHQEATPRASKGAQAGTQVEEAEAEAVAVASGTAGGDDGGASGRPLPKAQPGHRSYNLQERRRIGSMTGAEQALLPRVPTDEIEAQTLATADLDLMKSHRFEDVPGVRRHLVRKNAKGSTQSGREGREPGPTPRARPRAPHKPHEVFVELNELLLDKNQEPQWRETARWIKFEEDVEEETERWGKPHVASLSFRSLLELRRTLAHGAVLLDLDQQTLPGVAHQVVEQMVISDQIKAEDRANVLRALLLKHSHPSDEKDFSFPRNISAGSLGSLLGHHHGQGAESDPHVTEPLMGGVPETRLEVERERELPPPAPPAGITRSKSKHELKLLEKIPENAEATVVLVGCVEFLSRPTMAFVRLREAVELDAVLEVPVPVRFLFLLLGPSSANMDYHEIGRSISTLMSDKQFHEAAYLADEREDLLTAINAFLDCSVVLPPSEVQGEELLRSVAHFQRQMLKKREEQGRLLPTGAGLEPKSAQDKALLQMVEAAGAAEDDPLRRTGRPFGGLIRDVRRRYPHYLSDFRDALDPQCLAAVIFIYFAALSPAITFGGLLGEKTQDLIGVSELIMSTALQGVVFCLLGAQPLLVIGFSGPLLVFEEAFFSFCSSNHLEYLVGRVWIGFWLVFLALLMVALEGSFLVRFVSRFTQEIFAFLISLIFIYETFYKLVKIFQEHPLHGCSASNSSEVDGGENMTWAGARPTLGPGNRSLAGQSGQGKPRGQPNTALLSLVLMAGTFFIAFFLRKFKNSRFFPGRIRRVIGDFGVPIAILIMVLVDYSIEDTYTQKLSVPSGFSVTAPEKRGWVINPLGEKSPFPVWMMVASLLPAILVFILIFMETQITTLIISKKERMLQKGSGFHLDLLLIVAMGGICALFGLPWLAAATVRSVTHANALTVMSKAVAPGDKPKIQEVKEQRVTGLLVALLVGLSIVIGDLLRQIPLAVLFGIFLYMGVTSLNGIQFYERLHLLLMPPKHHPDVTYVKKVRTLRMHLFTALQLLCLALLWAVMSTAASLAFPFILILTVPLRMVVLTRIFTDREMKCLDANEAEPVFDEREGVDEYNEMPMPV

SEQ ID NO: 2735 - DNA, 3975 bp, Homosapiens
gccttcctctctctcagtgagtgagtggagttgagctcctgccctccacccagccagcctgcttccctcctgccggtccccaaggacctgggggagggaagcctcctgccggcctgtactggggagggggcaccccctccctgcaggggcatcttgggctctctccagagttcttccattcgtctgcttcctgtctcggcagcccggccccggctccacggggtgtctcaccctccccaccacaccctctctggtctcaggcccacctctggttatgcctccgcctcgttgccctgaaagccgcagcgacagcgaaaagggctaagattcggccatgagcagcgcccctcggcgccccgccaagggcgcagattctttctacaccccagggcccaggacggaagcctcgaaggcgcccgggagcctccccgactggagaaaccccgaccattgaggagggggaggaagatgaggatgaggccagcgaggctgagggggcccgggctctcactcagccgtcccctgtctccacaccctcctcggtgcagttctttctccaagaggatgacagtgctgaccggaaggcagagaggaccagtccatcttcccctgcaccactgccccaccaggaggcgactcctcgggcctccaaaggggcccaggctggaacccaggtggaggaggcggaggcggaggcggtggcggtggccagtggcactgcagggggtgacgacgggggtgcctcggggcgccccctgcccaaagcccagcctgggcaccgcagctacaaccttcaggagaggaggcgcatcgggagcatgactggggctgagcaggcactgctgccccgggtccccacggatgagattgaggcccagacgctggccacggccgacctagacctcatgaagagtcaccggtttgaggacgttcctggggtgcggcggcacttggtgcggaagaatgccaaaggttccacacagagtggccgagaagggcgggagcctggccccacacctcgggcccgaccccgggccccccacaagccccatgaggtgtttgtggagctgaatgagttgctcctggacaaaaaccaggagccccagtggcgggagacagctcgctggatcaaatttgaagaggacgtggaggaggagactgagcgctgggggaagccccacgtggcctccctctccttccgcagtctcctggagctccgcaggaccctggcccatggggctgtgctcttggatctggaccagcagaccctgcccggagtggcccaccaggtggtggagcagatggtcatctctgaccagatcaaggccgaggacagggccaacgtgctgcgggctctgctgttgaaacacagccacccaagtgatgagaaggacttctccttcccccgcaacatctcagctggctccctgggctccctgctggggcatcaccatggtcagggggctgagagtgacccccacgtcaccgagcctctcatgggaggtgttcctgagacccggctggaggtggagcgagagcgtgagctgccgcctccagcaccaccagctggcatcacccgctccaagtccaagcacgagctgaaactgctggagaagattcctgagaatgccgaggccacggtggtccttgtgggctgcgtggagttcctctcccgccccaccatggcctttgtgcggctccgggaggctgtggagttggacgcagtgttggaggtgccggtgcctgtgcgtttcctcttcctgctgctgggcccgagtagtgccaacatggactaccacgagatcggccgctccatctccaccctcatgtcagacaagcaattccacgaggcagcctacctggctgacgagcgggaggacctgctgacggccatcaacgccttcctggactgcagcgtggtgctgccgccttcagaagtgcagggcgaggagctgctgcgctctgtggcccacttccagcgccagatgctcaagaagcgagaggagcagggccggctgctacctacaggggctgggctggagcccaaatctgcccaagataaggcgctcctgcagatggtagaggcggcaggggcagctgaagatgatccccttcggcggacggggcggccctttggggggctgatccgagatgtgcggcgccgctatccccactacctgagtgacttccgagatgcacttgaccctcagtgcctggccgcagtcatcttcatctactttgccgccctgtctcctgccatcacctttggggggctgctgggagagaagacgcaggacctgataggggtgtcggagctgattatgtccacagcgctccagggcgtggtcttctgcctgctgggtgcccagcccctgttggtgatcggcttctcagggcccctgctggtctttgaggaggccttcttctcgttctgtagcagcaaccacctggagtacctggtgggccgtgtgtggatcggcttctggctggtgttcctggccctgctcatggtggccctggaggggagcttcctggtccgcttcgtctcccgcttcacccaggagatcttcgccttcttgatctcactcatcttcatctatgagaccttctacaagctggtgaagatcttccaggagcaccccctgcatggctgctcagcctccaacagctcagaggtggacggcggtgagaacatgacatgggccggggcaagacccacgctggggccgggcaacaggagcttggctgggcagtctgggcaggggaagccccggggccagcccaacacggccctgctgtcgctggtgctcatggccggcaccttcttcatcgccttcttcctgcgcaaattcaagaacagccggttctttcctggccggatccggcgggtgattggggactttggggtgcccatcgccatcctcatcatggtgcttgtggattacagtattgaggacacctatacccagaagctgagcgttcccagtggattctcggtgactgccccagaaaagaggggctgggtcatcaaccccctgggagagaagagccccttccctgtgtggatgatggttgccagcctgctgcccgccatcctggtcttcattctcatcttcatggagacacagatcaccacgctcatcatctccaagaaggagcgcatgctgcagaagggctccggcttccacctggacctgctgctcatcgtggccatgggcggcatctgtgccctctttggcctgccctggttggctgctgccactgtccgctctgtcactcacgccaacgcgctcactgtcatgagcaaggctgtggcacctggggacaagcccaagattcaggaagtcaaggagcagcgggtgacggggctgctggttgccctgcttgtgggcctctccatagttatcggggatctgctccggcagatccccctggccgtgctctttggaattttcctgtacatgggagtcacctcccttaacgggatccagttctatgagcggctgcatctgctgctcatgccgcccaaacaccacccagatgtcacttacgtcaagaaggtccggaccctccgtatgcacctgttcacggccctgcagctgctctgcctggccctgctctgggccgtcatgtccacagctgcctccctggccttccccttcatcctcatcctcacagtgccgctccgcatggtggtgctcacccgtatcttcaccgaccgagagatgaaatgtctggatgctaacgaggcagagccggtgtttgatgagcgggagggtgtggacgagtacaatgagatgcccatgcctgtgtagccgccaccgagggacagccgagggaccgatggacgaggggacaggctggtgggatggggttccccctcccatgcccctccctcctttttatttaagtgaataatttaaagtcttctcctcccccactgcccctgcagtaaagtgctttggcccccaccta

SEQ ID NO: 2736 - protein, 998 aa, Homosapiens [sequence omitted]

SEQ ID NO: 2737 - DNA, 4384 bp, Homosapiens
tggacttcctcctgcggcctcaggtgcgaggggtctgcgaccctctctccccatggcggcaagctccctgcgcctctccccgtcccctcgtcccacggggctgcttctggtgggagtggggctgggcgcttaggggagccaggagatggacaggagccttcctcacagaggggagaagccagccccctggcccgctcaccttctcttatccggtgttctgccagtcccagctgctccagtccccacctcgcccctaagacccgcccttcaccccagccctccccgcgctcttccttgttctggctgctggcaccgctatggagggggctgcatacccccgcccttggagatcccgatgcccttcaggtccagaagctcttgagcaaatatttggcggcgcctggagctgagaccgtgggtgggtggggggctggaccaaggctgcctggccaggcggctgccgcttagctgggctgagctcttacaagcgccgcattccctgccggctgtgccggccggccgctgctccgcgcccgcaggatgactcagccagagccagagagcttgggccctgggacgcctgggttccccgagcaggaggaagacgaacttcaccgcaccctgggcgtggagcggtttgaggagatcctacaggaggccgggtctcgtggaggggaggagccaggccgcagctatggggaggaagactttgagtaccaccgccagtcctcccaccacatccatcacccactgtccacccacctgcctccggatgcacgccgccgcaagacaccccagggcccaggacggaagcctcgaaggcgcccgggagcctccccgactggagaaaccccgaccattgaggagggggaggaagatgaggatgaggccagcgaggctgagggggcccgggctctcactcagccgtcccctgtctccacaccctcctcggtgcagttctttctccaagaggatgacagtgctgaccggaaggcagagaggaccagtccatcttcccctgcaccactgccccaccaggaggcgactcctcgggcctccaaaggggcccaggctggaacccaggtggaggaggcggaggcggaggcggtggcggtggccagtggcactgcagggggtgacgacgggggtgcctcggggcgccccctgcccaaagcccagcctgggcaccgcagctacaaccttcaggagaggaggcgcatcgggagcatgactggggctgagcaggcactgctgccccgggtccccacggatgagattgaggcccagacgctggccacggccgacctagacctcatgaagagtcaccggtttgaggacgttcctggggtgcggcggcacttggtgcggaagaatgccaaaggttccacacagagtggccgagaagggcgggagcctggccccacacctcgggcccgaccccgggccccccacaagccccatgaggtgtttgtggagctgaatgagttgctcctggacaaaaaccaggagccccagtggcgggagacagctcgctggatcaaatttgaagaggacgtggaggaggagactgagcgctgggggaagccccacgtggcctccctctccttccgcagtctcctggagctccgcaggaccctggcccatggggctgtgctcttggatctggaccagcagaccctgcccggagtggcccaccaggtggtggagcagatggtcatctctgaccagatcaaggccgaggacagggccaacgtgctgcgggctctgctgttgaaacacagccacccaagtgatgagaaggacttctccttcccccgcaacatctcagctggctccctgggctccctgctggggcatcaccatggtcagggggctgagagtgacccccacgtcaccgagcctctcatgggaggtgttcctgagacccggctggaggtggagcgagagcgtgagctgccgcctccagcaccaccagctggcatcacccgctccaagtccaagcacgagctgaaactgctggagaagattcctgagaatgccgaggccacggtggtccttgtgggctgcgtggagttcctctcccgccccaccatggcctttgtgcggctccgggaggctgtggagttggacgcagtgttggaggtgccggtgcctgtgcgtttcctcttcctgctgctgggcccgagtagtgccaacatggactaccacgagatcggccgctccatctccaccctcatgtcagacaagcaattccacgaggcagcctacctggctgacgagcgggaggacctgctgacggccatcaacgccttcctggactgcagcgtggtgctgccgccttcagaagtgcagggcgaggagctgctgcgctctgtggcccacttccagcgccagatgctcaagaagcgagaggagcagggccggctgctacctacaggggctgggctggagcccaaatctgcccaagataaggcgctcctgcagatggtagaggcggcaggggcagctgaagatgatccccttcggcggacggggcggccctttggggggctgatccgagatgtgcggcgccgctatccccactacctgagtgacttccgagatgcacttgaccctcagtgcctggccgcagtcatcttcatctactttgccgccctgtctcctgccatcacctttggggggctgctgggagagaagacgcaggacctgataggggtgtcggagctgattatgtccacagcgctccagggcgtggtcttctgcctgctgggtgcccagcccctgttggtgatcggcttctcagggcccctgctggtctttgaggaggccttcttctcgttctgtagcagcaaccacctggagtacctggtgggccgtgtgtggatcggcttctggctggtgttcctggccctgctcatggtggccctggaggggagcttcctggtccgcttcgtctcccgcttcacccaggagatcttcgccttcttgatctcactcatcttcatctatgagaccttctacaagctggtgaagatcttccaggagcaccccctgcatggctgctcagcctccaacagctcagaggtggacggcggtgagaacatgacatgggccggggcaagacccacgctggggccgggcaacaggagcttggctgggcagtctgggcaggggaagccccggggccagcccaacacggccctgctgtcgctggtgctcatggccggcaccttcttcatcgccttcttcctgcgcaaattcaagaacagccggttctttcctggccggatccggcgggtgattggggactttggggtgcccatcgccatcctcatcatggtgcttgtggattacagtattgaggacacctatacccagaagctgagcgttcccagtggattctcggtgactgccccagaaaagaggggctgggtcatcaaccccctgggagagaagagccccttccctgtgtggatgatggttgccagcctgctgcccgccatcctggtcttcattctcatcttcatggagacacagatcaccacgctcatcatctccaagaaggagcgcatgctgcagaagggctccggcttccacctggacctgctgctcatcgtggccatgggcggcatctgtgccctctttggcctgccctggttggctgctgccactgtccgctctgtcactcacgccaacgcgctcactgtcatgagcaaggctgtggcacctggggacaagcccaagattcaggaagtcaaggagcagcgggtgacggggctgctggttgccctgcttgtgggcctctccatagttatcggggatctgctccggcagatccccctggccgtgctctttggaattttcctgtacatgggagtcacctcccttaacgggatccagttctatgagcggctgcatctgctgctcatgccgcccaaacaccacccagatgtcacttacgtcaagaaggtccggaccctccgtatgcacctgttcacggccctgcagctgctctgcctggccctgctctgggccgtcatgtccacagctgcctccctggccttccccttcatcctcatcctcacagtgccgctccgcatggtggtgctcacccgtatcttcaccgaccgagagatgaaatgtctggatgctaacgaggcagagccggtgtttgatgagcgggagggtgtggacgagtacaatgagatgcccatgcctgtgtagccgccaccgagggacagccgagggaccgatggacgaggggacaggctggtgggatggggttccccctcccatgcccctccctcctttttatttaagtgaataatttaaagtcttctcctcccccactgcccctgcagtaaagtgctttggcccccaccta

SEQ ID NO: 2738 - protein, 1227 aa, Homosapiens
MTQPEPESLGPGTPGFPEQEEDELHRTLGVERFEEILQEAGSRGGEEPGRSYGEEDFEYHRQSSHHIHHPLSTHLPPDARRRKTPQGPGRKPRRRPGASPTGETPTIEEGEEDEDEASEAEGARALTQPSPVSTPSSVQFFLQEDDSADRKAERTSPSSPAPLPHQEATPRASKGAQAGTQVEEAEAEAVAVASGTAGGDDGGASGRPLPKAQPGHRSYNLQERRRIGSMTGAEQALLPRVPTDEIEAQTLATADLDLMKSHRFEDVPGVRRHLVRKNAKGSTQSGREGREPGPTPRARPRAPHKPHEVFVELNELLLDKNQEPQWRETARWIKFEEDVEEETERWGKPHVASLSFRSLLELRRTLAHGAVLLDLDQQTLPGVAHQVVEQMVISDQIKAEDRANVLRALLLKHSHPSDEKDFSFPRNISAGSLGSLLGHHHGQGAESDPHVTEPLMGGVPETRLEVERERELPPPAPPAGITRSKSKHELKLLEKIPENAEATVVLVGCVEFLSRPTMAFVRLREAVELDAVLEVPVPVRFLFLLLGPSSANMDYHEIGRSISTLMSDKQFHEAAYLADEREDLLTAINAFLDCSVVLPPSEVQGEELLRSVAHFQRQMLKKREEQGRLLPTGAGLEPKSAQDKALLQMVEAAGAAEDDPLRRTGRPFGGLIRDVRRRYPHYLSDFRDALDPQCLAAVIFIYFAALSPAITFGGLLGEKTQDLIGVSELIMSTALQGVVFCLLGAQPLLVIGFSGPLLVFEEAFFSFCSSNHLEYLVGRVWIGFWLVFLALLMVALEGSFLVRFVSRFTQEIFAFLISLIFIYETFYKLVKIFQEHPLHGCSASNSSEVDGGENMTWAGARPTLGPGNRSLAGQSGQGKPRGQPNTALLSLVLMAGTFFIAFFLRKFKNSRFFPGRIRRVIGDFGVPIAILIMVLVDYSIEDTYTQKLSVPSGFSVTAPEKRGWVINPLGEKSPFPVWMMVASLLPAILVFILIFMETQITTLIISKKERMLQKGSGFHLDLLLIVAMGGICALFGLPWLAAATVRSVTHANALTVMSKAVAPGDKPKIQEVKEQRVTGLLVALLVGLSIVIGDLLRQIPLAVLFGIFLYMGVTSLNGIQFYERLHLLLMPPKHHPDVTYVKKVRTLRMHLFTALQLLCLALLWAVMSTAASLAFPFILILTVPLRMVVLTRIFTDREMKCLDANEAEPVFDEREGVDEYNEMPMPV

SEQ ID NO: 2739 - DNA, 719 bp, Homosapiens
gactggtctcaaactcctgggctcaagtgatttacccgcctcagcctcccaaaatgttgggaatacaggcatgagccactgtgcctggcttaaaattaaattaaaaaaaaaaaagtaaacgaagcagctgctgggcgcggtggctcatgcctataatcccagcaccttgggaggctgaggtgggtggattacgaggtcaggagattgagaccatcctggctaacaaggtgaaatcccatctctactaaaaatacaaaaaattagcggggcacggtggcaggtgcctgtagtcccagctacttgagaggctgaggcaggagaatggtgtgaacctgggaggtagagcttgcagtgagccaagatcatgccattgcgctccagcctgaacgacagagcgagactcttatcaccaaaaaaaaaaaaaaaaaaagcagctgaggacctagaaaccggcttttagaattgtttcccaactaggagtccataggccgtgagtgaggctcagggtctttgggtaaagggccgccgtggaagggctttctcactgggcgttgtggtctccagcctggctgctcaggggggggtcttcagatggctccagggtggccacacggacgaggctgcagaccagctgagttgtgtatcagggtagaactaggcccctagagtgacacagcacctggctcacttagaggagagttttctaacagccaagaggg

SEQ ID NO: 2740 - protein, 33 aa, Homosapiens
MPIIPAPWEAEVGGLRGQEIETILANKVKSHLY

SEQ ID NO: 2741 - DNA, 393 bp, Homosapiens
gattcaaattccgttacagagcaaaacctgggcccccagcccttatcgtccatgacagctcccagctagcactgccagggtggcctgcccctccacgtgctgttcctgtcccagcaaacatcggggtttttctgctgtctacagaataaaaccaagcggctagtataagtcaggaaggcagtggtgagtggcaccagccaggcccagagaggatccaggggcctaaaggaagaggacatgagcacagaggaccactgagtggcctgtcacacacatctgatgcccagactgactgtcacctctggagcctttcccctttctacactcctggattgtttgacattttaacaaaagcatgtacctttgttattaaaaaatgtgagttttaaaacc

SEQ ID NO: 2742 - protein, 79 aa, Homosapiens
NQAASISQEGSGEWHQPGPERIQGPKGRGHEHRGPLSGLSHTSDAQTDCHLWSLSPFYTPGLFDILTKACTFVIKKCEF

SEQ ID NO: 2743 - DNA, 709 bp, Homosapiens
ctggccgggtgcgtgggcttaaaggccaagagggggttaggggcaggaaggggggtggcaggaagtcagcggctgtggtggcaggactctgagcgctgtgcctgcccactcagatccggcgggtgattggggactttggggtgcccatcgccatcctcatcatggtgcttgtggattacagtattgaggacacctatacccagaagctgagcgttcccagtggattctcggtgactgccccagaaaagaggggctgggtcatcaaccccctgggagagaagagccccttccccttcatcctcatcctcacagtgccgctccgcatggtggtgctcacccgtatcttcaccgaccgagagatgaaatgtgtaagccctcccgtctgcctcccccggttcctcttgcctccctgtggatctggaaaggcccccccacttcccttcttgaccgccacctccccacacacagctggatgctaacgaggcagagccggtgtttgatgagcgggagggtgtggacgagtacaatgagatgcccatgcctgtgtagccgccaccgagggacagccgagggaccgatggacgaggggacaggctggtgggatggggttccccctcccatgcccctccctcctttttatttaagtgaataatttaaagtcttctcctcccccactgcccctgcagtaaagtgctttggcccccaccta

SEQ ID NO: 2744 - protein, 105 aa, Homosapiens
MVLVDYSIEDTYTQKLSVPSGFSVTAPEKRGWVINPLGEKSPFPFILILTVPLRMVVLTRIFTDREMKCVSPPVCLPRFLLPPCGSGKAPPLPFLTATSPHTAGC

SEQ ID NO: 2745 - DNA, 1677 bp, Homosapiens
gggagccacgtctccgaagaccgatagctgcttcgggattggcgtccgggcggctatctaggggctgctgggaagatggcggactcggtggctagccgatgaggaggccgcggggggaacccggcccccgggccccgagaccgactgagggagcgacctgcgcagggcccggggagtcatggtctccatcacccaactccatgcttcgagtcctgctctctgctcagacctcccctgctcggctgtctggcctgctgctgatccctccagtacagccctgctgtttggggcccagcaaatggggggaccggcctgttggaggaggccccagtgcaggtcctgtgcaaggactgcagcggcttctggaacaggcgaagagccctggggagctgctgcgctggctgggccagaaccccagcaaggtgcgcgcccaccactactcggtggcgcttcgtcgtctgggccagctcttggggtctcggccacggccccctcctgtggagcaggtcacactgcaggacttgagtcagctcatcatccgaaactgcccctcctttgacattcacaccatccacgtgtgtctgcaccttgcagtcttacttggctttccatctgatggtcccctggtgtgtgccctggaacaggagcgaaggctccgcctccctccgaagccacctccccctttgcagccccttctccgaggtgggcaagggttggaagctgctctaagctgcccccgttttctgcggtatccacggcagcatctgatcagcagcctggcagaggcaaggccagaggaactgactccccacgtgatggtgctcctggcccagcacctggcccggcaccggttgcgggagccccagcttctggaagccattgcccacttcctggtggttcaggaaacgcaactcagcagcaaggtggtacagaagttggtcctgccctttgggcgactgaactacctgcccctggaacagcagtttatgccctgccttgagaggatcctggctcgggaagcaggggtggcacccctggctacagtcaacatcttgatgtcactgtgccaactgcggtgcctgcccttcagagccctgcactttgttttttcccctggcttcatcaactacatcagtggcacccctcatgctctgattgtgcgtcgctacctctccctgctggacacggccgtggagctggagctcccaggataccggggtccccgccttccccgaaggcagcaagtgcccatctttccccagcctctcatcaccgaccgtgcccgctgcaagtacagtcacaaggacatagtagctgaggggttgcgccagctgctgggggaggagaaataccgccaggacctgactgtgcctccaggctactgcacagacttcctgctgtgcgccagcagctctggtgctgtgcttcccgtgaggacccaggaccccttcctgccatacccaccaaggcctgccccagctcaagagctacctgaggcagaagctccaggccctgggcctgcgctgggggcctgaagggggctgaggggttgatgtggggttcaggatggcccccccatggggggtggatgatttgcactttggttccctgtgttttgatttctcattaaagttcctttccttccccgttgtgaatctcagttttgggacggggagc

SEQ ID NO: 2746 - protein, 478 aa, Homosapiens
MRRPRGEPGPRAPRPTEGATCAGPGESWSPSPNSMLRVLLSAQTSPARLSGLLLIPPVQPCCLGPSKWGDRPVGGGPSAGPVQGLQRLLEQAKSPGELLRWLGQNPSKVRAHHYSVALRRLGQLLGSRPRPPPVEQVTLQDLSQLIIRNCPSFDIHTIHVCLHLAVLLGFPSDGPLVCALEQERRLRLPPKPPPPLQPLLRGGQGLEAALSCPRFLRYPRQHLISSLAEARPEELTPHVMVLLAQHLARHRLREPQLLEAIAHFLVVQETQLSSKVVQKLVLPFGRLNYLPLEQQFMPCLERILAREAGVAPLATVNILMSLCQLRCLPFRALHFVFSPGFINYISGTPHALIVRRYLSLLDTAVELELPGYRGPRLPRRQQVPIFPQPLITDRARCKYSHKDIVAEGLRQLLGEEKYRQDLTVPPGYCTDFLLCASSSGAVLPVRTQDPFLPYPPRPAPAQELPEAEAPGPGPALGA

SEQ ID NO: 2747 - DNA, 1267 bp, Homosapiens
atcttgatgtcactgtgccaactgcggtgcctgcccttcagagccctgcactttgttttttcccctggcttcatcaactacatcagtggtacgcagccaggatggctggctgggcccctgagggctggagaggcaggggagcagggtggcctgcagcccagagccccagtccccgcctccccacaggcacccctcatgctctgattgtgcgtcgctacctctccctgctggacacggccgtggagctggagctcccaggataccggggtccccgccttccccgaaggcagcaagtgcccatctttccccagcctctcatcaccgaccgtgcccgctgcaagtacaggtggatggggcagcctggggcaaggggaggggccagcctgggaccagcagagtggaaaagccagagggaccatgaagcgccaaagctaaggagctctcggccaccataaaactgggccctgaagcagcagagggctttgcccagggtggtggcactagactgggacagattaggatgaggtgccgggcccttcctgctactggtgtcctttctcctcagtcacaaggacatagtagctgaggggttgcgccagctgctgggggaggagaaataccgccaggacctgactgtgcctccaggctactgcacaggtgagcaaggggcaggcggcaggcccggggagacggagccctggctaaggccgccggccctgctcccctccagacttcctgctgtgcgccagcagctctggtgctgtgcttcccgtgaggacccaggaccccttcctgccatacccaccaaggtcctgcccacagggccaggctgcctctagcgccactactcgagaccctgcccagaggtaaaggaggcagggtgggggagccctggccaccttgcccgccatgccctgagccacgtccctccccctgcagggtggtgctggtgttgcgggaacgctggcatttctgccgggacggccgggtgctgctgggctcgagggccctgagggagcggcacctaggcctgatgggctaccagctcctgccgctacccttcgaggaactggagtcccagagaggcctgccccagctcaagagctacctgaggcagaagctccaggccctgggcctgcgctgggggcctgaagggggctgaggggttgatgtggggttcaggatggcccccccatggggggtggatgatttgcactttggttccctgtgttttgatttctcattaaagttcctttccttccccgtt

SEQ ID NO: 2748 - protein, 42 aa, Homosapiens
MGYQLLPLPFEELESQRGLPQLKSYLRQKLQALGLRWGPEGG

SEQ ID NO: 2749 - DNA, 1800 bp, Homosapiens
agaaaggtggagaattcaccaagtaaccccatgataagaacagcagcacagctctgttaccaggctgccttttacctctccccctcaggctttccatctgatggtcccctggtgtgtgccctggaacaggagcgaaggctccgcctccctccgaagccacctccccctttgcagccccttctccgagaggcaaggccagaggaactgactccccacgtgatggtgctcctggcccagcacctggcccggcaccggttgcgggagccccagcttctggaagccattgcccacttcctggtggttcaggaaacgcaactcagcagcaaggtggtacagaagttggtcctgccctttgggcgactgaactacctgcccctggaacagcagtttatgccctgccttgagaggatcctggctcgggaagcaggggtggcacccctggctacagtcaacatcttgatgtcactgtgccaactgcggtgcctgcccttcagagccctgcactttgttttttcccctggcttcatcaactacatcagtggtacgcagccaggatggctggctgggcccctgagggctggagaggcaggggagcagggtggcctgcagcccagagccccagtccccgcctccccacaggcacccctcatgctctgattgtgcgtcgctacctctccctgctggacacggccgtggagctggagctcccaggataccggggtccccgccttccccgaaggcagcaagtgcccatctttccccagcctctcatcaccgaccgtgcccgctgcaagtacaggtggatggggcagcctggggcaaggggaggggccagcctgggaccagcagagtggaaaagccagagggaccatgaagcgccaaagctaaggagctctcggccaccataaaactgggccctgaagcagcagagggctttgcccagggtggtggcactagactgggacagattaggatgaggtgccgggcccttcctgctactggtgtcctttctcctcagtcacaaggacatagtagctgaggggttgcgccagctgctgggggaggagaaataccgccaggacctgactgtgcctccaggctactgcacaggtgagcaaggggcaggcggcaggcccggggagacggagccctggctaaggccgccggccctgctcccctccagacttcctgctgtgcgccagcagctctggtgctgtgcttcccgtgaggacccaggaccccttcctgccatacccaccaaggtcctgcccacagggccaggctgcctctagcgccactactcgagaccctgcccagaggtaaaggaggcagggtgggggagccctggccaccttgcccgccatgccctgagccacgtccctccccctgcagggtggtgctggtgttgcgggaacgctggcatttctgccgggacggccgggtgctgctgggctcgagggccctgagggagcggcacctaggcctgatgggctaccagctcctgccggtgagtggccctggcctggcccgtggcgcatcctcactcccagcctgcgggtaacctgccgccctctcctctccccacagctacccttcgaggaactggagtcccagagaggcctgccccagctcaagagctacctgaggcagaagctccaggccctgggcctgcgctgggggcctgaagggggctgaggggttgatgtggggttcaggatggcccccccatggggggtggatgatttgcactttggttccctgtgttttgatttctcattaaagttcctttccttccccgtt

SEQ ID NO: 2750 - protein, 208 aa, Homosapiens
MIRTAAQLCYQAAFYLSPSGFPSDGPLVCALEQERRLRLPPKPPPPLQPLLREARPEELTPHVMVLLAQHLARHRLREPQLLEAIAHFLVVQETQLSSKVVQKLVLPFGRLNYLPLEQQFMPCLERILAREAGVAPLATVNILMSLCQLRCLPFRALHFVFSPGFINYISGTQPGWLAGPLRAGEAGEQGGLQPRAPVPASPQAPLML

SEQ ID NO: 2751 - DNA, 3355 bp, Homosapiens
cttcgggattggcgtccgggcggctatctaggggctgctgggaagatggcggactcggtggctagccgatgaggaggccgcggggggaacccggcccccgggccccgagaccgactgagggagcgacctgcgcagggcccggggagtcatgtaggggtggcgcctgcggggagggctgcgggagggcagcgggagctggtgttagcggcagcggccacggtctcctggcgtccctgggccggggtgggtgttggggcccccgacttcgccgactccgcgccatcgcaaagcggtgcactcgggctccacgcgcgccctgcgaggtgggcgctgcgttttcatttcacgggtgaggagacttagagagacgaagccacttgtccaaggtcacgccgctggtgagtgggagcgcccagcatggaacccagcaccgtccagccgcggagcccgcgttccaccctctgtgccgccgccgcctcctgtgggagagggaggtggtcgggagagtgcacgccggtgccgcctgggctccagactgggcgcgaccactaacccggttaatgacctcgggcttaacttaaccccttcgctgctctgggcctgcgtttctccaccggtgaaatgaggtaatgccagccctgcctactcttcatgggcgtgtaaggagcatcagagatggtgcatgtggaattgctttgcaagtagtgctgcgctgagcgcactgaggattatgattgctgtttcaaaggcgtggaaggaggcagaggggcggggtggggaagaggcccagagcagtcacaaaggcttgctctgaccacaggccccctaaatgaggagtgaggtaagcagtaggtagcaggtctttctcccctttggagaaaacctcacccccttttttgggctgcccctcagggtctccatcacccaactccatgcttcgagtcctgctctctgctcagacctcccctgctcggctgtctggcctgctgctgatccctccagtacagccctgctgtttggggcccagcaaatggggggaccggcctgttggaggaggccccagtgcaggtcctgtgcaaggactgcagcggcttctggaacaggcgaagagccctggggagctgctgcgctggctgggccagaaccccagcaaggtgcgcgcccaccactactcggtggcgcttcgtcgtctgggccagctcttggggtctcggccacggccccctcctgtggagcaggtcacactgcaggacttgagtcagctcatcatccgaaactgcccctcctttgacattcacaccatccacgtgtgtctgcaccttgcagtcttacttggtgaggaggggcttgaggtgggcgcctggggggctaggtgttaatgaagaatagggagaacagtagaggaccacggacagagacccagcctctcaggcgtttgcccaggaacgcttgctcctgctcccgtcctatgtctgcggcagacatcatgagtcgaacgcactccttccggcctcgctagggtgccaccccagattcctgctaatagagtgccctaggaagccaccataatttgtcacaattggtatgagatgaaagcctatttgccatctttgtatgtactccctacaaaccgtttcgatacctcatagccacatgatactttacatgtctctagtgtttgcacttaaactctagcacaccttcccgctcaggaaacgggagaggagaaaggtggagaattcaccaagtaaccccatgataagaacagcagcacagctctgttaccaggctgccttttacctctccccctcaggctttccatctgatggtcccctggtgtgtgccctggaacaggagcgaaggctccgcctccctccgaagccacctccccctttgcagccccttctccgaggtgggcaagggttggaagctgctctaagctgcccccgttttctgcggtatccacggcagcatctgatcagcagcctggcagaggcaaggccagaggaactgactccccacgtgatggtgctcctggcccagcacctggcccggcaccggttgcgggagccccagcttctggaagccattgcccacttcctggtggttcaggaaacgcaactcagcagcaaggtggtacagaagttggtcctgccctttgggcgactgaactacctgcccctggaacagcagtttatgccctgccttgagaggatcctggctcgggaagcaggggtggcacccctggctacagtcaacatcttgatgtcactgtgccaactgcggtgcctgcccttcagagccctgcactttgttttttcccctggcttcatcaactacatcagtggcacccctcatgctctgattgtgcgtcgctacctctccctgctggacacggccgtggagctggagctcccaggataccggggtccccgccttccccgaaggcagcaagtgcccatctttccccagcctctcatcaccgaccgtgcccgctgcaagtacaggtggatggggcagcctggggcaaggggaggggccagcctgggaccagcagagtggaaaagccagagggaccatgaagcgccaaagctaaggagctctcggccaccataaaactgggccctgaagcagcagagggctttgcccagggtggtggcactagactgggacagattaggatgaggtgccgggcccttcctgctactggtgtcctttctcctcagtcacaaggacatagtagctgaggggttgcgccagctgctgggggaggagaaataccgccaggacctgactgtgcctccaggctactgcacagacttcctgctgtgcgccagcagctctggtgctgtgcttcccgtgaggacccaggaccccttcctgccatacccaccaaggtcctgcccacagggccaggctgcctctagcgccactactcgagaccctgcccagaggtaaaggaggcagggtgggggagccctggccaccttgcccgccatgccctgagccacgtccctccccctgcagggtggtgctggtgttgcgggaacgctggcatttctgccgggacggccgggtgctgctgggctcgagggccctgagggagcggcacctaggcctgatgggctaccagctcctgccgctacccttcgaggaactggagtcccagagaggcctgccccagctcaagagctacctgaggcagaagctccaggccctgggcctgcgctgggggcctgaagggggctgaggggttgatgtggggttcaggatggcccccccatggggggtggatgatttgcactttggttccctgtgttttgatttctcattaaagttcctttccttccccgtt

SEQ ID NO: 2752 - protein, 286 aa, Homosapiens
MIRTAAQLCYQAAFYLSPSGFPSDGPLVCALEQERRLRLPPKPPPPLQPLLRGGQGLEAALSCPRFLRYPRQHLISSLAEARPEELTPHVMVLLAQHLARHRLREPQLLEAIAHFLVVQETQLSSKVVQKLVLPFGRLNYLPLEQQFMPCLERILAREAGVAPLATVNILMSLCQLRCLPFRALHFVFSPGFINYISGTPHALIVRRYLSLLDTAVELELPGYRGPRLPRRQQVPIFPQPLITDRARCKYRWMGQPGARGGASLGPAEWKSQRDHEAPKLRSSRPP

SEQ ID NO: 2753 - DNA, 2544 bp, Homosapiens
cgtctccgaagaccgatagctgcttcgggattggcgtccgggcggctatctaggggctgctgggaagatggcggactcggtggctagccgatgaggaggccgcggggggaacccggcccccgggccccgagaccgactgagggagcgacctgcgcagggcccggggagtcatgtaggggtggcgcctgcggggagggctgcgggagggcagcgggagctggtgttagcggcagcggccacggtctcctggcgtccctgggccggggtgggtgttggggcccccgacttcgccgactccgcgccatcgcaaagcggtgcactcgggctccacgcgcgccctgcgaggtgggcgctgcgttttcatttcacgggtgaggagacttagagagacgaagccacttgtccaaggtcacgccgctggtgagtgggagcgcccagcatggaacccagcaccgtccagccgcggagcccgcgttccaccctctgtgccgccgccgcctcctgtgggagagggaggtggtcgggagagtgcacgccggtgccgcctgggctccagactgggcgcgaccactaacccggttaatgacctcgggcttaacttaaccccttcgctgctctgggcctgcgtttctccaccggtgaaatgagggtctccatcacccaactccatgcttcgagtcctgctctctgctcagacctcccctgctcggctgtctggcctgctgctgatccctccagtacagccctgctgtttggggcccagcaaatggggggaccggcctgttggaggaggccccagtgcaggtcctgtgcaaggactgcagcggcttctggaacaggcgaagagccctggggagctgctgcgctggctgggccagaaccccagcaaggtgcgcgcccaccactactcggtggcgcttcgtcgtctgggccagctcttggggtctcggccacggccccctcctgtggagcaggtcacactgcaggacttgagtcagctcatcatccgaaactgcccctcctttgacattcacaccatccacgtgtgtctgcaccttgcagtcttacttggtggtacagaagttggtcctgccctttgggcgactgaactacctgcccctggaacagcagtttatgccctgccttgagaggatcctggctcgggaagcaggggtggcacccctggctacagtcaacatcttgatgtcactgtgccaactgcggtgcctgcccttcagagccctgcactttgttttttcccctggcttcatcaactacatcagtggtacgcagccaggatggctggctgggcccctgagggctggagaggcaggggagcagggtggcctgcagcccagagccccagtccccgcctccccacaggcacccctcatgctctgattgtgcgtcgctacctctccctgctggacacggccgtggagctggagctcccaggataccggggtccccgccttccccgaaggcagcaagtgcccatctttccccagcctctcatcaccgaccgtgcccgctgcaagtacaggtggatggggcagcctggggcaaggggaggggccagcctgggaccagcagagtggaaaagccagagggaccatgaagcgccaaagctaaggagctctcggccaccataaaactgggccctgaagcagcagagggctttgcccagggtggtggcactagactgggacagattaggatgaggtgccgggcccttcctgctactggtgtcctttctcctcagtcacaaggacatagtagctgaggggttgcgccagctgctgggggaggagaaataccgccaggacctgactgtgcctccaggctactgcacaggtgagcaaggggcaggcggcaggcccggggagacggagccctggctaaggccgccggccctgctcccctccagacttcctgctgtgcgccagcagctctggtgctgtgcttcccgtgaggacccaggaccccttcctgccatacccaccaaggtcctgcccacagggccaggctgcctctagcgccactactcgagaccctgcccagaggtaaaggaggcagggtgggggagccctggccaccttgcccgccatgccctgagccacgtccctccccctgcagggtggtgctggtgttgcgggaacgctggcatttctgccgggacggccgggtgctgctgggctcgagggccctgagggagcggcacctaggcctgatgggctaccagctcctgccggtgagtggccctggcctggcccgtggcgcatcctcactcccagcctgcgggtaacctgccgccctctcctctccccacagctacccttcgaggaactggagtcccagagaggcctgccccagctcaagagctacctgaggcagaagctccaggccctgggcctgcgctgggggcctgaagggggctgaggggttgatgtggggttcaggatggcccccccatggggggtggatgatttgcactttggttccctgtgttttgatttctcattaaagttcctttccttccccgtt

SEQ ID NO: 2754 - protein, 159 aa, Homosapiens
MLRVLLSAQTSPARLSGLLLIPPVQPCCLGPSKWGDRPVGGGPSAGPVQGLQRLLEQAKSPGELLRWLGQNPSKVRAHHYSVALRRLGQLLGSRPRPPPVEQVTLQDLSQLIIRNCPSFDIHTIHVCLHLAVLLGGTEVGPALWATELPAPGTAVYALP

SEQ ID NO: 2755 - DNA, 1817 bp, Homosapiens
cgtctccgaagaccgatagctgcttcgggattggcgtccgggcggctatctaggggctgctgggaagatggcggactcggtggctagccgatgaggaggccgcggggggaacccggcccccgggccccgagaccgactgagggagcgacctgcgcagggcccggggagtcatgtaggggtggcgcctgcggggagggctgcgggagggcagcgggagctggtgttagcggcagcggccacggtctcctggcgtccctgggccggggtgggtgttggggcccccgacttcgccgactccgcgccatcgcaaagcggtgcactcgggctccacgcgcgccctgcgaggtgggcgctgcgttttcatttcacgggtgaggagacttagagagacgaagccacttgtccaaggtcacgccgctggtgagtgggagcgcccagcatggaacccagcaccgtccagccgcggagcccgcgttccaccctctgtgccgccgccgcctcctgtgggagagggaggtggtcgggagagtgcacgccggtgccgcctgggctccagactgggcgcgaccactaacccggttaatgacctcgggcttaacttaaccccttcgctgctctgggcctgcgtttctccaccggtgaaatgaggctttccatctgatggtcccctggtgtgtgccctggaacaggagcgaaggctccgcctccctccgaagccacctccccctttgcagccccttctccgagaggcaaggccagaggaactgactccccacgtgatggtgctcctggcccagcacctggcccggcaccggttgcgggagccccagcttctggaagccattgcccacttcctggtggttcaggaaacgcaactcagcagcaaggtggtacagaagttggtcctgccctttgggcgactgaactacctgcccctggaacagcagtttatgccctgccttgagaggatcctggctcgggaagcaggggtggcacccctggctacagtcaacatcttgatgtcactgtgccaactgcggtgcctgcccttcagagccctgcactttgttttttcccctggcttcatcaactacatcagtggcacccctcatgctctgattgtgcgtcgctacctctccctgctggacacggccgtggagctggagctcccaggataccggggtccccgccttccccgaaggcagcaagtgcccatctttccccagcctctcatcaccgaccgtgcccgctgcaagtacagtcacaaggacatagtagctgaggggttgcgccagctgctgggggaggagaaataccgccaggacctgactgtgcctccaggctactgcacagacttcctgctgtgcgccagcagctctggtgctgtgcttcccgtgaggacccaggaccccttcctgccatacccaccaaggtcctgcccacagggccaggctgcctctagcgccactactcgagaccctgcccagagggtggtgctggtgttgcgggaacgctggcatttctgccgggacggccgggtgctgctgggctcgagggccctgagggagcggcacctaggcctgatgggctaccagctcctgccgctacccttcgaggaactggagtcccagagaggcctgccccagctcaagagctacctgaggcagaagctccaggccctgggcctgcgctgggggcctgaagggggctgaggggttgatgtggggttcaggatggcccccccatggggggtggatgatttgcactttggttccctgtgttttgatttctcattaaagttcctttccttccccgtt

SEQ ID NO: 2756 - protein, 310 aa, Homosapiens
MVLLAQHLARHRLREPQLLEAIAHFLVVQETQLSSKVVQKLVLPFGRLNYLPLEQQFMPCLERILAREAGVAPLATVNILMSLCQLRCLPFRALHFVFSPGFINYISGTPHALIVRRYLSLLDTAVELELPGYRGPRLPRRQQVPIFPQPLITDRARCKYSHKDIVAEGLRQLLGEEKYRQDLTVPPGYCTDFLLCASSSGAVLPVRTQDPFLPYPPRSCPQGQAASSATTRDPAQRVVLVLRERWHFCRDGRVLLGSRALRERHLGLMGYQLLPLPFEELESQRGLPQLKSYLRQKLQALGLRWGPEGG

SEQ ID NO: 2757 - DNA, 1430 bp, Homosapiens
gggagccacgtctccgaagaccgatagctgcttcgggattggcgtccgggcggctatctaggggctgctgggaagatggcggactcggtggctagccgatgaggaggccgcggggggaacccggcccccgggccccgagaccgactgagggagcgacctgcgcagggcccggggagtcatgctttccatctgatggtcccctggtgtgtgccctggaacaggagcgaaggctccgcctccctccgaagccacctccccctttgcagccccttctccgaggtgggcaagggttggaagctgctctaagctgcccccgttttctgcggtatccacggcagcatctgatcagcagcctggcagaggcaaggccagaggaactgactccccacgtgatggtgctcctggcccagcacctggcccggcaccggttgcgggagccccagcttctggaagccattgcccacttcctggtggttcaggaaacgcaactcagcagcaaggtggtacagaagttggtcctgccctttgggcgactgaactacctgcccctggaacagcagtttatgccctgccttgagaggatcctggctcgggaagcaggggtggcacccctggctacagtcaacatcttgatgtcactgtgccaactgcggtgcctgcccttcagagccctgcactttgttttttcccctggcttcatcaactacatcagtggcacccctcatgctctgattgtgcgtcgctacctctccctgctggacacggccgtggagctggagctcccaggataccggggtccccgccttccccgaaggcagcaagtgcccatctttccccagcctctcatcaccgaccgtgcccgctgcaagtacagtcacaaggacatagtagctgaggggttgcgccagctgctgggggaggagaaataccgccaggacctgactgtgcctccaggctactgcacagacttcctgctgtgcgccagcagctctggtgctgtgcttcccgtgaggacccaggaccccttcctgccatacccaccaaggtcctgcccacagggccaggctgcctctagcgccactactcgagaccctgcccagagggtggtgctggtgttgcgggaacgctggcatttctgccgggacggccgggtgctgctgggctcgagggccctgagggagcggcacctaggcctgatgggctaccagctcctgccgctacccttcgaggaactggagtcccagagaggcctgccccagctcaagagctacctgaggcagaagctccaggccctgggcctgcgctgggggcctgaagggggctgaggggttgatgtggggttcaggatggcccccccatggggggtggatgatttgcactttggttccctgtgttttgatttctcattaaagttcctttccttccccgtt

SEQ ID NO: 2758 - protein, 408 aa, Homosapiens; identical to SEQ ID NO: 336

SEQ ID NO: 2759 - DNA, 1853 bp, Homosapiens
gggagccacgtctccgaagaccgatagctgcttcgggattggcgtccgggcggctatctaggggctgctgggaagatggcggactcggtggctagccgatgaggaggccgcggggggaacccggcccccgggccccgagaccgactgagggagcgacctgcgcagggcccggggagtcatggtctccatcacccaactccatgcttcgagtcctgctctctgctcagacctcccctgctcggctgtctggcctgctgctgatccctccagtacagccctgctgtttggggcccagcaaatggggggaccggcctgttggaggaggccccagtgcaggtcctgtgcaaggactgcagcggcttctggaacaggcgaagagccctggggagctgctgcgctggctgggccagaaccccagcaaggtgcgcgcccaccactactcggtggcgcttcgtcgtctgggccagctcttggggtctcggccacggccccctcctgtggagcaggtcacactgcaggacttgagtcagctcatcatccgaaactgcccctcctttgacattcacaccatccacgtgtgtctgcaccttgcagtcttacttggctttccatctgatggtcccctggtgtgtgccctggaacaggagcgaaggctccgcctccctccgaagccacctccccctttgcagccccttctccgaggtgggcaagggttggaagctgctctaagctgcccccgttttctgcggtatccacggcagcatctgatcagcagcctggcagaggcaaggccagaggaactgactccccacgtgatggtgctcctggcccagcacctggcccggcaccggttgcgggagccccagcttctggaagccattgcccacttcctggtggttcaggaaacgcaactcagcagcaaggtggtacagaagttggtcctgccctttgggcgactgaactacctgcccctggaacagcagtttatgccctgccttgagaggatcctggctcgggaagcaggggtggcacccctggctacagtcaacatcttgatgtcactgtgccaactgcggtgcctgcccttcagagccctgcactttgttttttcccctggcttcatcaactacatcagtggcacccctcatgctctgattgtgcgtcgctacctctccctgctggacacggccgtggagctggagctcccaggataccggggtccccgccttccccgaaggcagcaagtgcccatctttccccagcctctcatcaccgaccgtgcccgctgcaagtacagtcacaaggacatagtagctgaggggttgcgccagctgctgggggaggagaaataccgccaggacctgactgtgcctccaggctactgcacagacttcctgctgtgcgccagcagctctggtgctgtgcttcccgtgaggacccaggaccccttcctgccatacccaccaaggtcctgcccacagggccaggctgcctctagcgccactactcgagaccctgcccagagggtggtgctggtgttgcgggaacgctggcatttctgccgggacggccgggtgctgctgggctcgagggccctgagggagcggcacctaggcctgatgggctaccagctcctgccgctacccttcgaggaactggagtcccagagaggcctgccccagctcaagagctacctgaggcagaagctccaggccctgggcctgcgctgggggcctgaagggggctgaggggttgatgtggggttcaggatggcccccccatggggggtggatgatttgcactttggttccctgtgttttgatttctcattaaagttcctttccttccccgtt

SEQ ID NO: 2760 - protein, 549 aa, Homosapiens; identical to SEQ ID NO: 334

SEQ ID NO: 2761 - DNA, 1335 bp, Homosapiens
aagtcggtgaaggagtagacacactggggtgaagtgggcaggagaatagatacgcttgggggtgaagtttggttggggtgaagtttaggagaggcgttgcttaggcccttaccttgggatagggtttgggtgagttgggagctggttgaagacctcgagctcagatgacagaaagttaggacttgggattcggcgatgggaaggggcacccggagctcggtagcgcggcgggcaaggcaggcgccatgaccctgattgaaggggtgggtgatgaggtgaccgtccttttctcggtgcttgcctgccttctggtgctggcccttgcctgggtctcaacgcacaccgctgagggcggggacccactgccccagccgtcagggaccccaacgccatcccagcccagcgcagccatggcagctaccgacagccccctcgtgctacggctgaaattcctcaatgattcagagcaggtggccagggcctggccccacgacaccattggctccttgaaaaggacccagtttcccggccgggaacagcaggtgcgactcatctaccaagggcagctgctaggcgacgacacccagaccctgggcagccttcacctccctcccaactgcgttctccactgccacgtgtccacgagagtcggtcccccaaatcccccctgcccgccggggtccgagcccggcccctccgggctggaaatcggcagcctgctgctgcccctgctgctcctgctgttgctgctgctctggtactgccagatccagtaccggcccttctttcccctgaccgccactctgggcctggccggcttcaccctgctcctcagtctcctggcctttgccatgtaccgcccgtagtgcctccgcgggcgcttggcagcgtcgccggcccctccggaccttgctccccgcgccgcggcgggagctgctgcctgcccaggcccgcctctccggcctgcctcttcccgccgccctggagcccagccctgcgccgcagaggactcccgggactggcggaggccccgccctgcgaccgccggggctcggggccacctcccggggctgctgaccctcagcccgcactgggagtgggctcctcggggtcgggcatctgctgtcgctgcctcggccccgggcagagccgggccgccccgggggcccgtcttagtgttctgccggaggacccagccgcctccaatccctgacagctccttgggctgagttggggacgccaggtcggtgggaggctggtgaaggggagcggggaggggcagaggagttccccggaacccgtgcagattaaagtaactgtgaagttttcactctt

SEQ ID NO: 2762 - protein, 206 aa, Homosapiens
MTLIEGVGDEVTVLFSVLACLLVLALAWVSTHTAEGGDPLPQPSGTPTPSQPSAAMAATDSPLVLRLKFLNDSEQVARAWPHDTIGSLKRTQFPGREQQVRLIYQGQLLGDDTQTLGSLHLPPNCVLHCHVSTRVGPPNPPCPPGSEPGPSGLEIGSLLLPLLLLLLLLLWYCQIQYRPFFPLTATLGLAGFTLLLSLLAFAMYRP

SEQ ID NO: 2763 - DNA, 1711 bp, Homosapiens
gtaacgcggggggcgggggtgggggcacagaggctctacccccacctcttagaaactttagcagcggagtagatgagcctggggtgaagtcggtgaaggagtagacacactggggtgaagtgggcaggagaatagatacgcttgggggtgaagtttggttggggtgaagtttaggagaggcgttgcttaggcccttaccttgggatagggtttgggtgagttgggagctggttgaagacctcgagctcagatgacagaaagttaggacttgggattcggcgatgggaaggggcacccggaggcaagtttggggcgactgggaggcagagaagccggtaccctggggtgggtgaggggacggaggctgaggacggtgggagcgtcgcggtggggtgagggcaggaccctgtggaggttccagggctcctggccagggggcccgggcctcacgggctctttgtgcctctccagctcggtagcgcggcgggcaaggcaggcgccatgaccctgattgaaggggtgggtgatgaggtgaccgtccttttctcggtgcttgcctgccttctggtgctggcccttgcctgggtctcaacgcacaccgctgagggcggggacccactgccccagccgtcagggaccccaacgccatcccagcccagcgcagccatggcagctaccgacagcatgagaggggaggccccaggggcagagacccccagcctgagacacagaggtcaagctgcacagccagagcccagcacggggttcacagcaacaccgccagccccggactccccgcaggagcccctcgtgctacggctgaaattcctcaatgattcagagcaggtggccagggcctggccccacgacaccattggctccttgaaaaggacccagtttcccggccgggaacagcaggtgcgactcatctaccaagggcagctgctaggcgacgacacccagaccctgggcagccttcacctccctcccaactgcgttctccactgccacgtgtccacgagagtcggtcccccaaatcccccctgcccgccggggtccgagcccggcccctccgggctggaaatcggcagcctgctgctgcccctgctgctcctgctgttgctgctgctctggtactgccagatccagtaccggcccttctttcccctgaccgccactctgggcctggccggcttcaccctgctcctcagtctcctggcctttgccatgtaccgcccgtagtgcctccgcgggcgcttggcagcgtcgccggcccctccggaccttgctccccgcgccgcggcgggagctgctgcctgcccaggcccgcctctccggcctgcctcttcccgccgccctggagcccagccctgcgccgcagaggactcccgggactggcggaggccccgccctgcgaccgccggggctcggggccacctcccggggctgctgaccctcagcccgcactgggagtgggctcctcggggtcgggcatctgctgtcgctgcctcggccccgggcagagccgggccgccccgggggcccgtcttagtgttctgccggaggacccagccgcctccaatccctgacagctccttgggctgagttggggacgccaggtcggtgggaggctggtgaaggggagcggggaggggcagaggagttccccggaacccgtgcagattaaagtaactgtgaagttttcactctt

SEQ ID NO: 2764 - protein, 246 aa, Homosapiens; identical to SEQ ID NO: 338

SEQ ID NO: 2765 - DNA, 1683 bp, Homosapiens
gggttgaggggacctggagggggccgagctgggtgggtggtgacgctcggtggctccagattgcccaggggcggagtttgacgtttgctgtgggggaagcctgggaagcagtcctgtgccgcgggtggggtttaggtgaaccgtaacgcggggggcgggggtgggggcacagaggctctacccccacctcttagaaactttagcagcggagtagatgagcctggggtgaagtcggtgaaggagtagacacactggggtgaagtgggcaggagaatagatacgcttgggggtgaagtttggttggggtgaagtttaggagaggcgttgcttaggcccttaccttgggatagggtttgggtgagttgggagctggttgaagacctcgagctcagatgacagaaagttaggacttgggattcggcgatgggaaggggcacccggagctcggtagcgcggcgggcaaggcaggcgccatgaccctgattgaaggggtgggtgatgaggtgaccgtccttttctcggtgcttgcctgccttctggtgctggcccttgcctgggtctcaacgcacaccgctgagggcggggacccactgccccagccgtcagggaccccaacgccatcccagcccagcgcagccatggcagctaccgacagcatgagaggggaggccccaggggcagagacccccagcctgagacacagaggtcaagctgcacagccagagcccagcacggggttcacagcaacaccgccagccccggactccccgcaggagcccctcgtgctacggctgaaattcctcaatgattcagagcaggtggccagggcctggccccacgacaccattggctccttgaaaaggacccagtttcccggccgggaacagcaggtgcgactcatctaccaagggcagctgctaggcgacgacacccagaccctgggcagccttcacctccctcccaactgcgttctccactgccacgtgtccacgagagtcggtcccccaaatcccccctgcccgccggggtccgagcccggcccctccgggctggaaatcggcagcctgctgctgcccctgctgctcctgctgttgctgctgctctggtactgccagatccagtaccggcccttctttcccctgaccgccactctgggcctggccggcttcaccctgctcctcagtctcctggcctttgccatgtaccgcccgtagtgcctccgcgggcgcttggcagcgtcgccggcccctccggaccttgctccccgcgccgcggcgggagctgctgcctgcccaggcccgcctctccggcctgcctcttcccgccgccctggagcccagccctgcgccgcagaggactcccgggactggcggaggccccgccctgcgaccgccggggctcggggccacctcccggggctgctgaccctcagcccgcactgggagtgggctcctcggggtcgggcatctgctgtcgctgcctcggccccgggcagagccgggccgccccgggggcccgtcttagtgttctgccggaggacccagccgcctccaatccctgacagctccttgggctgagttggggacgccaggtcggtgggaggctggtgaaggggagcggggaggggcagaggagttccccggaacccgtgcagattaaagtaactgtgaagttttcactctt

SEQ ID NO: 2766 - protein, 246 aa, Homosapiens; identical to SEQ ID NO: 338

SEQ ID NO: 2767 - DNA, 938 bp, Homosapiens
gccgcgatggagctgggggagccgggcggagcccctcgtgctacggctgaaattcctcaatgattcagagcaggtggccagggcctggccccacgacaccattggctccttgaaaaggacccagtttcccggccgggaacagcaggtgcgactcatctaccaagggcagctgctaggcgacgacacccagaccctgggcagccttcacctccctcccaactgcgttctccactgccacgtgtccacgagagtcggtcccccaaatcccccctgcccgccggggtccgagcccggcccctccgggctggaaatcggcagcctgctgctgcccctgctgctcctgctgttgctgctgctctggtactgccagatccagtaccggcccttctttcccctgaccgccactctgggcctggccggcttcaccctgctcctcagtctcctggcctttgccatgtaccgcccgtagtgcctccgcgggcgcttggcagcgtcgccggcccctccggaccttgctccccgcgccgcggcgggagctgctgcctgcccaggcccgcctctccggcctgcctcttcccgccgccctggagcccagccctgcgccgcagaggactcccgggactggcggaggccccgccctgcgaccgccggggctcggggccacctcccggggctgctgaccctcagcccgcactgggagtgggctcctcggggtcgggcatctgctgtcgctgcctcggccccgggcagagccgggccgccccgggggcccgtcttagtgttctgccggaggacccagccgcctccaatccctgacagctccttgggctgagttggggacgccaggtcggtgggaggctggtgaaggggagcggggaggggcagaggagttccccggaacccgtgcagattaaagtaactgtgaagttttcactctt

SEQ ID NO: 2768 - protein, 250 aa, Homosapiens
FRAGGQGLAPRHHWLLEKDPVSRPGTAGATHLPRAAARRRHPDPGQPSPPSQLRSPLPRVHESRSPKSPLPAGVRARPLRAGNRQPAAAPAAPAVAAALVLPDPVPALLSPDRHSGPGRLHPAPQSPGLCHVPPVVPPRALGSVAGPSGPCSPRRGGSCCLPRPASPACLFPPPWSPALRRRGLPGLAEAPPCDRRGSGPPPGAADPQPALGVGSSGSGICCRCLGPGQSRAAPGARLSVLPEDPAASNP

SEQ ID NO: 2769 - DNA, 1340 bp, Homosapiens
gcggcggcggggaaggaggggtgcttcaggtgcctgcgacctccgcgcctcccgcccggaagtgcccgaggggccgcgatggagctgggggagccgggcgctcggtagcgcggcgggcaaggcaggcgccatgaccctgattgaaggggtgggtgatgaggtgaccgtccttttctcggtgcttgcctgccttctggtgctggcccttgcctgggtctcaacgcacaccgctgagggcggggacccactgccccagccgtcagggaccccaacgccatcccagcccagcgcagccatggcagctaccgacagcatgagaggggaggccccaggggcagagacccccagcctgagacacagaggtcaagctgcacagccagagcccagcacggggttcacagcaacaccgccagccccggactccccgcaggagcccctcgtgctacggctgaaattcctcaatgattcagagcaggtggccagggcctggccccacgacaccattggctccttgaaaaggacccagtttcccggccgggaacagcaggtgcgactcatctaccaagggcagctgctaggcgacgacacccagaccctgggcagccttcacctccctcccaactgcgttctccactgccacgtgtccacgagagtcggtcccccaaatcccccctgcccgccggggtccgagcccggcccctccgggctggaaatcggcagcctgctgctgcccctgctgctcctgctgttgctgctgctctggtactgccagatccagtaccggcccttctttcccctgaccgccactctgggcctggccggcttcaccctgctcctcagtctcctggcctttgccatgtaccgcccgtagtgcctccgcgggcgcttggcagcgtcgccggcccctccggaccttgctccccgcgccgcggcgggagctgctgcctgcccaggcccgcctctccggcctgcctcttcccgccgccctggagcccagccctgcgccgcagaggactcccgggactggcggaggccccgccctgcgaccgccggggctcggggccacctcccggggctgctgaccctcagcccgcactgggagtgggctcctcggggtcgggcatctgctgtcgctgcctcggccccgggcagagccgggccgccccgggggcccgtcttagtgttctgccggaggacccagccgcctccaatccctgacagctccttgggctgagttggggacgccaggtcggtgggaggctggtgaaggggagcggggaggggcagaggagttccccggaacccgtgcagattaaagtaactgtgaagttttcactctt

SEQ ID NO: 2770 - protein, 246 aa, Homosapiens; identical to SEQ ID NO: 338

SEQ ID NO: 2771 - DNA, 649 bp, Homosapiens
tcggtgaaggagtagacacactggggtgaagtgggcaggagaatagatacgcttgggggtgaagtttggttggggtgaagtttaggagaggcgttgcttaggcccttaccttgggatagggtttgggtgagttgggagctggttgaagacctcgagctcagatgacagaaagttaggacttgggattcggcgatgggaaggggcacccggaggcaagtttggggcgactgggaggcagagaagccggtaccctggggtgggtgaggggacggaggctgaggacggtgggagcgtcgcggtggggtgagggcaggaccctgtggaggttccagggctcctggccagggggcccgggcctcacgggctctttgtgcctctccagctcggtagcgcggcgggcaaggcaggcgccatgaccctgattgaaggggtgggtgatgaggtgaccgtccttttctcggtgcttgcctgccttctggtgctggcccttgcctgggtctcaacgcacaccgctgagggcggggacccactgccccagccgtcagggaccccaacgccatcccagcccagcgcagccatggcagctaccgacagcatgagaggggagttccccggaacccgtgcagattaaagtaactgtgaagttttc

SEQ ID NO: 2772 - protein, 72 aa, Homosapiens
MTLIEGVGDEVTVLFSVLACLLVLALAWVSTHTAEGGDPLPQPSGTPTPSQPSAAMAATDSMRGEFPGTRAD

SEQ ID NO: 2773 - DNA, 359 bp, Homosapiens
agtgcccgaggggccgcgatggagctgggggagccgggcgctcggtagcgcggcgggcaaggcaggcgccatgaccctgattgaaggggtgggtgatgaggtgaccgtccttttctcggtgcttgcctgccttctggtgctggcccttgcctgggtctcaacgcacaccgctgagggcggggacccactgccccagccgtcagggaccccaacgccatcccagcccagcgcagccatggcagctaccgacagcatgagaggggaggccccaggggcagagacccccagcctgagacacagaggtcaagctgcacagccagagcccagcacggggttcacagcaacaccgccagccccgg

SEQ ID NO: 2774 - protein, 95 aa, Homosapiens
MTLIEGVGDEVTVLFSVLACLLVLALAWVSTHTAEGGDPLPQPSGTPTPSQPSAAMAATDSMRGEAPGAETPSLRHRGQAAQPEPSTGFTATPPA

SEQ ID NO: 2775 - DNA, 2728 bp, Homosapiens
aggagagcactgctgcagccggcagtggagagcctgggcagggagacagggagaaaactccggcagcagggtggtctctagggctgacctcggagcctggggacaggggagcctatgccgcactgaaggcgggacgctactcgtttgtgaacagccaggagtggacgctgagccgctccgtaccggagcttaaagtgggcatagtggggaacctgtctagcgggaagtcagccctggtgcaccgctatctgacggggacctatgtccaggaggagtcccctgaaggggggcggtttaagaaggagattgtggtggatggccagagttacctgctgctgatccgagatgaaggaggcccccctgagctccagtttgctgcctgggtggatgcagtggtgtttgtgttcagcctggaggatgaaatcagtttccagacggtgtacaactacttcctgcgtctctgcagcttccgcaacgccagcgaggtgcccatggtgcttgtgggcacgcaggatgccatcagcgctgcgaatccccgggttatcgacgacagcagagcccgcaagctctccacagatctgaagcggtgcacctactatgagacgtgcgcgacctacgggctcaatgtggagcgtgtcttccaggacgtggcccagaaggtagtggccttgcgaaagaagcagcaactggccatcgggccctgcaagtcactgcccaactcgcccagccactcggccgtgtccgccgcctccatcccggccgtgcacatcaaccaggccacgaatggcggcggcagcgccttcagcgactactcgtcctcagtcccctccacccccagcatcagccagcgggagctgcgcatcgagaccatcgctgcctcctccacccccacacccatccgaaagcagtccaagcggcgctccaacatcttcacgtctcggaagggtgctgacctggaccgggagaagaaggctgccgagtgcaaggtggacagcatcgggagcggccgcgccatccccatcaagcaggggatcctgctaaagcggagcggcaagtccctgaacaaggagtggaagaagaagtatgtgacgctctgtgacaacgggctgctcacctatcaccccagcctgcatgattacatgcagaacatccacggcaaggagattgacctgctgcggacaacggtgaaagtgccagggaagcgcctgccccgagccacacctgccacagccccgggcaccagcccccgtgccaacgggctgtccgtggagcggagtaacacacagctgggtgggggcacagaggcagaggagtcgtttgaatttgtggtggtgtccctcactgggcagacgtggcacttcgaggcttcaacggcggaggagcgggagctgtgggttcagagtgtgcaggcccagatccttgccagcctgcaaggctgccgcagtgccaaggacaagactcgactggggaaccagaacgcagctctggctgtgcaggccgtccgcaccgtccgcggcaacagcttttgtatcgactgcgatgcacccaatccagactgggccagcctgaacctgggtgccctgatgtgcattgagtgctcaggcatccaccgacacctgggggctcacctgtcccgggtgcgctcccttgacctcgatgactggccgcctgagctgctggctgtcatgactgccatgggcaatgccctcgccaacagcgtctgggagggggccttgggtggctactccaagccagggcctgatgcctgcagagaggagaaggaacgctggatacgggccaagtatgaacagaagctcttcctggccccactgccaagctcagatgtgccactggggcagcagctgctccgggccgtggtggaagatgacctgcggctgttggtgatgctcctggcacatggctccaaagaggaggtgaatgagacctatggggacggggacgggcggacggctctacatctctccagtgccatggccaacgttgtcttcacgcagctgctcatctggtacggggtggacgtgaggagccgggacgcccggggcctgactccactggcatatgctcgccgggccggcagccaggagtgtgcagacatcttgatccagcatggctgccctggggagggctgtggcttagcgcctacccccaacagagagcctgccaatggcaccaacccctctgctgagctgcaccgtagtcctagcctcctataaggcccaggaagagggcagaggggccagaaggactccatggcccaaagaccctcctccctgcaggcactgtgggaacagacacagagatggagaagcagggacatgctgagaggacgaagccaaggaaattagggaggagagtcaaagggatcaaggagagttggggatttgagctgcagcagagagggatgagggatttagccctctgccctaaggtgccattgaaaagggacaggacccttcggaggtgcctgtgaggagaggggagcaggacctctccctcctccagatccctgcctcctagtgccagcccctcacacgccttcatcctgaaacaggaagaggacggcaccaagttgggggtgctggatgaaagagacgaggggtgatctgtgagtcccatgtaaactttgtacattggaatatttatgtttgtgtacatatttgatgtgtgtgtgtatgatgagccaataaaccagactgtgtgcgtggcc

SEQ ID NO: 2776 - protein, 580 aa, Homosapiens
MVLVGTQDAISAANPRVIDDSRARKLSTDLKRCTYYETCATYGLNVERVFQDVAQKVVALRKKQQLAIGPCKSLPNSPSHSAVSAASIPAVHINQATNGGGSAFSDYSSSVPSTPSISQRELRIETIAASSTPTPIRKQSKRRSNIFTSRKGADLDREKKAAECKVDSIGSGRAIPIKQGILLKRSGKSLNKEWKKKYVTLCDNGLLTYHPSLHDYMQNIHGKEIDLLRTTVKVPGKRLPRATPATAPGTSPRANGLSVERSNTQLGGGTEAEESFEFVVVSLTGQTWHFEASTAEERELWVQSVQAQILASLQGCRSAKDKTRLGNQNAALAVQAVRTVRGNSFCIDCDAPNPDWASLNLGALMCIECSGIHRHLGAHLSRVRSLDLDDWPPELLAVMTAMGNALANSVWEGALGGYSKPGPDACREEKERWIRAKYEQKLFLAPLPSSDVPLGQQLLRAVVEDDLRLLVMLLAHGSKEEVNETYGDGDGRTALHLSSAMANVVFTQLLIWYGVDVRSRDARGLTPLAYARRAGSQECADILIQHGCPGEGCGLAPTPNREPANGTNPSAELHRSPSLL

SEQ ID NO: 2777 - DNA, 3126 bp, Homosapiens
gccatgaacttccaggcgggcggggggcagagcccgcagcagcagcagacagctggccggcgggcccccccagcagttcgcgctctccaactccgcggccatccgggccgagatccagcgcttcgagtccgtgcatcccaatatctacgccatctacgacctgatcgagcgcatcgaggatttggcgctgcagaaccagatccgggagcacgtcatctccatcgaggactcgtttgtgaacagccaggagtggacgctgagccgctccgtaccggagcttaaagtgggcatagtggggaacctgtctagcgggaagtcagccctggtgcaccgctatctgacggggacctatgtccaggaggagtcccctgaaggggggcggtttaagaaggagattgtggtggatggccagagttacctgctgctgatccgagatgaaggaggcccccctgagctccagtttgctgcctgggtggatgcagtggtgtttgtgttcagcctggaggatgaaatcagtttccagacggtgtacaactacttcctgcgtctctgcagcttccgcaacgccagcgaggtgcccatggtgcttgtgggcacgcaggatgccatcagcgctgcgaatccccgggttatcgacgacagcagagcccgcaagctctccacagatctgaagcggtgcacctactatgagacgtgcgcgacctacgggctcaatgtggagcgtgtcttccaggacgtggcccagaaggtagtggccttgcgaaagaagcagcaactggccatcgggccctgcaagtcactgcccaactcgcccagccactcggccgtgtccgccgcctccatcccggccgtgcacatcaaccaggccacgaatggcggcggcagcgccttcagcgactactcgtcctcagtcccctccacccccagcatcagccagcgggagctgcgcatcgagaccatcgctgcctcctccacccccacacccatccgaaagcagtccaagcggcgctccaacatcttcacgtctcggaagggtgctgacctggaccgggagaagaaggctgccgagtgcaaggtggacagcatcgggagcggccgcgccatccccatcaagcaggggatcctgctaaagcggagcggcaagtccctgaacaaggagtggaagaagaagtatgtgacgctctgtgacaacgggctgctcacctatcaccccagcctgcatgattacatgcagaacatccacggcaaggagattgacctgctgcggacaacggtgaaagtgccagggaagcgcctgccccgagccacacctgccacagccccgggcaccagcccccgtgccaacgggctgtccgtggagcggagtaacacacagctgggtgggggcacaggtgccccccactcggccagcagcgcatccctgcactctgagcgccccctcagcagctcggcctgggctggcccgcgccctgaggggctgcaccagcgctcctgctccgtttccagcgccgaccagtggagtgaggccaccacttccctgcccccaggcatgcagcaccctgccagtggcccagctgaggtactcagttccagccccaagctggatcctcccccatctccccactccaaccggaagaagcaccggaggaaaaagagcaccgggaccccccgaccagacggccccagcagtgctactgaagaggcagaggagtcgtttgaatttgtggtggtgtccctcactgggcagacgtggcacttcgaggcttcaacggcggaggagcgggagctgtgggttcagagtgtgcaggcccagatccttgccagcctgcaaggctgccgcagtgccaaggacaagactcgactggggaaccagaacgcagctctggctgtgcaggccgtccgcaccgtccgcggcaacagcttttgtatcgactgcgatgcacccaatccagactgggccagcctgaacctgggtgccctgatgtgcattgagtgctcaggcatccaccgacacctgggggctcacctgtcccgggtgcgctcccttgacctcgatgactggccgcctgagctgctggctgtcatgactgccatgggcaatgccctcgccaacagcgtctgggagggggccttgggtggctactccaagccagggcctgatgcctgcagagaggagaaggaacgctggatacgggccaagtatgaacagaagctcttcctggccccactgccaagctcagatgtgccactggggcagcagctgctccgggccgtggtggaagatgacctgcggctgttggtgatgctcctggcacatggctccaaagaggaggtgaatgagacctatggggacggggacgggcggacggctctacatctctccagtgccatggccaacgttgtcttcacgcagctgctcatctggtacggggtggacgtgaggagccgggacgcccggggcctgactccactggcatatgctcgccgggccggcagccaggagtgtgcagacatcttgatccagcatggctgccctggggagggctgtggcttagcgcctacccccaacagagagcctgccaatggcaccaacccctctgctgagctgcaccgtagtcctagcctcctataaggcccaggaagagggcagaggggccagaaggactccatggcccaaagaccctcctccctgcaggcactgtgggaacagacacagagatggagaagcagggacatgctgagaggacgaagccaaggaaattagggaggagagtcaaagggatcaaggagagttggggatttgagctgcagcagagagggatgagggatttagccctctgccctaaggtgccattgaaaagggacaggacccttcggaggtgcctgtgaggagaggggagcaggacctctccctcctccagatccctgcctcctagtgccagcccctcacacgccttcatcctgaaacaggaagaggacggcaccaagttgggggtgctggatgaaagagacgaggggtgatctgtgagtcccatgtaaactttgtacattggaatatttatgtttgtgtacatatttgatgtgtgtgtgtatgatgagccaataaaccagactgtgtgcgtggcc

SEQ ID NO: 2778 - protein, 683 aa, Homosapiens
MVLVGTQDAISAANPRVIDDSRARKLSTDLKRCTYYETCATYGLNVERVFQDVAQKVVALRKKQQLAIGPCKSLPNSPSHSAVSAASIPAVHINQATNGGGSAFSDYSSSVPSTPSISQRELRIETIAASSTPTPIRKQSKRRSNIFTSRKGADLDREKKAAECKVDSIGSGRAIPIKQGILLKRSGKSLNKEWKKKYVTLCDNGLLTYHPSLHDYMQNIHGKEIDLLRTTVKVPGKRLPRATPATAPGTSPRANGLSVERSNTQLGGGTGAPHSASSASLHSERPLSSSAWAGPRPEGLHQRSCSVSSADQWSEATTSLPPGMQHPASGPAEVLSSSPKLDPPPSPHSNRKKHRRKKSTGTPRPDGPSSATEEAEESFEFVVVSLTGQTWHFEASTAEERELWVQSVQAQILASLQGCRSAKDKTRLGNQNAALAVQAVRTVRGNSFCIDCDAPNPDWASLNLGALMCIECSGIHRHLGAHLSRVRSLDLDDWPPELLAVMTAMGNALANSVWEGALGGYSKPGPDACREEKERWIRAKYEQKLFLAPLPSSDVPLGQQLLRAVVEDDLRLLVMLLAHGSKEEVNETYGDGDGRTALHLSSAMANVVFTQLLIWYGVDVRSRDARGLTPLAYARRAGSQECADILIQHGCPGEGCGLAPTPNREPANGTNPSAELHRSPSLL

SEQ ID NO: 2779 - DNA, 858 bp, Homosapiens
ccggcgggcccccccagcagttcgcgctctccaactccgcggccatccgggccgagatccagcgcttcgagtccgtgcatcccaatatctacgccatctacgacctgatcgagcgcatcgaggatttggcgctgcagaaccagatccgggagcacgtcatctccatcgaggactcgtttgtgaacagccaggagtggacgctgagccgctccgtaccggagcttaaagtgggcatagtggggaacctgtctagcgggaagtcagccctggtgcaccgctatctgacggggacctatgtccaggaggagtcccctgaaggggggcggtttaagaaggagattgtggtggatggccagagttacctgctgctgatccgagatgaaggaggcccccctgagctccagtttgctgcctgggtggatgcagtggtgtttgtgttcagcctggaggatgaaatcagtttccagacggtgtacaactacttcctgcgtctctgcagcttccgcaacgccagcgaggtgcccatggtgcttgtgggcacgcagggtgaggcggggccctgcaggagctggcagagagcaggaagtcccgggcaacgatgcatgggggcaggggtgggcaggtgtgagaaagcccccaagcccctactcttttcccagtgctgactgggaccctcagcactctccgtgctgctcgtgtctgagggcttttgcccccactgaaacctgctgtccctgtgactagcaggtctgtgtttttttagatgaataaacgtgctcagagcttaagtgcttgctggtttgcactcagtgaggccatggaagggttgaaatgagacccaggcacccgcgttcttgg

SEQ ID NO: 2780 - protein, 121 aa, Homosapiens
MKEAPLSSSLLPGWMQWCLCSAWRMKSVSRRCTTTSCVSAASATPARCPWCLWARRVRRGPAGAGREQEVPGNDAWGQGWAGVRKPPSPYSFPSADWDPQHSPCCSCLRAFAPTETCCPCD

SEQ ID NO: 2781 - DNA, 2675 bp, Homosapiens
gccggaggtccgtgcgccccggccgcggccccggcccgggcccagccccgtgcccctcgccatgggcctggcccgcgcccgccggccctgagcatggagcggggctggccgcagggggacagctgtcccggggagcggcccgccgcttgccgccgcgcccacagcgtctgcgactcgctggacctgcacggcgcctcggccggccgcgctgccgccgccctgcaggccgccctctgcgccgccagtgagcagccggcgcggccgcggagcgtgtgctcgggcggcccggagccgccgcccaccggcgcccgcggccttttgctcggcctcctgcgcccgcgcctcggccgccggggcctggcgccctcgggaccgcccgtctcgcctgcgcccagccccgcgtccagccccgcgccgacccggcgcagccgcacccgcggggagccgactccgcggccccggccggccagcatgactttcctggaggtgaaccgcctggagctggcggccgccgaggcgccgggcgcgggtctggggcgcgcgggcagcgcgggcttcctgcgcggcgcggcgttgtggagcagccagcgctggccagtgctgcgcggcgggcgcgggccggaggggccccggcgcggcctggcggcgctcaggaagagcttcagcttccgcctgcgccgcggccaggaggtgcggcgctccgagtcagggctgctggcccggccgccgcgcgcgcgcacccgtagcgacggcgacgccggctccctaggcgccttccccagccgccgcgacctgctgggctccgacgccccgcgcgcagcgccggagcccggccgcccccgcaccgccgccggcctctggaggctgctcacgagccgcttccgccggagggagcccgcgcccgccgcgccgctgtggggccgtcgggcggctgcggccccggagctcctgcgcgcgcccagcgactcgtttgtgaacagccaggagtggacgctgagccgctccgtaccggagcttaaagtgggcatagtggggaacctgtctagcgggaagtcagccctggtgcaccgctatctgacggggacctatgtccaggaggagtcccctgaaggggggcggtttaagaaggagattgtggtggatggccagagttacctgctgctgatccgagatgaaggaggcccccctgagctccagtttgctgcctgggtggatgcagtggtgtttgtgttcagcctggaggatgaaatcagtttccagacggtgtacaactacttcctgcgtctctgcagcttccgcaacgccagcgaggtgcccatggtgcttgtgggcacgcaggatgccatcagcgctgcgaatccccgggttatcgacgacagcagagcccgcaagctctccacagatctgaagcggtgcacctactatgagacgtgcgcgacctacgggctcaatgtggagcgtgtcttccaggacgtggcccagaaggtagtggccttgcgaaagaagcagcaactggccatcgggccctgcaagtcactgcccaactcgcccagccactcggccgtgtccgccgcctccatcccggccgtgcacatcaaccaggccacgaatggcggcggcagcgccttcagcgactactcgtcctcagtcccctccacccccagcatcagccagcgggagctgcgcatcgagaccatcgctgcctcctccacccccacacccatccgaaagcagtccaagcggcgctccaacatcttcacgatatgtgccactgtttccaacttttcatcaacaaaaaggcctttccaactccttccaaattagaagaccagttggtgacacacagcacctctggacatgccccctgtgcggggccggaggcgggccgggccctgggactgctctcagatgagaagcggccgccgagctccccactccagagacccacgggaacctttgtaactaaccccacccccagggaaggctaggagcgccggagcccgcgctgggggctgccggggaccaggcccggccggacgctgcaggctcgctgcatggagaagaaggcagctcggccccacgcccggcgctggccagcgcgacgaggcccagaggggcgggggagtccaagcccgcccggcccggctgctcctggggggcgctttcctgcccctcccctcctctgctccttcctgcatggacctctgccgttcctgctcctgctccggaagccgccgccgccgccgcgcttgccttgccccctctttttggcctccccctatttcctaggatccgcattcgggtggactctgccccaggagcttgacagggtgcagggcctcttctggcctctctcctctctctgtccatccactgtgccccttgggccacgccgacgcgctcggtgccacgtgccgtgtggtgtctgtgccgcagacgggccatctgcccgctcacttgtggactttgcgctcccggttgtcgcgccctgtgctcccgaccagcagccccaccgtccacctcctcgcccccgcttctcttacgcccccgccccgggcgtgctcctcgcgccctcggcctctctgtccttgctcttttgtaaggggcgggcccggctcagtgacctgtgctgctctgtatggtgccgtgtgtaagaataaacccgttggaatact

SEQ ID NO: 2782 - protein, 576 aa, Homosapiens
MERGWPQGDSCPGERPAACRRAHSVCDSLDLHGASAGRAAAALQAALCAASEQPARPRSVCSGGPEPPPTGARGLLLGLLRPRLGRRGLAPSGPPVSPAPSPASSPAPTRRSRTRGEPTPRPRPASMTFLEVNRLELAAAEAPGAGLGRAGSAGFLRGAALWSSQRWPVLRGGRGPEGPRRGLAALRKSFSFRLRRGQEVRRSESGLLARPPRARTRSDGDAGSLGAFPSRRDLLGSDAPRAAPEPGRPRTAAGLWRLLTSRFRRREPAPAAPLWGRRAAAAPELLRAPSDSFVNSQEWTLSRSVPELKVGIVGNLSSGKSALVHRYLTGTYVQEESPEGGRFKKEIVVDGQSYLLLIRDEGGPPELQFAAWVDAVVFVFSLEDEISFQTVYNYFLRLCSFRNASEVPMVLVGTQDAISAANPRVIDDSRARKLSTDLKRCTYYETCATYGLNVERVFQDVAQKVVALRKKQQLAIGPCKSLPNSPSHSAVSAASIPAVHINQATNGGGSAFSDYSSSVPSTPSISQRELRIETIAASSTPTPIRKQSKRRSNIFTICATVSNFSSTKRPFQLLPN

SEQ ID NO: 2783 - DNA, 416 bp, Homosapiens
caccaggccctttgcacacctgcccttgggccaaatgccccccaaggaaattagggaggagagtcaaagggatcaaggagagttggggatttgagctgcagcagagagggatgagggatttagccctctgccctaaggtgccattgaaaagggacaggacccttcggaggtgcctgtgaggagaggggagcaggacctctccctcctccagatccctgcctcctagtgccagcccctcacacgccttcatcctgaaacaggaagaggacggcaccaagttgggggtgctggatgaaagagacgaggggtgatctgtgagtcccatgtaaactttgtacattggaatatttatgtttgtgtacatatttgatgtgtgtgtgtatgatgagccaataaaccagactgtgtgcgtggcc

SEQ ID NO: 2784 - protein, 43 aa, Homosapiens
GEGSRTSPSSRSLPPSASPSHAFILKQEEDGTKLGVLDERDEG

SEQ ID NO: 2785 - DNA, 1233 bp, Homosapiens
gtgggtataattgactctgctgtcccctgcagtggcccagaaggtagtggccttgcgaaagaagcagcaactggccatcgggccctgcaagtcactgcccaactcgcccagccactcggccgtgtccgccgcctccatcccggccgtgcacatcaaccaggccacgaatggcggcggcagcgccttcagcgactactcgtcctcagtcccctccacccccagcatcagccagcgggagctgcgcatcgagaccatcgctgcctcctccacccccacacccatccgaaagcagtccaagcggcgctccaacatcttcacgatatgtgccactgtttccaacttttcatcaacaaaaaggcctttccaactccttccaaattagaagaccagttggtgacacacagcacctctggacatgccccctgtgcggggccggaggcgggccgggccctgggactgctctcagatgagaagcggccgccgagctccccactccagagacccacgggaacctttgtaactaaccccacccccagggaaggctaggagcgccggagcccgcgctgggggctgccggggaccaggcccggccggacgctgcaggctcgctgcatggagaagaaggcagctcggccccacgcccggcgctggccagcgcgacgaggcccagaggggcgggggagtccaagcccgcccggcccggctgctcctggggggcgctttcctgcccctcccctcctctgctccttcctgcatggacctctgccgttcctgctcctgctccggaagccgccgccgccgccgcgcttgccttgccccctctttttggcctccccctatttcctaggatccgcattcgggtggactctgccccaggagcttgacagggtgcagggcctcttctggcctctctcctctctctgtccatccactgtgccccttgggccacgccgacgcgctcggtgccacgtgccgtgtggtgtctgtgccgcagacgggccatctgcccgctcacttgtggactttgcgctcccggttgtcgcgccctgtgctcccgaccagcagccccaccgtccacctcctcgcccccgcttctcttacgcccccgccccgggcgtgctcctcgcgccctcggcctctctgtccttgctcttttgtaaggggcgggcccggctcagtgacctgtgctgctctgtatggtgccgtgtgtaagaataaacccgttggaatact

SEQ ID NO: 2786 - protein, 100 aa, Homosapiens
MAAAAPSATTRPQSPPPPASASGSCASRPSLPPPPPHPSESSPSGAPTSSRYVPLFPTFHQQKGLSNSFQIRRPVGDTQHLWTCPLCGAGGGPGPGTALR

SEQ ID NO: 2787 - DNA, 1461 bp, Homosapiens
gtgggtataattgactctgctgtcccctgcagtggcccagaaggtagtggccttgcgaaagaagcagcaactggccatcgggccctgcaagtcactgcccaactcgcccagccactcggccgtgtccgccgcctccatcccggccgtgcacatcaaccaggccacgaatggcggcggcagcgccttcagcgactactcgtcctcagtcccctccacccccagcatcagccagcgggagctgcgcatcgagaccatcgctgcctcctccacccccacacccatccgaaagcagtccaagcggcgctccaacatcttcacgatatgtgccactgtttccaacttttcatcaacaaaaaggcctttccaactccttccaaattagaagaccagttggtgacacacagcacctctggacatgccccctgtgcggggccggaggcgggccgggccctgggactgctctcagatgagaagcggccgccgagctccccactccagagacccacgggaacctttgtaactaaccccacccccagggaaggctaggagcgccggagcccgcgctgggggctgccggggaccaggcccggccggacgctgcaggctcgctgcatggagaagaaggcagctcggccccacgcccggcgctggccagcgcgacgaggcccagaggggcgggggagtccaagcccgcccggcccggctgctcctggggggcgctttcctgcccctcccctcctctgctccttcctgcatggacctctgccgttcctgctcctgctccggaagccgccgccgccgccgcgcttgccttgccccctctttttggcctccccctatttcctaggatccgcattcgggtggactctgccccaggagcttgacagggtgcagggcctcttctggcctctctcctctctctgtccatccactgtgccccttgggccacgccgacgcgctcggtgccacgtgccgtgtggtgtctgtgccgcagacgggccatctgcccgctcacttgtggactttgcgctcccggttgtcgcgccctgtgctcccgaccagcagccccaccgtccacctcctcgcccccgcttctcttacgcccccgccccgggcgtgctcctcgcgccctcggcctctctgtccttgctcttttgtaaggggcgggcccggctcagtgacctgtgctgctctgtatggtgccgtgtgtaagaataaacccgttggaatactcgtggtctcagttccttcccgtcccgccgccccggcccgacccactgctagggctgcccaggaggagggaggcaggagggaggccgggaagtccaggtgggcagctctcggcagaccctgggcctctttaacacgcctcttgttttctcttccagtctcggaagggtgctgacctggaccgggagaagaaggctgccgagtgcaaggtggacagcatcgggagcggcc

SEQ ID NO: 2788 - protein, 100 aa, Homosapiens; identical to SEQ ID NO: 2786

SEQ ID NO: 2789 - DNA, 328 bp, Homosapiens
ggagcggcaagtccctgaacaaggagtggaagaagaagtatgtgacgctctgtgacaacgggctgctcacctatcaccccagcctgcatcaagggtctcgcctgagccccaagggcatcgggactggtgactcacctatggatgggggccggggagacaggacacacagaagatgagttcgtgggccagccctgagccccgcgcccgattctcgccggcccaagagagcccgccgcagcctcccccattttgcagccagcggagccattcacacaatcaccttctgttaattctatctgcaacatcaattaaattgtttgtagaaact

SEQ ID NO: 2790 - protein, 51 aa, Homosapiens
MSSWASPEPRARFSPAQESPPQPPPFCSQRSHSHNHLLLILSATSIKLFVE

SEQ ID NO: 2791 - DNA, 3756 bp, Homosapiens
cagtaattaggcagctccctgattgtttctaattctgctattaattgtgaggagcggggagtgtgattgaggataaatttggtgcggagctgctggggcttcagctccccgtgagttccctgggctgccttccacccctccaggctgcagaggcagcttcctccctttgcctccatcctgctctgcctaagtttcctattctctttccacattttcctcctccaaggctggggagctttgggactgggaagcccaggcagacctcgcctagagagaggtgtccgtctggctctcctgagtgtggcccagctacagttggcaggactggtcctctcctcctcccagtgccctgcgcccctcccctcctctgcctcccttcttcccacacttctccaactctcccctcaccagccagtggcccagctgaggtactcagttccagccccaagctggatcctcccccatctccccactccaaccggaagaagcaccggaggaaaaagagcaccgggaccccccgaccagacggccccagcagtgctactgaaggttagggggacccagagggaaaccgggcacaggaggtgggcagtgggacttggggatagtaccctaaaagtaacacctattttttattttttgtattcagtggattaagcactttctagtagttgctaatcaaagtagttctacagcttcttttggtaatctagacctggtatcttagaaaagttcttctgataactgaaaccctttctgttgaaatgtgggcttacttcatttattcttaaggtaaaagacagcagactgctacatcaatagctcctctaagatgttcgggcaggacctgtgttttctgtctcttgtgtcataccgagtttaataaagtgctgggtacttactaggtgcgtaatacatgtgtacagattggctgagtctctcattagttttccttaggctaaggaattccaggtcctgaagccttcttccataggacctttctcttcctctattaattatactgctgctcctcagattttcctcaaagtatcttcaaaacctccctcttcttggtgattggagtttctttgctcccaaataagtttaacttctacagactcataatttctcacttctgctctaatcatcagggtagacgtatgggtcaggggagcagagacacctagccaacctgtgacacagtgatgcttagtacttacagcgtggggtctcccttctggtccggcagactaagccccacaaatgatcatggagatcacgtagttcgaaggctgtggttgaaagcaaggtgaggcgcagtggtggtgcctggggaaggaggcgccggttctatttctgtgggaaggcagttctgctaacagtccctgagagcaagggcccagcagaggaggaattccaggggatgtcggtgtcactgaggtgaggctgcctggggccaagatgcagtgaggacttacaagcagagatggccttggcagaactggggttcaccctggggccttaccacaggcacctgtgctgtctttccagcccccaggacacagtcacactgcttgttaggaattgttcacccatggggcagtgaccattgggaatgagattcatgcggctgtcttctggggcctgggggaccagagcttggaagagcttcaccacattgcttgggttcacagtccagccctcagtgcttgtcagtacagatgccctcaggcccctatttgctcacatactgcaggtcctgtagaaaacctctcctcctctcccccatccacttgcccttcctgcctgtctatgccatggtagtgggggaggggcccagctcccaggagccccacgctgacgccgtcaggaatattgggtttaatgagctgcaaaatgaggcggctgcagctgacatgtacggatggtgcccacacccgccttcccccaccctctcccagtgtttgcctcctagcaccccgtcacatccttctccagatactcagctctttctgtgggatgcacccctctctggtttcacacccattcccggcagtgccaggggtgccaagatcttgcatcccccatctgttttcacttaagctccacaggtggttaggaatgagaactgggagctcacactagtcttgcaggtttactctggcctccccctgcaagctgtcctggagtgtgtggccttgcagctggggaagggtctaggggaggacacttgccagtggagcagggtagtgagtggagttgtggcgatagcatgccctgggtgtgcacgcaggccaggagccctgatggcataaacacccccccaacagaggcagaggagtcgtttgaatttgtggtggtgtccctcactgggcagacgtggcacttcgaggcttcaacggcggaggagcgggagctgtgggttcagagtgtgcaggcccagatccttgccagcctgcaaggctgccgcagtgccaaggacaagactcgactggggaaccagaacgcagctctggctgtgcaggccgtccgcaccgtccgcggcaacagcttttgtatcgactgcgatgcacccaatccagactgggccagcctgaacctgggtgccctgatgtgcattgagtgctcaggcatccaccgacacctgggggctcacctgtcccgggtgcgctcccttgacctcgatgactggccgcctgagctgctggctgtcatgactgccatgggcaatgccctcgccaacagcgtctgggagggggccttgggtggctactccaagccagggcctgatgcctgcagagaggagaaggaacgctggatacgggccaagtatgaacagaagctcttcctggccccactgccaagctcagatgtgccactggggcagcagctgctccgggccgtggtggaagatgacctgcggctgttggtgatgctcctggcacatggctccaaagaggaggtgaatgagacctatggggacggggacgggcggacggctctacatctctccagtgccatggccaacgttgtcttcacgcagctgctcatctggtacggggtggacgtgaggagccgggacgcccggggcctgactccactggcatatgctcgccgggccggcagccaggagtgtgcagacatcttgatccagcatggctgccctggggagggctgtggcttagcgcctacccccaacagagagcctgccaatggcaccaacccctctgctgagctgcaccgtagtcctagcctcctataaggcccaggaagagggcagaggggccagaaggactccatggcccaaagaccctcctccctgcaggcactgtgggaacagacacagagatggagaagcagggacatgctgagaggacgaagccaaggaaattagggaggagagtcaaagggatcaaggagagttggggatttgagctgcagcagagagggatgagggatttagccctctgccctaaggtgccattgaaaagggacaggacccttcggaggtgcctgtgaggagaggggagcaggacctctccctcctccagatccctgcctcctagtgccagcccctcacacgccttcatcctgaaacaggaagaggacggcaccaagttgggggtgctggatgaaagagacgaggggtgatctgtgagtcccatgtaaactttgtacattggaatatttatgtttgtgtacatatttgatgtgtgtgtgtatgatgagccaataaaccagactgtgtgcgtggcc

SEQ ID NO: 2792 - protein, 329 aa, Homosapiens
MPWVCTQARSPDGINTPPTEAEESFEFVVVSLTGQTWHFEASTAEERELWVQSVQAQILASLQGCRSAKDKTRLGNQNAALAVQAVRTVRGNSFCIDCDAPNPDWASLNLGALMCIECSGIHRHLGAHLSRVRSLDLDDWPPELLAVMTAMGNALANSVWEGALGGYSKPGPDACREEKERWIRAKYEQKLFLAPLPSSDVPLGQQLLRAVVEDDLRLLVMLLAHGSKEEVNETYGDGDGRTALHLSSAMANVVFTQLLIWYGVDVRSRDARGLTPLAYARRAGSQECADILIQHGCPGEGCGLAPTPNREPANGTNPSAELHRSPSLL

SEQ ID NO: 2793 - DNA, 345 bp, Homosapiens
ggcactgtgggaacagacacagagatggagaagcaagggatgagggatttagccctctgccctaaggtgccattgaaaagggacaggacccttcggaggtgcctgtgaggagaggggagcaggacctctccctcctccagatccctgcctcctagtgccagcccctcacacgccttcatcctgaaacaggaagaggacggcaccaagttgggggtgctggatgaaagagacgaggggtgatctgtgagtcccatgtaaactttgtacattggaatatttatgtttgtgtacatatttgatgtgtgtgtgtatgatgagccaataaaccagactgtgtgcgtggcc

SEQ ID NO: 2794 - protein, 43 aa, Homosapiens; identical to SEQ ID NO: 2784

SEQ ID NO: 2795 - DNA, 1074 bp, Homosapiens
atgggcgggaacctggtgcgcgaggcccactcctgtcgagggcctgcggggcgccccgtggagaccgcggctcgggtgggggtcccgggggacgccctagtgctcgatggtttgttccgcagccgttccagggcctgctgcgttcaggcaccgccgcacgggggcaaggactgccctccaggcccccaccagggtccgcttgcgcggggtagccggagcgcggcgcacaggaggaagcggcagttgtgcgctgctgccaccagagggcacccgcggccaggcccgacgctgcccaccatgagaggactttctctggccaatgagtggattggagagagagggagcgcggcgccggagccacactgcgccgagcccgcgccccgccgccacctcggcccgggagccagggagcgagccctgcgtgcgctggcccctgcgccgctgcccgctggcctcccgcccctcgccccgctagcctctttcgccggccgccttaccaacaccttctgcgcggggctggcagaggggaaggtgtacagctcagatgaggagaagctggaggcatcagcaggagacccagcaggcagcgaacaggaggaagagggctcaggcggtgacagcgaggatgacggtttcctggacagttctgcagggggcccaggggctcttctgggacctaaaccgaagctaaagggaagcctggggactggagctgaggagggggcaccggtgacagcaggggtcacagctcctggggggaaaagccgacggcgccgcacagcatttaccagcgagcagcttttggaattggagaaggaatttcattgcaagaaatacctgagcttgacagagcgctctcagatcgcccacgccctcaagctcagtgaggtgcaggtcaagatctggtttcagaatcgacgggccaagtggaagcgcatcaaagctggcaatgtgagcagccgttctggggagcccgtaagaaaccccaagattgttgtccccatacctgtgcatgtcaacaggtttgctgtgcggagccagcaccaacaaatggagcagggggcccggccctga

SEQ ID NO: 2796 - protein, 357 aa, Homosapiens
MGGNLVREAHSCRGPAGRPVETAARVGVPGDALVLDGLFRSRSRACCVQAPPHGGKDCPPGPHQGPLARGSRSAAHRRKRQLCAAATRGHPRPGPTLPTMRGLSLANEWIGERGSAAPEPHCAEPAPRRHLGPGARERALRALAPAPLPAGLPPLAPLASFAGRLTNTFCAGLAEGKVYSSDEEKLEASAGDPAGSEQEEEGSGGDSEDDGFLDSSAGGPGALLGPKPKLKGSLGTGAEEGAPVTAGVTAPGGKSRRRRTAFTSEQLLELEKEFHCKKYLSLTERSQIAHALKLSEVQVKIWFQNRRAKWKRIKAGNVSSRSGEPVRNPKIVVPIPVHVNRFAVRSQHQQMEQGARP

SEQ ID NO: 2797 - DNA, 1071 bp, Homosapiens
atggctcaggtgacagcgaaaggcccaggtttagaaaaacagaaccagttctgcctattgcctgacacgttgtgcgctgctgccaccagagggcacccgcggccaggcccgacgctgcccaccatgagaggactttctctggccaatgagtggattggagagagagggagcgcggcgccggagccacactgcgccgagcccgcgccccgccgccacctcggcccgggagccagggagcgagccctgcgtcgggccggaggcggtagcgcccctgggggcaacggcgggggcggcggcgggggcccgggcactgccttctccatcgactccctaatcgggccgccgccgccgcgctccggccacttgctgtacaccggctaccccatgttcatgccctaccggccgctcgtgctgccgcaggcgctggcccctgcgccgctgcccgctggcctcccgcccctcgccccgctagcctctttcgccggccgccttaccaacaccttctgcgcggggctggcagaggggaaggtgtacagctcagatgaggagaagctggaggcatcagcaggagacccagcaggcagcgaacaggaggaagagggctcaggcggtgacagcgaggatgacggtttcctggacagttctgcagggggcccaggggctcttctgggacctaaaccgaagctaaagggaagcctggggactggagctgaggagggggcaccggtgacagcaggggtcacagctcctggggggaaaagccgacggcgccgcacagcatttaccagcgagcagcttttggaattggagaaggaatttcattgcaagaaatacctgagcttgacagagcgctctcagatcgcccacgccctcaagctcagtgaggtgcaggtcaagatctggtttcagaatcgacgggccaagtggaagcgcatcaaagctggcaatgtgagcagccgttctggggagcccgtaagaaaccccaagattgttgtccccatacctgtgcatgtcaacaggtttgctgtgcggagccagcaccaacaaatggagcagggggcccggccctga

SEQ ID NO: 2798 - protein, 356 aa, Homosapiens
MAQVTAKGPGLEKQNQFCLLPDTLCAAATRGHPRPGPTLPTMRGLSLANEWIGERGSAAPEPHCAEPAPRRHLGPGARERALRRAGGGSAPGGNGGGGGGGPGTAFSIDSLIGPPPPRSGHLLYTGYPMFMPYRPLVLPQALAPAPLPAGLPPLAPLASFAGRLTNTFCAGLAEGKVYSSDEEKLEASAGDPAGSEQEEEGSGGDSEDDGFLDSSAGGPGALLGPKPKLKGSLGTGAEEGAPVTAGVTAPGGKSRRRRTAFTSEQLLELEKEFHCKKYLSLTERSQIAHALKLSEVQVKIWFQNRRAKWKRIKAGNVSSRSGEPVRNPKIVVPIPVHVNRFAVRSQHQQMEQGARP

SEQ ID NO: 2799 - DNA, 1686 bp, Homosapiens
tttccctgcccacatgctcatgagttggtctccagaagagtgcaaggggcagggagagcccctcgatgacagacaccccctctgtgccaggctggtggagaagcccagcagagggtctgaggagcacctcaagtctggcccgggacccatcgtcacccgcacagcctcaggacctgcccttgccttctggcaggcagtgctggctggggacgtgggctgtgtctcccgcatcctcgcggactccagtactggcctggctcctgattccgtctttgataccagcgacccagagcgatggagggatttccgcttcaacatccgtgctctgagactctggtctctgacatacgaagaggagctgaccaccccactgcatgtggcagccagccgtggccacacggaagtcctgcggctgctgctgaggcggcgagcaaggccagacagtgcccctgggggccgcaccgccctgcacgaggcctgtgctgcaggccacactgcctgtgttcatgtgctgctggtggcaggagccgaccccaacatcgctgaccaggatgggaaacgccccctgcatctctgccgggggcctggcacccttgagtgtgcggagctgctcctcaggtttggagcgagagtggatggtcggtccgaggaagaagaggagacccctttgcatgtggccgcccggcttggccatgtggagctggcagatctgcttctaagacggggggcatgtcctgatgcccgcaatgccgaaggctggaccccactgctggctgcctgtgacgtccgctgccagtccatcaccgatgccgaggccaccaccgcccgctgcctgcagctgtgcagcttgctgctttcagctggagcagacgctgatgctgcggaccaggacaagcagcgacccctgcacctggcctgccgccgtggccatgcagctgtcgtggagctgctcctgtcctgtggtgtcagcgccaacaccatggactatgggggacacacgcccctgcactgtgctctgcagggcccagctgcagccctggcccagagccccgagcacgtggttcgggctctgctcaaccatggcgccgtccgtgtctggccaggggccctccccaaggtgctggagcgctggagcacgtgccctcggaccatcgaggtcctgatgaacacctacagtgttgtgcagcttcccgaggaggccgtcggcctggtgactcctgaaactctgcagaaacatcagcgtttctactcctccctcttcgccttggtgaggcagcccaggtcgctgcagcatttgagccgctgtgcgctccgctcccacctggagggcagcctgccccaagcgctgccccgcctccccctgccaccgcgcctgctccgctacctgcagctggattttgagggcgtgctctactagatgtccatggccttttgagagggcctgaaagcagatgccccagcctgcagagggcgcgcctctgcactaactcaggccaggtagccctggcagcaggaggcccagctccgcaggcaggtgtggatgctgcaattcccaatgcagagaagcggaccgacagcggcagccgggtgatgtctgatgaagacacactcctactggggctctcctgaggcccccttctagcctgtgcaaaccctgtatgtgcattaaaaatctccaggtctgtg

SEQ ID NO: 2800 - protein, 467 aa, Homosapiens
MLMSWSPEECKGQGEPLDDRHPLCARLVEKPSRGSEEHLKSGPGPIVTRTASGPALAFWQAVLAGDVGCVSRILADSSTGLAPDSVFDTSDPERWRDFRFNIRALRLWSLTYEEELTTPLHVAASRGHTEVLRLLLRRRARPDSAPGGRTALHEACAAGHTACVHVLLVAGADPNIADQDGKRPLHLCRGPGTLECAELLLRFGARVDGRSEEEEETPLHVAARLGHVELADLLLRRGACPDARNAEGWTPLLAACDVRCQSITDAEATTARCLQLCSLLLSAGADADAADQDKQRPLHLACRRGHAAVVELLLSCGVSANTMDYGGHTPLHCALQGPAAALAQSPEHVVRALLNHGAVRVWPGALPKVLERWSTCPRTIEVLMNTYSVVQLPEEAVGLVTPETLQKHQRFYSSLFALVRQPRSLQHLSRCALRSHLEGSLPQALPRLPLPPRLLRYLQLDFEGVLY

SEQ ID NO: 2801 - DNA, 1820 bp, Homosapiens; identical to SEQ ID NO: 341

SEQ ID NO: 2802 - protein, 474 aa, Homosapiens
MRGQVSLGAWDTGAFCLSVFPSCSLSLSLPLAYTSPPPHSPFPAHMLMSWSPEECKGQGEPLDDRHPLCARLVEKPSRGSEEHLKSGPGPIVTRTASGPALAFWQAVLAGDVGCVSRILADSSTGLAPDSVFDTSDPERWRDFRFNIRALRLWSLTYEEELTTPLHVAASRGHTEVLRLLLRRRARPDSAPGGRTALHEACAAGHTACVHVLLVAGADPNIADQDGKRPLHLCRGPGTLECAELLLRFGARVDGRSEEEEETPLHVAARLGHVELADLLLRRGACPDARNAEGWTPLLAACDVRCQSITDAEATTARCLQLCSLLLSAGADADAADQDKQRPLHLACRRGHAAVVELLLSCGVSANTMDYGGHTPLHCALQGPAAALAQSPEHVVRALLNHGAVRVWPGALPKKHQRFYSSLFALVRQPRSLQHLSRCALRSHLEGSLPQALPRLPLPPRLLRYLQLDFEGVLY

SEQ ID NO: 2803 - DNA, 1738 bp, Homosapiens
cctgcgcctcccatgctgggccccacccagctcgggcccagcacccacctgcccagtccaccagcaacatcgctgggagtcgtgctgctttggctctcccagaacaagccatgccctggggaaagaactcctctccccactggggacaccatctggggtgccttccctccgccccggcctgccggatctggaggccccactcccgcccagcctgggagccccctcggccatcaccactgctctgccaagacatggccctgcagaatgccctctacaccggggacctggcaaggttgcaggagctgttccccccgcacagcacagccgacctgctgctggagagccgggccgcagagcctcgctggagcagccaccagaggggactctggtctctgacatacgaagaggagctgaccaccccactgcatgtggcagccagccgtggccacacggaagtcctgcggctgctgctgaggcggcgagcaaggccagacagtgcccctgggggccgcaccgccctgcacgaggcctgtgctgcaggccacactgcctgtgttcatgtgctgctggtggcaggagccgaccccaacatcgctgaccaggatgggaaacgccccctgcatctctgccgggggcctggcacccttgagtgtgcggagctgctcctcaggtttggagcgagagtggatggtcggtccgaggaagaagaggagacccctttgcatgtggccgcccggcttggccatgtggagctggcagatctgcttctaagacggggggcatgtcctgatgcccgcaatgccgaaggctggaccccactgctggctgcctgtgacgtccgctgccagtccatcaccgatgccgaggccaccaccgcccgctgcctgcagctgtgcagcttgctgctttcagctggagcagacgctgatgctgcggaccaggacaagcagcgacccctgcacctggcctgccgccgtggccatgcagctgtcgtggagctgctcctgtcctgtggtgtcagcgccaacaccatggactatgggggacacacgcccctgcactgtgctctgcagggcccagctgcagccctggcccagagccccgagcacgtggttcgggctctgctcaaccatggcgccgtccgtgtctggccaggggccctccccaaggtgctggagcgctggagcacgtgccctcggaccatcgaggtcctgatgaacacctacagtgttgtgcagcttcccgaggaggccgtcggcctggtgactcctgaaactctgcagaaacatcagcgtttctactcctccctcttcgccttggtgaggcagcccaggtcgctgcagcatttgagccgctgtgcgctccgctcccacctggagggcagcctgccccaagcgctgccccgcctccccctgccaccgcgcctgctccgctacctgcagctggattttgagggcgtgctctactagatgtccatggccttttgagagggcctgaaagcagatgccccagcctgcagagggcgcgcctctgcactaactcaggccaggtagccctggcagcaggaggcccagctccgcaggcaggtgtggatgctgcaattcccaatgcagagaagcggaccgacagcggcagccgggtgatgtctgatgaagacacactcctactggggctctcctgaggcccccttctagcctgtgcaaaccctgtatgtgcattaaaaatctccaggtctgtg

SEQ ID NO: 2804 - protein, 452 aa, Homosapiens
MPWGKNSSPHWGHHLGCLPSAPACRIWRPHSRPAWEPPRPSPLLCQDMALQNALYTGDLARLQELFPPHSTADLLLESRAAEPRWSSHQRGLWSLTYEEELTTPLHVAASRGHTEVLRLLLRRRARPDSAPGGRTALHEACAAGHTACVHVLLVAGADPNIADQDGKRPLHLCRGPGTLECAELLLRFGARVDGRSEEEEETPLHVAARLGHVELADLLLRRGACPDARNAEGWTPLLAACDVRCQSITDAEATTARCLQLCSLLLSAGADADAADQDKQRPLHLACRRGHAAVVELLLSCGVSANTMDYGGHTPLHCALQGPAAALAQSPEHVVRALLNHGAVRVWPGALPKVLERWSTCPRTIEVLMNTYSVVQLPEEAVGLVTPETLQKHQRFYSSLFALVRQPRSLQHLSRCALRSHLEGSLPQALPRLPLPPRLLRYLQLDFEGVLY

SEQ ID NO: 2805 - DNA, 569 bp, Homosapiens
gaccgtgtgatgctgattgggacaacctcccggccacagctggccgagatgcggggtctgtgccgggtctacgagcggatcctcttcatgccccggcctgactacgcatcccgctatgtgctctggaagcgtatgatagaggcccggggcatccagccgacccagcacctggacatcagtgccctagccaaggtctccgatggctacacgccgggtcacattctccaagccatccaatcggtgctgagtgagcggcggttcctgcaactgtccaagcggcccctggtggcctctgagttcctgggacaactggtgaagctggatccagtgtacagggaggaggaggagtccctgaaggactggtacttcaagaccccactgggcaagaagagcatgaaacacaggatggaccagttggaggccgaggaggccaagctggacaaggagaagaagaaaaggaagtgatggctaaggcttgcgggcacctgagattagtggcgtgggacagggcagtggcccaagggtaaagggatggggcagaggcataaatgcccagatgacttgggaac

SEQ ID NO: 2806 - protein, 151 aa, Homosapiens
MLIGTTSRPQLAEMRGLCRVYERILFMPRPDYASRYVLWKRMIEARGIQPTQHLDISALAKVSDGYTPGHILQAIQSVLSERRFLQLSKRPLVASEFLGQLVKLDPVYREEEESLKDWYFKTPLGKKSMKHRMDQLEAEEAKLDKEKKKRK

SEQ ID NO: 2807 - DNA, 1562 bp, Homosapiens
atgaggggctggggctgggcaggggagggcacacagggaggcaaggaacagggcacagtgacctacgcactcgtttccaaccagaaaacacctgggaagaaaactgggaaaaagaaggaaaaagatctgacctcagacaggtctgtggagtctctgtacgaagagcttgttatttctggccttctaaggaagagtgagtcagtagcattgaaagactacataggtgacttcctgtatcttggatccactctgagtttggtgaagaagttgcccatgccatccctgtttgacatacgacagaatgtggctttgtatgcggtccttcggcttggctccccggatatccacatcatggccccactcatccgctccatcctcctggtgggcccctctggcatggggaagaagatgctggtcaaggcagtgtgcacagaaactggcgccaacctgttcgacctgtcgccggaaaacctgctgggcaaatatcctggcaggaatggggcacagatgatggtgcatatagtctttaaggtccggagcccccagcttttggcatttgcggttctcagacctgtggcaacaaaggaggggggctttgaggtcacgtcacccatcagcctactgggtatgatttcaggtgctgaactggtagcccgactcctacagccctctgtgatttggattggaaatgctgagaagaatttctataagaagacccccaaagaagacaaggagatggacccaaagcggataaagaaggacctcaccaaggccttgcggctgctgactcccggagaccgtgtgatgctgattgggacaacctcccggccacagctggccgagatgcggggtctgtgccgggtctacgagcggatcctcttcatgccccggcctgactacgcatcccgctatggtgaggcctggggatgtggggacggctgcgcctaccaaagcctgcccacctcccgccccataccccattgctgctgcgagccctcacccccacagcccggtcttctggaagggctgctggacaagcagcccagtggcctgggtcctggctttggctctgtggacgcgagcaggccccatgtcttccacatgcctgcagtgctctggaagcgtatgatagaggcccggggcatccagccgacccagcacctggacatcagtgccctagccaaggtctccgatggctacacgccgggtcacattctccaagccatccaatcggtgctgagtgagcggcggttcctgcaactgtccaagcggcccctggtggcctctgagttcctgggacaactggtgaagctggatccagtgtacagggaggaggaggagtccctgaaggactggtacttcaagaccccactgggcaagaagagcatgaaacacaggatggaccagttggaggccgaggaggccaagctggacaaggagaagaagaaaaggaagtgatggctaaggcttgcgggcacctgagattagtggcgtgggacagggcagtggcccaagggtaaagggatggggcagaggcataaatgcccagatgacttgggaac

SEQ ID NO: 2808 - protein, 485 aa, Homosapiens; identical to SEQ ID NO: 727

SEQ ID NO: 2809 - DNA, 1305 bp, Homosapiens
ccaccaccagcaaacaaggggcagcgtggaggagtggacacaatgtctgagggagcttaccagcgcctctgggagtcctcccacgcgaccctgcaggagctgctggaccaagagcagcttctgctcgaacctgcgcccgaccgggagcggcagtccttccagtacaggctcgcatcgctctacctgcactacctggggctgctgcgccgcttcgacaccgtctatgaccagatggtgcagccgcagaagcggcggctgctgcgacgcctgctggacggcgtggcgggccgcgtgctggagctcaaggacgagctggtgcgcgccgacctgtgtgagaaccactgcctggaccgcgtgctgcaggatttcaagctcaccccagctgacctggaggttccaatccccaaatacttcctgctggagcagtccaccactgtgcgggagcgagggctgatactggccgagatcctgtccagactggagccagtgtcctcccagaagagctttacaggaatgcaccggactgaggccataattctagtgcaaaaggcagagcgggcgaggcaaggccggcttcgagccaccttcatgcgagagattcgaagagatgaggagcaggatgggaggattcgggaggatggatggcacaagttcagtcagggccaagcagctgtcaccatacagaaggtgtggaaaggctatctgcagaggaaacgcactcagcaggaccggcgaatggagatggagttcattggcatgctcccctcacccaaccaggtagagcacctgagcatcatctcccagccatgcctcgtggaggatgtccagaggctccgccagatggagaaagaggaggagttccgggcagcaatggtgaaggcccatgattctctggtagagacagaggggcctgacatgaaggagaaaatgaaggagcaaatccgacagtggtttatcgagtgccatgaccttactggccggttccctgattatccagatgcgtcttcaggtggatcctactcaatctttgcagacaaaacgccagaacaggaagtggatgcggtgttgcaagtgttgccatccaaatgtatccctatgatctgtgccgggcatgaagaatacttaaatacatggaagaaccggtgtgagagcatacaccccagtcagaattatgactccgagaccctccgggaggagaagaggaaagaggtggagctggagatccggatacaggtggatgagctgatgcgtcaggagctgaggaagctccgtctggctgtggacaaggaggaaaaagacccctga

SEQ ID NO: 2810 - protein, 420 aa, Homosapiens; identical to SEQ ID NO: 344

SEQ ID NO: 2811 - DNA, 694 bp, Homosapiens
agtccaggctcaggcgttttgctcatctgccttcagtccaagcctcattatactccgctcacactgattccactctacctttcacaccgtttctttctctcattcttcccaattaaaggatacatcctacaaggatacatcctacaatgggtatatgaaggatacccttcatatacccatttgtaccaagaagcggcctctagctactcgagccctcctcaccatgggtaccaccacttttagccccttcacccttctctggtggtttgatgtgaaccagtcttgtctcttcacctccactggggcgcagtgggggagggagcttgcattccttctggagtctgcagcactctgagctgtgctggcacctgtgtgctccgtgattacaggctggtgggctggagttgcctgaacttttaagaagtgcaccctgacattggcatctctgccaaggccatgagcatcatgaactcgtttgtaaacgacgtgtttgagcagctggcgtgtgaggctgcccggctggcccagtactcgggccggaccaccctgacatcccgagaagtccagacggctgtgcgtctgctgctgcctggggagctggccaagcacgctgtgtctgagggcaccaaggctgtcaccaagtacaccagctccaagtgacccagggcctgacaaaaataaagggtgaactgtt

SEQ ID NO: 2812 - protein, 67 aa, Homosapiens
MSIMNSFVNDVFEQLACEAARLAQYSGRTTLTSREVQTAVRLLLPGELAKHAVSEGTKAVTKYTSSK

SEQ ID NO: 2813 - DNA, 2599 bp, Homosapiens
gcctgagtcggttaggtagctctaaaaactcgtaactccacaacagctcaatggattttcgagaggtggggtaaagcctgaaggctcagccggtttatccaacgagcaatctgggatttgcagtttccagcgcccgaagtgcgcccgctagcagagagctcttggactctaatcccgccccctccccgagcctcgcgcatcctgatggcgtcacgcggccccgcgaggtctgtgggatacatagtagtcctcaaggcgggtctcactcttggccgctgcaacttgaggactacacttccaaggaggcagcgcggcgcgccgagaaccacccgaggccgtgattggctggtgagccggccgcacgcggaggatcctaaggagcagctctgttgcgacataggccgagcagcgaggcccagctccctgaaacaacagtaacctacccctgtgggtcatcatcatgccctccgacctggccaagaagaaggcagccaaaaagaaggaggctgccaaagctcgacagcggcccagaaaaggacatgaagaaaatggagatgttgtcacagaaccacaggtggcagagaagaatgaggccaatggcagagagaccacagaagtagatttgctgaccaaggagctagaggactttgagatgaagaaagctgctgctcgagctgtcactggcgtcctggcctctcaccccaacagtactgatgttcacatcatcaacctctcacttacctttcatggtcaagagctgctcagtgacaccaaactggaattaaactcaggccgtcgttatggcctcattggtttaaatggaattggaaagtccatgctgctctctgctattgggaagcgtgaagtgcccatccctgagcacatcgacatctaccatctgactcgagagatgccccctagtgacaagacacccttgcattgtgtgatggaagtcgacacagagcgggccatgctggagaaagaggcagagcggctggctcatgaggatgcggagtgtgagaagctcatggagctctacgagcgcctggaggagctggatgccgacaaggcagagatgagggcctcgcggatcttgcatggactgggtttcacacctgccatgcagcgcaagaagctaaaagacttcagtgggggctggaggatgagggttgcccttgccagagccctctttattcggcccttcatgctgctcctggatgagcctaccaaccacctggacctagatgcttgcgtgtggttggaagaagaactaaaaacttttaagcgcatcttggtcctcgtctcccattcccaggattttctgaatggtgtctgtaccaatatcattcacatgcacaacaagaaactgaagtattatacgggtaattatgatcagtacgtgaagacgcggctagagctggaggagaaccagatgaagaggtttcactgggagcaagatcagattgcacacatgaagaactacattgcgaggtttggtcatggcagtgccaagctggcccggcaggcccagagcaaggagaagacgctacagaaaatgatggcatcaggactgacagagagggtcgtgagcgataagacactgtcattttatttcccaccatgtggcaagatccctccacctgtcattatggtgcaaaatgtgagcttcaagtatacaaaagatgggccttgcatctacaataatctagaatttggaattgaccttgacacacgagtggctctggtagggcccaatggagcagggaagtcaactcttctgaagctgctaactggagagctactacccacagatggcatgatccgaaaacactctcatgtcaagatagggcgttaccatcagcatttacaagagcagctggacttagatctctcacctttggagtacatgatgaagtgctacccagagatcaaggagaaggaagaaatgaggaagatcattgggcgatacggtctcactgggaaacaacaggtgagcccaatccggaacttgtcagacgggcagaagtgccgagtgtgtctggcctggctggcctggcagaacccccacatgctcttcctggatgaacccaccaatcacctggatatcgagaccatcgacgccctggcagatgccatcaatgagtttgagggtggtatgatgctggtcagccatgacttcagactcattcagcaggttgcacaggaaatttgggtctgtgagaagcagacaatcaccaagtggcctggagacatcctggcttacaaggagcacctcaagtccaagctggtggatgaggagccccagctcaccaagaggacccacaacgtgtgcaccctgacattggcatctctgccaaggccatgagcatcatgaactcgtttgtaaacgacgtgtttgagcagctggcgtgtgaggctgcccggctggcccagtactcgggccggaccaccctgacatcccgagaagtccagacggctgtgcgtctgctgctgcctggggagctggccaagcacgctgtgtctgagggcaccaaggctgtcaccaagtacaccagctccaagtgacccagggcctgacaaaaataaagggtgaactgtt

SEQ ID NO: 2814 - protein, 634 aa, Homosapiens; identical to SEQ ID NO: 346

SEQ ID NO: 2815 - DNA, 4902 bp, Homosapiens
gcctgagtcggttaggtagctctaaaaactcgtaactccacaacagctcaatggattttcgagaggtggggtaaagcctgaaggctcagccggtttatccaacgagcaatctgggatttgcagtttccagcgcccgaagtgcgcccgctagcagagagctcttggactctaatcccgccccctccccgagcctcgcgcatcctgatggcgtcacgcggccccgcgaggtctgtgggatacatagtagtcctcaaggcgggtctcactcttggccgctgcaacttgaggactacacttccaaggaggcagcgcggcgcgccgagaaccacccgaggccgtgattggctggtgagccggccgcacgcggaggatcctaaggagcagctctgttgcgacataggccgagcagcgaggcccagctccctgaaacaacagtaacctacccctgtgggtcatcatcatgccctccgacctggccaagaagaaggcagccaaaaagaaggaggctgccaaagctcgacagcggcccagaaaaggacatgaagaaaatggagatgttgtcacagaaccacaggtggcagagaagaatgaggccaatggcagagagaccacagaagtagatttgctgaccaaggagctagaggactttgagatgaagaaagctgctgctcgagctgtcactggcgtcctggcctctcaccccaacagtactgatgttcacatcatcaacctctcacttacctttcatggtcaagagctgctcagtgacaccaaactggaattaaactcaggccgtcgttatggcctcattggtttaaatggaattggaaagtccatgctgctctctgctattgggaagcgtgaagtgcccatccctgagcacatcgacatctaccatctgactcgagagatgccccctagtgacaagacacccttgcattgtgtgatggaagtcgacacagagcgggccatgctggagaaagaggcagagcggctggctcatgaggatgcggagtgtgagaagctcatggagctctacgagcgcctggaggagctggatgccgacaaggcagagatgagggcctcgcggatcttgcatggactgggtttcacacctgccatgcagcgcaagaagctaaaagacttcagtgggggctggaggatgagggttgcccttgccagagccctctttattcggcccttcatgctgctcctggatgagcctaccaaccacctggacctagatgcttgcgtgtggttggaagaagaactaaaaacttttaagcgcatcttggtcctcgtctcccattcccaggattttctgaatggtgtctgtaccaatatcattcacatgcacaacaagaaactgaagtattatacgggtaattatgatcagtacgtgaagacgcggctagagctggaggagaaccagatgaagaggtttcactgggagcaagatcagattgcacacatgaagaactacattgcgaggtttggtcatggcagtgccaagctggcccggcaggcccagagcaaggagaagacgctacagaaaatgatggcatcaggactgacagagagggtcgtgagcgataagacactgtcattttatttcccaccatgtggcaagatccctccacctgtcattatggtgcaaaatgtgagcttcaagtatacaaaagatgggccttgcatctacaataatctagaatttggaattgaccttgacacacgagtggctctggtagggcccaatggagcagggaagtcaactcttctgaagctgctaactggagagctactacccacagatggcatgatccgaaaacactctcatgtcaagatagggcgttaccatcagcatttacaagagcagctggacttagatctctcacctttggagtacatgatgaagtgctacccagagatcaaggagaaggaagaaatgaggaagatcattgggcgatacggtctcactgggaaacaacaggtgagcccaatccggaacttgtcagacgggcagaagtgccgagtgtgtctggcctggctggcctggcagaacccccacatgctcttcctggatgaacccaccaatcacctggatatcgagaccatcgacgccctggcagatgccatcaatgagtttgagggtggtatgatgctggtcagccatgacttcagactcattcagcaggttgcacaggaaatttgggtctgtgagaagcagacaatcaccaagtggcctggagacatcctggcttacaaggagcacctcaagtccaagctggtggatgaggagccccagctcaccaagaggacccacaacgtgtgagccctctacctgggttcgggtcaggagctccatctgggaactaacagctgctaacctgaccagccgctcaggacaggaccctggggctacactcctgcattgctgcaatactgctcccccagcctctcccctgcccctcaacctgccttagctgcactctcttacctacagctggacagtacctgtctgtttcctgtcctccttccagttacatctgtccatgtctggactcggctggccgttccctccagccccttgctggttatcttactctgagtgtgatgcagtcagaggcacctgcgggttagcccaggggcccaagccctggatttggcctgcggaggagcttaggatcctcgttttctgggttttggtgatgttggaggagtaccccccagcccaccgccccgattcctttttgcttctggtttggagctccggaccaggaccttcgtcctggtcagtttttaaataattatttagcagtgtaacttttagacctgcgtgacatctacaaagcgcccaataaagaaagaggaagccacggtccctaccttccttctcgggtctctggggccttctcctccctgcagtgccaacatgcactgcccacagcaggagctggatccagcgtcagtgtgtcgatgggaactgaagactagtccataggagctggaagaactttgtccctttacttctgatttgaaattgtaccttttctcaggcctgtgattcacagactttaacatgaatcagaatcacctggagggctcatgcaatcagattgccagatctcgcctcagcgtttctggttcaataggttttgggggagaccaagaacgttaacatttctagcaagtttccaggtgatgctgttgttgctggtctagagactattttgagaaccactgtccaggagcgtggttttctgattgtgatctgaggttctgccccaactgcacagcagttgggctgcttgttaaaaatgcaggccaggtgcggtggctcacacctgtaatcccagcgctttgggaggctgaggcaggtggatcacttgagctcaggagttcaagaccagcttgggaaacatggcaaaacccgtctttatgtgcctggaatcccacctgctcaggtggctagggtggatggatcgcttgagcccaggaggtggaggttgcagtgagctgagattgcaccactgcattccagcctggatgacagagcaaaaccctgtctcaaaaaaatgcagactggccaggcacagtggctcacacctgtaatccgactgtaagctcatcaccttgggaggccactgtaggaggatcaattgagcctagaagttcaagaccagcctgggcaaagtagggagaccccttctctacaaatagtaataaaatgaaccgggcatagtagcatgtgcctgcggtcccagctgctctgataagaggaggctcacttgagcccaggaggttgaggctgcagtgagcagagcgtgccgctacactccagcctgatgacagaccgagacactgtctcaaaaaaataaaaaaattcagattgctgagcatcagacctattgattaatcgcatttggtagaatgagagaggtgcagagatggccaggagtttgcattttcacaccaacgtctgtgaacctctcttcctattgggatacaggaaattttgtatttttacctgtccacagccatagttatcatcactgttgaattcacttccagcccagggctctgcataccttatctgggtcttttgaacttcaatagcatttcaccagtggccatccttcctggtgtggattcatcactctgcctctgaaatcagccatccctatgggaagacacagccatgatttttcagtactcataatacagccaggactggcgggagcaactgtcccagatggtgcttaaaccccttaggagctcatgatcttcttggaaagccagtaagacagaaccatacaggacacaaattagatgctaaattgtgatttagataggagacagaagtattcaaaaaggagggaaatttcttgtgagtagctgcccagaaaggtggaattggtgtgctctcacttgaaaaatgagtaggatcttctcagatggccacaaagtccaggagctgccctgggcaacagggacaggagcctcccgtgagacactgcagctgagacagatgggagtcctctgaccccagagggtactggcttgactgctttatgccttaagtggggcctggagcaaaatggcccaggttagtctgtcctgagagtccagagccttggttcaggggagaatggcatctggagagtgggctgctgggataatggggacagtgagggacagagcccttgatacttaaggaagtgctggatattgctaagaattcaggtagtctcgggatctccagagtctccatactaggacaggagatcttcagaacctggaggaatggaaatagtctagtcagcttatttgtcaagaaaaatgtcaaccttggtaatttaaataatgctttaaaagtccacaaaatacatatttctaaaatta

SEQ ID NO: 2816 - protein, 623 aa, Homosapiens; identical to SEQ ID NO: 348

SEQ ID NO: 2817 - DNA, 1266 bp, Homosapiens
gcctgagtcggttaggtagctctaaaaactcgtaactccacaacagctcaatggattttcgagaggtggggtaaagcctgaaggctcagccggtttatccaacgagcaatctgggatttgcagtttccagcgcccgaagtgcgcccgctagcagagagctcttggactctaatcccgccccctccccgagcctcgcgcatcctgatggcgtcacgcggccccgcgaggtctgtgggatacatagtagtcctcaaggcgggtctcactcttggccgctgcaacttgaggactacacttccaaggaggcagcgcggcgcgccgagaaccacccgaggccgtgattggctggtgagccggccgcacgcggaggatcctaaggagcagctctgttgcgacataggccgagcagcgaggcccagctccctgaaacaacagtaacctacccctgtgggtcatcatcatgccctccgacctggccaagaagaaggcagccaaaaagaaggaggctgccaaagctcgacagcggcccagaaaaggacatgaagaaaatggagatgttgtcacagaaccacaggtggcagagaagaatgaggccaatggcagagagaccacagaagtagatttgctgaccaaggagctagaggactttgagatgaagaaagctgctgctcgagctgtcactggcgtcctggcctctcaccccaacagtactgatgttcacatcatcaacctctcacttacctttcatggtcaagagctgctcagtgacaccaaactggaattaaactcaggccgtcgttatggcctcattggtttaaatggaattggaaagtccatgctgctctctgctattgggaagcgtgaagtgcccatccctgagcacatcgacatctaccatctgactcgagagatgccccctagtgacaagacacccttgcattgtgtgatggaagtcgacacagagcgggccatgctggagaaagaggcagagcggctggctcatgaggatgcggagtgtgagaagctcatggagctctacgagcgcctggaggagctggatgccgacaaggcagagatgagggcctcgcggatcttgcatggactgggtttcacacctgccatgcagcgcaagaagctaaaagacttcagtgggggctggaggatgagggttgcccttgccaggtgacagtgccaacatgcactgcccacagcaggagctggatccagcgtcagtgtgtcgatgggaactgaagactagtccatagg

SEQ ID NO: 2818 - protein, 241 aa, Homosapiens
MPSDLAKKKAAKKKEAAKARQRPRKGHEENGDVVTEPQVAEKNEANGRETTEVDLLTKELEDFEMKKAAARAVTGVLASHPNSTDVHIINLSLTFHGQELLSDTKLELNSGRRYGLIGLNGIGKSMLLSAIGKREVPIPEHIDIYHLTREMPPSDKTPLHCVMEVDTERAMLEKEAERLAHEDAECEKLMELYERLEELDADKAEMRASRILHGLGFTPAMQRKKLKDFSGGWRMRVALAR

SEQ ID NO: 2819 - DNA, 2884 bp, Homosapiens
gcctgagtcggttaggtagctctaaaaactcgtaactccacaacagctcaatggattttcgagaggtggggtaaagcctgaaggctcagccggtttatccaacgagcaatctgggatttgcagtttccagcgcccgaagtgcgcccgctagcagagagctcttggactctaatcccgccccctccccgagcctcgcgcatcctgatggcgtcacgcggccccgcgaggtctgtgggatacatagtagtcctcaaggcgggtctcactcttggccgctgcaacttgaggactacacttccaaggaggcagcgcggcgcgccgagaaccacccgaggccgtgattggctggtgagccggccgcacgcggaggatcctaaggagcagctctgttgcgacataggccgagcagcgaggcccagctccctgaaacaacagtaacctacccctgtgggtcatcatcatgccctccgacctggccaagaagaaggcagccaaaaagaaggaggctgccaaagctcgacagcggcccagaaaaggacatgaagaaaatggagatgttgtcacagaaccacaggtggcagagaagaatgaggccaatggcagagagaccacagaagtagatttgctgaccaaggagctagaggactttgagatgaagaaagctgctgctcgagctgtcactggcgtcctggcctctcaccccaacagtactgatgttcacatcatcaacctctcacttacctttcatggtcaagagctgctcagtgacaccaaactggaattaaactcaggccgtcgttatggcctcattggtttaaatggaattggaaagtccatgctgctctctgctattgggaagcgtgaagtgcccatccctgagcacatcgacatctaccatctgactcgagagatgccccctagtgacaagacacccttgcattgtgtgatggaagtcgacacagagcgggccatgctggagaaagaggcagagcggctggctcatgaggatgcggagtgtgagaagctcatggagctctacgagcgcctggaggagctggatgccgacaaggcagagatgagggcctcgcggatcttgcatggactgggtttcacacctgccatgcagcgcaagaagctaaaagacttcagtgggggctggaggatgagggttgcccttgccagagccctctttattcggcccttcatgctgctcctggatgagcctaccaaccacctggacctagatgcttgcgtgtggttggaagaagaactaaaaacttttaagcgcatcttggtcctcgtctcccattcccaggattttctgaatggtgtctgtaccaatatcattcacatgcacaacaagaaactgaagtattatacgggtaattatgatcagtacgtgaagacgcggctagagctggaggagaaccagatgaagaggtttcactgggagcaagatcagattgcacacatgaagaactacattgcgaggtttggtcatggcagtgccaagctggcccggcaggcccagagcaaggagaagacgctacagaaaatgatggcatcaggactgacagagagggtcgtgagcgataagacactgtcattttatttcccaccatgtggcaagatccctccacctgtcattatggtgcaaaatgtgagcttcaagtatacaaaagatgggccttgcatctacaataatctagaatttggaattgaccttgacacacgagtggctctggtagggcccaatggagcagggaagtcaactcttctgaagctgctaactggagagctactacccacagatggcatgatccgaaaacactctcatgtcaagatagggcgttaccatcagcatttacaagagcagctggacttagatctctcacctttggagtacatgatgaagtgctacccagagatcaaggagaaggaagaaatgaggaagatcattgggcgatacggtctcactgggaaacaacaggtgagcccaatccggaacttgtcagacgggcagaagtgccgagtgtgtctggcctggctggcctggcagaacccccacatgctcttcctggatgaacccaccaatcacctggatatcgagaccatcgacgccctggcagatgccatcaatgagtttgagggtggtatgatgctggtcagccatgacttcagactcattcagcaggttgcacaggaaatttgggtctgtgagaagcagacaatcaccaagtggcctggagacatcctggcttacaaggagcacctcaagtccaagctggtggatgaggagccccagctcaccaagaggacccacaacgtgtgagccctctacctgggttcgggtcaggagctccatctgggaactaacagctgctaacctgaccagccgctcaggacaggaccctggggctacactcctgcattgctgcaatactgctcccccagcctctcccctgcccctcaacctgccttagctgcactctcttacctacagctggacagtacctgtctgtttcctgtcctccttccagttacatctgtccatgtctggactcggctggccgttccctccagccccttgctggttatcttactctgagtgtgatgcagtcagaggcacctgcgggttagcccaggggcccaagccctggatttggcctgcggaggagcttaggatcctcgttttctgggttttggtgatgttggaggagtaccccccagcccaccgccccgattcctttttgcttctggtttggagctccggaccaggaccttcgtcctggtcagtttttaaataattatttagcagtgtaacttttagacctgcgtgacatctacaaagcgcccaataaagaaagaggaagccacggtccct

SEQ ID NO: 2820 - protein, 623 aa, Homosapiens; identical to SEQ ID NO: 348

SEQ ID NO: 2821 - DNA, 4011 bp, Homosapiens
gactgacaggcagcggaagaggaagctgcggacaggggctgtgaggtggcagcggctgcagcggcggagccggcgcctcagcgggcactggggtctgttcccccttccccgtccctgctccctgccaggcgcgtgcgggacgccgctcttggtccccacgcctccgccccgccccctcccgggacgccgggagaccccggccgtcctttatccggtgtccgccggcccccggccctgaaacccgggcctcctccccgagggccttgggcgtccctcctggtcctgcgctcgcggcctcgatgctgtctctggcgcggcctccgctcccgccgactggcctgagaacgaggtctgtgccccagtctcccagccgcgacctccgaccccgcctcgcagaacgacccgagctggtctcccgagcccccttctcagcagcccggtgacgtggccagtttatttctgttttgagacgaacggcgaagactcgcgtcgggtcttcgttctagggctagacttggtctctgatcgccgagaggtagcgcaggggctgtgggcccccggcaggggtcctgtcggaagctggccgcgcttctgtttgcgttcccaggaccctggcattgtctctagttgctgcttgtgctctctctttgcttttggtttgcttcatttggcccctggggccctggtaaaaccaggcaccgaatcgctcgcacacagagttccagtccccgcctgctgtctcctcagcagctggggttccgaggagaatgccctgcaagatggctccatcggccatggcgctcctgagaggctgtcagtgctgagtcaccgatctacctcattcgggtgggcagaacttatgtgtgccatgcgagtggctccagaccgctcctgagtgggaggaggggttcctgtagccgttgcgtcttctcaaacacggggagcagagtagaaagaggctctggccccttcccttgtgcccaccgggcctgccgcagtggctcagcagccccttcagtagcccgcctgaggaccgatgccagaggcaggcattcttccggaaaggcccactgaggcaggctccggctcctctggttggggctgttgttttgatggatcgtgtgcttttcccttacctcttatcacttgctgtcatctgttgacttaggcccagtctgcagatgtgtgtagtgttcctttttgggttagctttggcagtattgagttttacttcctcctctttttagtggaagacagaccataatcccagtgtgagtgaaattgattgtttcatttattaccgttttggctgggggttagttccgacaccttcacagttgaagagcaggcagaaggagttgtgaagacaggacaatcttcttggggatgctggtcctggaagccagcgggcctcgctctgtctttggcctcattgaccccaggttctctggttaaaactgaaagcctactactggcctggtgcccatcaatccattgatccttgaggctgtgcccctggggcacccacctggcagggcctaccaccatgcgactgagctccctgttggctctgctgcggccagcgcttcccctcatcttagggctgtctctggggtgcagcctgagcctcctgcgggtttcctggatccagggggagggagaagatccctgtgtcgaggctgtaggggagcgaggagggccacagaatccagattccagagctcggctagaccaaagtgatgaagacttcaaaccccggattgtcccctactacagggaccccaacaagccctacaagaaggtgctcaggactcggtacatccagacagagctgggctcccgtgagcggttgctggtggctgtcctgacctcccgagctacactgtccactttggccgtggctgtgaaccgtacggtggcccatcacttccctcggttactctacttcactgggcagcggggggcccgggctccagcagggatgcaggtggtgtctcatggggatgagcggcccgcctggctcatgtcagagaccctgcgccaccttcacacacactttggggccgactacgactggttcttcatcatgcaggatgacacatatgtgcaggccccccgcctggcagcccttgctggccacctcagcatcaaccaagacctgtacttaggccgggcagaggagttcattggcgcaggcgagcaggcccggtactgtcatgggggctttggctacctgttgtcacggagtctcctgcttcgtctgcggccacatctggatggctgccgaggagacattctcagtgcccgtcctgacgagtggcttggacgctgcctcattgactctctgggcgtcggctgtgtctcacagcaccaggggcagcagtatcgctcatttgaactggccaaaaatagggaccctgagaaggaagggagctcggctttcctgagtgccttcgccgtgcaccctgtctccgaaggtaccctcatgtaccggctccacaaacgcttcagcgctctggagttggagcgggcttacagtgaaatagaacaactgcaggctcagatccggaacctgaccgtgctgacccccgaaggggaggcagggctgagctggcccgttgggctccctgctcctttcacaccacactctcgctttgaggtgctgggctgggactacttcacagagcagcacaccttctcctgtgcagatggggctcccaagtgcccactacagggggctagcagggcggacgtgggtgatgcgttggagactgccctggagcagctcaatcggcgctatcagccccgcctgcgcttccagaagcagcgactgctcaacggctatcggcgcttcgacccagcacggggcatggagtacaccctggacctgctgttggaatgtgtgacacagcgtgggcaccggcgggccctggctcgcagggtcagcctgctgcggccactgagccgggtggaaatcctacctatgccctatgtcactgaggccacccgagtgcagctggtgctgccactcctggtggctgaagctgctgcagccccggctttcctcgaggcctttgcagccaatgtcctggagccacgagaacatgcattgctcaccctgttgctggtctacgggccacgagaaggtggccgtggagctccagacccatttcttggggtgaaggctgcagcagcggagttagagcgacggtaccctgggacgaggctggcctggctcgctgtgcgagcagaggccccttcccaggtgcgactcatggacgtggtctcgaagaagcaccctgtggacactctcttcttccttaccaccgtgtggacaaggcctgggcccgaagtcctcaaccgctgtcgcatgaatgccatctctggctggcaggccttctttccagtccatttccaggagttcaatcctgccctgtcaccacagagatcacccccagggcccccgggggctggccctgaccccccctcccctcctggtgctgacccctcccggggggctcctataggggggagatttgaccggcaggcttctgcggagggctgcttctacaacgctgactacctggcggcccgagcccggctggcaggtgaactggcaggccaggaagaggaggaagccctggaggggctggaggtgatggatgttttcctccggttctcagggctccacctctttcgggccgtagagccagggctggtgcagaagttctccctgcgagactgcagcccacggctcagtgaagaactctaccaccgctgccgcctcagcaacctggaggggctagggggccgtgcccagctggctatggctctctttgagcaggagcaggccaatagcacttagcccgcctgggggccctaacctcattacctttcctttgtctgcctcagccccaggaagggcaaggcaagatggtggacagatagagaattgttgctgtattttttaaatatgaaaatgttattaaacatgtcttctgccaaactgtt

SEQ ID NO: 2822 - protein, 772 aa, Homosapiens; identical to SEQ ID NO: 350

SEQ ID NO: 2823 - DNA, 2722 bp, Homosapiens
gaggaagctgcggacaggggctgtgaggtggcagcggctgcagcggcggagccggcgcctcagcgggcactggggtctgttcccccttccccgtccctgctccctgccaggcgcgtgcgggacgccgctcttggtccccacgcctccgccccgccccctcccgggacgccgggagaccccggccgtcctttatccggtgtccgccggcccccggccctgaaacccgggcctcctccccgagggccttgggcgtccctcctggtcctgcgctcgcggcctcgatgctgtctctggcgcggcctccgctcccgccgactggcctgagaacgagcctgagcctcctgcgggtttcctggatccagggggagggagaagatccctgtgtcgaggctgtaggggagcgaggagggccacagaatccagattccagagctcggctagaccaaagtgatgaagacttcaaaccccggattgtcccctactacagggaccccaacaagccctacaagaaggtgctcaggactcggtacatccagacagagctgggctcccgtgagcggttgctggtggctgtcctgacctcccgagctacactgtccactttggccgtggctgtgaaccgtacggtggcccatcacttccctcggttactctacttcactgggcagcggggggcccgggctccagcagggatgcaggtggtgtctcatggggatgagcggcccgcctggctcatgtcagagaccctgcgccaccttcacacacactttggggccgactacgactggttcttcatcatgcaggatgacacatatgtgcaggccccccgcctggcagcccttgctggccacctcagcatcaaccaagacctgtacttaggccgggcagaggagttcattggcgcaggcgagcaggcccggtactgtcatgggggctttggctacctgttgtcacggagtctcctgcttcgtctgcggccacatctggatggctgccgaggagacattctcagtgcccgtcctgacgagtggcttggacgctgcctcattgactctctgggcgtcggctgtgtctcacagcaccaggggcagcagtatcgctcatttgaactggccaaaaatagggaccctgagaaggaagggagctcggctttcctgagtgccttcgccgtgcaccctgtctccgaaggtaccctcatgtaccggctccacaaacgcttcagcgctctggagttggagcgggcttacagtgaaatagaacaactgcaggctcagatccggaacctgaccgtgctgacccccgaaggggaggcagggctgagctggcccgttgggctccctgctcctttcacaccacactctcgctttgaggtgctgggctgggactacttcacagagcagcacaccttctcctgtgcagatggggctcccaagtgcccactacagggggctagcagggcggacgtgggtgatgcgttggagactgccctggagcagctcaatcggcgctatcagccccgcctgcgcttccagaagcagcgactgctcaacggctatcggcgcttcgacccagcacggggcatggagtacaccctggacctgctgttggaatgtgtgacacagcgtgggcaccggcgggccctggctcgcagggtcagcctgctgcggccactgagccgggtggaaatcctacctatgccctatgtcactgaggccacccgagtgcagctggtgctgccactcctggtggctgaagctgctgcagccccggctttcctcgaggcctttgcagccaatgtcctggagccacgagaacatgcattgctcaccctgttgctggtctacgggccacgagaaggtggccgtggagctccagacccatttcttggggtgaaggctgcagcagcggagttagagcgacggtaccctgggacgaggctggcctggctcgctgtgcgagcagaggccccttcccaggtgcgactcatggacgtggtctcgaagaagcaccctgtggacactctcttcttccttaccaccgtgtggacaaggcctgggcccgaagtcctcaaccgctgtcgcatgaatgccatctctggctggcaggccttctttccagtccatttccaggagttcaatcctgccctgtcaccacagagatcacccccagggcccccgggggctggccctgaccccccctcccctcctggtgctgacccctcccggggggctcctataggggggagatttgaccggcaggcttctgcggagggctgcttctacaacgctgactacctggcggcccgagcccggctggcaggtgaactggcaggccaggaagaggaggaagccctggaggggctggaggtgatggatgttttcctccggttctcagggctccacctctttcgggccgtagagccagggctggtgcagaagttctccctgcgagactgcagcccacggctcagtgaagaactctaccaccgctgccgcctcagcaacctggaggggctagggggccgtgcccagctggctatggctctctttgagcaggagcaggccaatagcacttagcccgcctgggggccctaacctcattacctttcctttgtctgcctcagccccaggaagggcaaggcaagatggtggacagatagagaattgttgctgtattttttaaatatgaaaatgttattaaacatgtcttctgccaaactgtt

SEQ ID NO: 2824 - protein, 764 aa, Homosapiens
MLSLARPPLPPTGLRTSLSLLRVSWIQGEGEDPCVEAVGERGGPQNPDSRARLDQSDEDFKPRIVPYYRDPNKPYKKVLRTRYIQTELGSRERLLVAVLTSRATLSTLAVAVNRTVAHHFPRLLYFTGQRGARAPAGMQVVSHGDERPAWLMSETLRHLHTHFGADYDWFFIMQDDTYVQAPRLAALAGHLSINQDLYLGRAEEFIGAGEQARYCHGGFGYLLSRSLLLRLRPHLDGCRGDILSARPDEWLGRCLIDSLGVGCVSQHQGQQYRSFELAKNRDPEKEGSSAFLSAFAVHPVSEGTLMYRLHKRFSALELERAYSEIEQLQAQIRNLTVLTPEGEAGLSWPVGLPAPFTPHSRFEVLGWDYFTEQHTFSCADGAPKCPLQGASRADVGDALETALEQLNRRYQPRLRFQKQRLLNGYRRFDPARGMEYTLDLLLECVTQRGHRRALARRVSLLRPLSRVEILPMPYVTEATRVQLVLPLLVAEAAAAPAFLEAFAANVLEPREHALLTLLLVYGPREGGRGAPDPFLGVKAAAAELERRYPGTRLAWLAVRAEAPSQVRLMDVVSKKHPVDTLFFLTTVWTRPGPEVLNRCRMNAISGWQAFFPVHFQEFNPALSPQRSPPGPPGAGPDPPSPPGADPSRGAPIGGRFDRQASAEGCFYNADYLAARARLAGELAGQEEEEALEGLEVMDVFLRFSGLHLFRAVEPGLVQKFSLRDCSPRLSEELYHRCRLSNLEGLGGRAQLAMALFEQEQANST

SEQ ID NO: 2825 - DNA, 2647 bp, Homosapiens
caaacacggggagcagagtagaaagaggctctggccccttcccttgtgcccaccgggcctgccgcagtggctcagcagccccttcagtagcccgcctgaggaccgatgccagaggcaggcattcttccggaaaggcccactgaggcaggctccggctcctctggttggggctgttgttttgatggatcgtgtgcttttcccttacctcttatcacttgctgtcatctgttgacttaggcccagtctgcagatgtgtgtagtgttcctttttgggttagctttggcagtattgagttttacttcctcctctttttagtggaagacagaccataatcccagtgtgagtgaaattgattgtttcatttattaccgttttggctgggggttagttccgacaccttcacagttgaagagcaggcagaaggagttgtgaagacaggacaatcttcttggggatgctggtcctggaagccagcgggcctcgctctgtctttggcctcattgaccccaggttctctggttaaaactgaaagcctactactggcctggtgcccatcaatccattgatccttgaggctgtgcccctggggcacccacctggcagggcctaccaccatgcgactgagctccctgttggctctgctgcggccagcgcttcccctcatcttagggctgtctctggggtgcagcctgagcctcctgcgggtttcctggatccagggggagggagaagatccctgtgtcgaggctgtaggggagcgaggagggccacagaatccagattccagagctcggctagaccaaagtgatgaagacttcaaaccccggattgtcccctactacagggaccccaacaagccctacaagaaggtgctcaggactcggtacatccagacagagctgggctcccgtgagcggttgctggtggctgtcctgacctcccgagctacactgtccactttggccgtggctgtgaaccgtacggtggcccatcacttccctcggttactctacttcactgggcagcggggggcccgggctccagcagggatgcaggtggtgtctcatggggatgagcggcccgcctggctcatgtcagagaccctgcgccaccttcacacacactttggggccgactacgactggttcttcatcatgcaggatgacacatatgtgcaggccccccgcctggcagcccttgctggccacctcagcatcaaccaagacctgtacttaggccgggcagaggagttcattggcgcaggcgagcaggcccggtactgtcatgggggctttggctacctgttgtcacggagtctcctgcttcgtctgcggccacatctggatggctgccgaggagacattctcagtgcccgtcctgacgagtggcttggacgctgcctcattgactctctgggcgtcggctgtgtctcacagcaccaggggcagcagtatcgctcatttgaactggccaaaaatagggaccctgagaaggaagggagctcggctttcctgagtgccttcgccgtgcaccctgtctccgaaggtaccctcatgtaccggctccacaaacgcttcagcgctctggagttggagcgggcttacagtgaaatagaacaactgcaggctcagatccggaacctgaccgtgctgacccccgaaggggaggcagggctgagctggcccgttgggctccctgctcctttcacaccacactctcgctttgaggtgctgggctgggactacttcacagagcagcacaccttctcctgtgcagatggggctcccaagtgcccactacagggggctagcagggcggacgtgggtgatgcgttggagactgccctggagcagctcaatcggcgctatcagccccgcctgcgcttccagaagcagcgactgctcaacggctatcggcgcttcgacccagcacggggcatggagtacaccctggacctgctgttggaatgtgtgacacagcgtgggcaccggcgggccctggctcgcagggtcagcctgctgcggccactgagccgggtggaaatcctacctatgccctatgtcactgaggccacccgagtgcagctggtgctgccactcctggtggctgaagctgctgcagccccggctttcctcgaggcctttgcagccaatgtcctggagccacgagaacatgcattgctcaccctgttgctggtctacgggccacgagaaggtggccgtggagctccagacccatttcttggggtgaaggctgcagcagcggagttagagcgacggtaccctgggacgaggctggcctggctcgctgtgcgagcagaggccccttcccaggtgcgactcatggacgtggtctcgaagaagcaccctgtggacactctcttcttccttaccaccgtgtggacaaggcctgggcccgaagtcctcaaccgctgtcgcatgaatgccatctctggctggcaggccttctttccagtccatttccaggagttcaatcctgccctgtcaccacagagatcacccctaacctcattacctttcctttgtctgcctcagccccaggaagggcaaggcaagatggtggacagatagagaattgttgctgtattttttaaatatgaaaatgttattaaacatgtcttctgcc

SEQ ID NO: 2826 - protein, 658 aa, Homosapiens
MRLSSLLALLRPALPLILGLSLGCSLSLLRVSWIQGEGEDPCVEAVGERGGPQNPDSRARLDQSDEDFKPRIVPYYRDPNKPYKKVLRTRYIQTELGSRERLLVAVLTSRATLSTLAVAVNRTVAHHFPRLLYFTGQRGARAPAGMQVVSHGDERPAWLMSETLRHLHTHFGADYDWFFIMQDDTYVQAPRLAALAGHLSINQDLYLGRAEEFIGAGEQARYCHGGFGYLLSRSLLLRLRPHLDGCRGDILSARPDEWLGRCLIDSLGVGCVSQHQGQQYRSFELAKNRDPEKEGSSAFLSAFAVHPVSEGTLMYRLHKRFSALELERAYSEIEQLQAQIRNLTVLTPEGEAGLSWPVGLPAPFTPHSRFEVLGWDYFTEQHTFSCADGAPKCPLQGASRADVGDALETALEQLNRRYQPRLRFQKQRLLNGYRRFDPARGMEYTLDLLLECVTQRGHRRALARRVSLLRPLSRVEILPMPYVTEATRVQLVLPLLVAEAAAAPAFLEAFAANVLEPREHALLTLLLVYGPREGGRGAPDPFLGVKAAAAELERRYPGTRLAWLAVRAEAPSQVRLMDVVSKKHPVDTLFFLTTVWTRPGPEVLNRCRMNAISGWQAFFPVHFQEFNPALSPQRSPLTSLPFLCLPQPQEGQGKMVDR

SEQ ID NO: 2827 - DNA, 1137 bp, Homosapiens
caaacacggggagcagagtagaaagaggctctggccccttcccttgtgcccaccgggcctgccgcagtggctcagcagccccttcagtagcccgcctgaggaccgatgccagaggcaggcattcttccggaaaggcccactgaggcaggctccggctcctctggttggggctgttgttttgatggatcgtgtgcttttcccttacctcttatcacttgctgtcatctgttgacttaggcccagtctgcagatgtgtgtagtgttcctttttgggttagctttggcagtattgagttttacttcctcctctttttagtggaagacagaccataatcccagtgtgagtgaaattgattgtttcatttattaccgttttggctgggggttagttccgacaccttcacagttgaagagcaggcagaaggagttgtgaagacaggacaatcttcttggggatgctggtcctggaagccagcgggcctcgctctgtctttggcctcattgaccccaggttctctggttaaaactgaaagcctactactggcctggtgcccatcaatccattgatccttgaggctgtgcccctggggcacccacctggcagggcctaccaccatgcgactgagctccctgttggctctgctgcggccagcgcttcccctcatcttagggctgtctctggggtgcagcctgagcctcctgcgggtttcctggatccagggggagggagaagatccctgtgtcgaggctgtaggggagcgaggagggccacagaatccagattccagagctcggctagaccaaagtgatgaagacttcaaaccccggattgtcccctactacagggaccccaacaagccctacaagaaggtgctcaggactcggtacatccagacagagctgggctcccgtgagcggttgctggtggctgtcctgacctcccgagctacactctggctatggctctctttgagcaggagcaggccaatagcacttagcccgcctgggggccctaacctcattacctttcctttgtctgcctcagccccaggaagggcaaggcaagatggtggacagatagagaattgttgctgtattttttaaatatgaaaatgttattaaacatgtcttctgcca

SEQ ID NO: 2828 - protein, 162 aa, Homosapiens
MRLSSLLALLRPALPLILGLSLGCSLSLLRVSWIQGEGEDPCVEAVGERGGPQNPDSRARLDQSDEDFKPRIVPYYRDPNKPYKKVLRTRYIQTELGSRERLLVAVLTSRATLWLWLSLSRSRPIALSPPGGPNLITFPLSASAPGRARQDGGQIENCCCIF

SEQ ID NO: 2829 - DNA, 766 bp, Homosapiens
tcataaggtaagctcccagcacaacttgaatgcagctaaaggggtttgcaagtagactctgaggatcaggaagctccgcacagtgttcagacagaatagttttagctcctcctcaatagtgcctgtccactgaggaggcaaaaactctgaagtttctttacttctagaactgtcccaagaaagcccaagggtagaagggagaatcacccccagggcccccgggggctggccctgaccccccctcccctcctggtgctgacccctcccggggggctcctataggggggagatttgaccggcaggcttctgcggagggctgcttctacaacgctgactacctggcggcccgagcccggctggcaggtgaactggcaggccaggaagaggaggaagccctggaggggctggaggtgatggatgttttcctccggttctcagggctccacctctttcgggccgtagagccagggctggtgcagaagttctccctgcgagactgcagcccacggctcagtgaagaactctaccaccgctgccgcctcagcaacctggaggggctagggggccgtgcccagctggctatggctctctttgagcaggagcaggccaatagcacttagcccgcctgggggccctaacctcattacctttcctttgtctgcctcagccccaggaagggcaaggcaagatggtggacagatagagaattgttgctgtattttttaaatatgaaaatgttattaaacatgtcttctgccaaactgtt

SEQ ID NO: 2830 - protein, 68 aa, Homosapiens
MDVFLRFSGLHLFRAVEPGLVQKFSLRDCSPRLSEELYHRCRLSNLEGLGGRAQLAMALFEQEQANST

SEQ ID NO: 2831 - DNA, 2330 bp, Homosapiens
taccaaggtaactaccacccctcccttctagattcctgagtagcagaagcagtacacagtcatggtcttggagccaagagaccgaccaggattctagttcaggccctactgtggattagctctgtgctgcagccaatccatgttagcccccccaagttaggaagacctggaaaccctacaaagccaaccgctttctggaatgtaatattcttggcacttggagttaggatccccaggttctagtcctgagtctggactctgggtaagtgactcagcgattctgaaccttgtttccttatctttgaagtggagtgacaatacctgtcctatctactctcctgggcagttaggaaaatcaaattgctgcaaaagtgattgagcaaaattccaccaaaacagagaatattcttattaatgcatttaaaaataaatacagcagataaacctgaggagtaaaaatagcagttgatatttattgggcacttaccatgtgccaggcactgtcccaagcactttatgtgtattagttcactgacttctcacggcagccctgggagataggtattcttttcatccccactctagagatgaagacactgagccctgaggtgttaacttgctccaggttgcatagtaagtggcagaggcaggactgatacataagcaggctgacccagggcccgcactctcaacccctgccccacactgacccaccccctatcttgtcagccataccggtggctccaccaccagaccagcccaccccaatcccatccccatgcgcactgaggaatcagacttcctctcagcttcttgtggcctttctagaacaaaaggatctacaactgcatgatgatctcttcaagaagagtgatctctctctccccaattgtcctgcttcagatttttgattgtccccggctgaagttttctgagattccccagcgcctcacagccctgctattgccccctgacccaattgtcatcaaccatgtcatcaggtgaggtggccccagcttgcttctcagaccagggaatgatctcgttcctgccttccctgcccctccctctcctcccactcccatctcttctccctccctgttggatctgccccagccccggggccctggggccgtatgggggcatcgtggacacgaagggctggacttccctggcagcgtggacccttcagaccagaagaagacggcgtgctatgacattgacgtggaggtggaggagccattaaaggggcagatgagcagcttcctcctatccacggccaaccagcaggagatcagtgctctggacagtaagatccatgagacgattgagtccataaaccagctcaagatccagagggacttcatgctaagcttctccagagaccccaaaggctatgtccaagacctgctccgctcccagagccgggacctcaaggtgatgacagatgtagccggcaaccctgaagaggagcgccgggctgagttctaccaccagccctggtcccaggaggccgtcagtcgctacttctactgcaagatccagcagcgcaggcaggagctggagcagtcgctggttgtgcgcaacacctaggagcccaaaaataagcagcacgacggaactttcagccgtgtcccgggccccagcattttgccccgggctccagcatcactcctctgccaccttggggtgtggggctggattaaaagtcattcatctgacagcagccgtgtggtcattggaaactggggaggggagggggagagaaggggaagggaagaaggtggggaggcagtgggtccctcgggacgactccccattcccttcccttggattcttctccttactcaattttccctagacctaaaaacagtttggcagaagacatgtttaataacattttcatatttaaaaaatacagcaacaattctctatctgtccaccatcttgccttgcccttcctggggctgaggcagacaaaggaaaggtaatgaggttagggcccccaggcgggctaagtgctattggcctgctcctgctcaaagagagccatagccagctgggcacggccccctagcccctccaggttgctgaggcggcagcggtggtagagttcttcactgagccgtgggctgcagtctcgcagggagaacttctgcaccagccctggctctacggcccgaaagaggtggagccctgagaaccggaggaaaacatccatcacctccagcccctccagggcttcctcctcttcctggcctgccagttcacctgccagccgggctcgggccgccaggtagtcagcgttgtagaagcagccctccgcagaa

SEQ ID NO: 2832 - protein, 112 aa, Homosapiens
MSSFLLSTANQQEISALDSKIHETIESINQLKIQRDFMLSFSRDPKGYVQDLLRSQSRDLKVMTDVAGNPEEERRAEFYHQPWSQEAVSRYFYCKIQQRRQELEQSLVVRNT

SEQ ID NO: 2833 - DNA, 3009 bp, Homosapiens
cagatcctcagaatggcccttggtgctgcaggcgcggtgggctccgggcccaggcaccgagggggcactggatgactctccaggtgcaggaccctgccatctatgactccaggtcttcagcacccacccaccgtggtacagtgccaagaggaggaagatggctgacaaaatcctccctcaaaggattcgggagctggtccccgagtcccaggcttacatggacctcttggcatttgagaggaaactggatcaaaccatcatgcggaagcgggtggacatccaggaggctctgaagaggcccatgaagcaaaagcggaagctgcgactctatatctccaacacttttaaccctgcgaagcctgatgctgaggattccgacggcagcattgcctcctgggagctacgggtggaggggaagctcctggatgatcccagcaaacagaagcggaagttctcttctttcttcaagagtttggtcatcgagctggacaaagatctttatggccctgacaaccacctcgttgagtggcatcggacacccacgacccaggagacggacggcttccaggtgaaacggcctggggacctgagtgtgcgctgcacgctgctcctcatgctggactaccagcctccccagttcaaactggatccccgcctagcccggctgctggggctgcacacacagagccgctcagccattgtccaggccctgtggcagtatgtgaagaccaacaggctgcaggactcccatgacaaggaatacatcaatggggacaagtatttccagcaggtaacctctctcctgaaccctgggatctggggagcaggcggagttctccagcaggggaagtacctctaccaaggtaactaccacccctcccttctagattcctgagtagcagaagcagtacacagtcatggtcttggagccaagagaccgaccaggattctagttcaggccctactgtggattagctctgtgctgcagccaatccatgttagcccccccaagttaggaagacctggaaaccctacaaagccaaccgctttctggaatgtaatattcttggcacttggagttaggatccccaggttctagtcctgagtctggactctgggtaagtgactcagcgattctgaaccttgtttccttatctttgaagtggagtgacaatacctgtcctatctactctcctgggcagttaggaaaatcaaattgctgcaaaagtgattgagcaaaattccaccaaaacagagaatattcttattaatgcatttaaaaataaatacagcagataaacctgaggagtaaaaatagcagttgatatttattgggcacttaccatgtgccaggcactgtcccaagcactttatgtgtattagttcactgacttctcacggcagccctgggagataggtattcttttcatccccactctagagatgaagacactgagccctgaggtgttaacttgctccaggttgcatagtaagtggcagaggcaggactgatacataagcaggctgacccagggcccgcactctcaacccctgccccacactgacccaccccctatcttgtcagccataccggtggctccaccaccagaccagcccaccccaatcccatccccatgcgcactgaggaatcagacttcctctcagcttcttgtggcctttctagaacaaaaggatctacaactgcatgatgatctcttcaagaagagtgatctctctctccccaattgtcctgcttcagatttttgattgtccccggctgaagttttctgagattccccagcgcctcacagccctgctattgccccctgacccaattgtcatcaaccatgtcatcagcgtggacccttcagaccagaagaagacggcgtgctatgacattgacgtggaggtggaggagccattaaaggggcagatgagcagcttcctcctatccacggccaaccagcaggagatcagtgctctggacagtaagatccatgagacgattgagtccataaaccagctcaagatccagagggacttcatgctaagcttctccagagaccccaaaggctatgtccaagacctgctccgctcccagagccgggacctcaaggtgatgacagatgtagccggcaaccctgaagaggagcgccgggctgagttctaccaccagccctggtcccaggaggccgtcagtcgctacttctactgcaagatccagcagcgcaggcaggagctggagcagtcgctggttgtgcgcaacacctaggagcccaaaaataagcagcacgacggaactttcagccgtgtcccgggccccagcattttgccccgggctccagcatcactcctctgccaccttggggtgtggggctggattaaaagtcattcatctgacagcagccgtgtggtcattggaaactggggaggggagggggagagaaggggaagggaagaaggtggggaggcagtgggtccctcgggacgactccccattcccttcccttggattcttctccttactcaattttccctagacctaaaaacagtttggcagaagacatgtttaataacattttcatatttaaaaaatacagcaacaattctctatctgtccaccatcttgccttgcccttcctggggctgaggcagacaaaggaaaggtaatgaggttagggcccccaggcgggctaagtgctattggcctgctcctgctcaaagagagccatagccagctgggcacggccccctagcccctccaggttgctgaggcggcagcggtggtagagttcttcactgagccgtgggctgcagtctcgcagggagaacttctgcaccagccctggctctacggcccgaaagaggtggagccctgagaaccggaggaaaacatccatcacctccagcccctccagggcttcctcctcttcctggcctgccagttcacctgccagccgggctcgggccgccaggtagtcagcgttgtagaagcagccctccgcagaa

SEQ ID NO: 2834 - protein, 245 aa, Homosapiens [sequence omitted]

SEQ ID NO: 2835 - DNA, 2825 bp, Homosapiens
actcccaagccccacctctgtcacccacaccccgctcctacagcactgctctcttcttagctcccatgccccaccgtctgctcagggacttcatttcataagttgggtcctgacccaacgagctggaggccttcctgctcttccagcaaggaaggaagcagggcaggacaggacagagcaggcactagcagggaccaggagggaggcgcctaggccagctggtagtcatggagcaggctgactacctgcctgccacctctggagtccctccatgcccctgggctccagggccatcccagttaccatcctgacctgccctctggcctttgcctccaatgcccagctctctccctccaaccattgccacacccccaaaactggcctctccagtcagggcttgggctctgcctggggtccctgctctgtctttcaagttctttgtcccgcaggaccctggggccggtctctgtctgcttcccacacatactgctcccacctgcgccctgccttgtgccaccccagccccagctggcccatgctggttgcctccatcctaggcccttttttctgcacagtgtcctggcttcctcagacctccactccggggagtttggcttcttcgcagcttcccgaggcctccttgaatctacgctggggctcagggtctgacctctcctttcagatcctcagaatggcccttggtgctgcaggcgcggtgggctccgggcccaggcaccgagggggcactggatgactctccaggtgcaggaccctgccatctatgactccaggtcttcagcacccacccaccgtggtacagcgccccgggatgccgtctggagcccggatgccccaccagggggcgcccatgggccccccgggctccccgtacatgggcagccccgcccccccgcgcggagccgcagtgccaagaggaggaagatggctgacaaaatcctccctcaaaggattcgggagctggtccccgagtcccaggcttacatggacctcttggcatttgagaggaaactggatcaaaccatcatgcggaagcgggtggacatccaggaggctctgaagaggcccatgaagcaaaagcggaagctgcgactctatatctccaacacttttaaccctgcgaagcctgatgctgaggattccgacggcagcattgcctcctgggagctacgggtggaggggaagctcctggatgatcccagcaaacagaagcggaagttctcttctttcttcaagagtttggtcatcgagctggacaaagatctttatggccctgacaaccacctcgttgagtggcatcggacacccacgacccaggagacggacggcttccaggtgaaacggcctggggacctgagtgtgcgctgcacgctgctcctcatgctggactaccagcctccccagttcaaactggatccccgcctagcccggctgctggggctgcacacacagagccgctcagccattgtccaggccctgtggcagtatgtgaagaccaacaggctgcaggactcccatgacaaggaatacatcaatggggacaagtatttccagcagatttttgattgtccccggctgaagttttctgagattccccagcgcctcacagccctgctattgccccctgacccaattgtcatcaaccatgtcatcagcgtggacccttcagaccagaagaagacggcgtgctatgacattgacgtggaggtggaggagccattaaaggggcagatgagcagcttcctcctatccacggccaaccagcaggagatcagtgctctggacagtaagatccatgagacgattgagtccataaaccagctcaagatccagagggacttcatgctaagcttctccagagaccccaaaggctatgtccaagacctgctccgctcccagagccgggacctcaaggtgatgacagatgtagccggcaaccctgaagaggagcgccgggctgagttctaccaccagccctggtcccaggaggccgtcagtcgctacttctactgcaagatccagcagcgcaggcaggagctggagcagtcgctggttgtgcgcaacacctaggagcccaaaaataagcagcacgacggaactttcagccgtgtcccgggccccagcattttgccccgggctccagcatcactcctctgccaccttggggtgtggggctggattaaaagtcattcatctgacagcagccgtgtggtcattggaaactggggaggggagggggagagaaggggaagggaagaaggtggggaggcagtgggtccctcgggacgactccccattcccttcccttggattcttctccttactcaattttccctagacctaaaaacagtttggcagaagacatgtttaataacattttcatatttaaaaaatacagcaacaattctctatctgtccaccatcttgccttgcccttcctggggctgaggcagacaaaggaaaggtaatgaggttagggcccccaggcgggctaagtgctattggcctgctcctgctcaaagagagccatagccagctgggcacggccccctagcccctccaggttgctgaggcggcagcggtggtagagttcttcactgagccgtgggctgcagtctcgcagggagaacttctgcaccagccctggctctacggcccgaaagaggtggagccctgagaaccggaggaaaacatccatcacctccagcccctccagggcttcctcctcttcctggcctgccagttcacctgccagccgggctcgggccgccaggtagtcagcgttgtagaagcagccctccgcagaa

SEQ ID NO: 2836 - protein, 445 aa, Homosapiens
MTLQVQDPAIYDSRSSAPTHRGTAPRDAVWSPDAPPGGAHGPPGLPVHGQPRPPARSRSAKRRKMADKILPQRIRELVPESQAYMDLLAFERKLDQTIMRKRVDIQEALKRPMKQKRKLRLYISNTFNPAKPDAEDSDGSIASWELRVEGKLLDDPSKQKRKFSSFFKSLVIELDKDLYGPDNHLVEWHRTPTTQETDGFQVKRPGDLSVRCTLLLMLDYQPPQFKLDPRLARLLGLHTQSRSAIVQALWQYVKTNRLQDSHDKEYINGDKYFQQIFDCPRLKFSEIPQRLTALLLPPDPIVINHVISVDPSDQKKTACYDIDVEVEEPLKGQMSSFLLSTANQQEISALDSKIHETIESINQLKIQRDFMLSFSRDPKGYVQDLLRSQSRDLKVMTDVAGNPEEERRAEFYHQPWSQEAVSRYFYCKIQQRRQELEQSLVVRNT

SEQ ID NO: 2837 - DNA, 2856 bp, Homosapiens
taggcttctccaagctgccaaatttaagtattgagtacataaaaggaggagattggcattagtgagaacatggccctgaggcttgatggacccaaagcctcccagggtatgtgcgttttgagggggtggggggtgcacatgggtgtccgggacctcgtctaggtaatgtctgcagccacataggatgatctgactgaatctgtgtgaggacaaccgtttgtgtgcctgtgtgtgcgcgcccacgtgcatgcgcgtgtgtggtcctagtgtaggtgatgtctgcggccacacaggatgctgactgcgtgtgtgactcgtgggcgtgcagatgcaagcacaggcctacgacacatctgtgtacaggctgaagatcacaacgggtctggccagggcccgccgagggcctccgagctggcgagcacaccgacggctggatggggcgacgcttcctgctccggtccctaactcattattaagctcctcgctctttgcagacgctccctgcgcctcccccgctccgggctgcagcggcgcaggcgccgggccgagccgagcgccgagcagggagcgggcggccgcgctccgggccggggtcccgggggagcagatcctcagaatggcccttggtgctgcaggcgcggtgggctccgggcccaggcaccgagggggcactggatgactctccaggtgcaggaccctgccatctatgactccaggtcttcagcacccacccaccgtggtacagcgccccgggatgccgtctggagcccggatgccccaccagggggcgcccatgggccccccgggctccccgtacatgggcagccccgccgtgcgacccggcctggcccccgcgggcatggagcccgcccgcaagcgagcagcgcccccgcccgggcagagccaggcacagagccagggccagccggtgcccaccgcccccgcgcggagccgcagtgccaagaggaggaagatggctgacaaaatcctccctcaaaggattcgggagctggtccccgagtcccaggcttacatggacctcttggcatttgagaggaaactggatcaaaccatcatgcggaagcgggtggacatccaggaggctctgaagaggcccatgaagcaaaagcggaagctgcgactctatatctccaacacttttaaccctgcgaagcctgatgctgaggattccgacggcagcattgcctcctgggagctacgggtggaggggaagctcctggatgatcccagcaaacagaagcggaagttctcttctttcttcaagagtttggtcatcgagctggacaaagatctttatggccctgacaaccacctcgttgagtggcatcggacacccacgacccaggagacggacggcttccaggtgaaacggcctggggacctgagtgtgcgctgcacgctgctcctcatgctggactaccagcctccccagttcaaactggatccccgcctagcccggctgctggggctgcacacacagagccgctcagccattgtccaggccctgtggcagtatgtgaagaccaacaggctgcaggactcccatgacaaggaatacatcaatggggacaagtatttccagcagatttttgattgtccccggctgaagttttctgagattccccagcgcctcacagccctgctattgccccctgacccaattgtcatcaaccatgtcatcagcgtggacccttcagaccagaagaagacggcgtgctatgacattgacgtggaggtggaggagccattaaaggggcagatgagcagcttcctcctatccacggccaaccagcaggagatcagtgctctggacagtaagatccatgagacgattgagtccataaaccagctcaagatccagagggacttcatgctaagcttctccagagaccccaaaggctatgtccaagacctgctccgctcccagagccgggacctcaaggtgatgacagatgtagccggcaaccctgaagaggagcgccgggctgagttctaccaccagccctggtcccaggaggccgtcagtcgctacttctactgcaagatccagcagcgcaggcaggagctggagcagtcgctggttgtgcgcaacacctaggagcccaaaaataagcagcacgacggaactttcagccgtgtcccgggccccagcattttgccccgggctccagcatcactcctctgccaccttggggtgtggggctggattaaaagtcattcatctgacagcagccgtgtggtcattggaaactggggaggggagggggagagaaggggaagggaagaaggtggggaggcagtgggtccctcgggacgactccccattcccttcccttggattcttctccttactcaattttccctagacctaaaaacagtttggcagaagacatgtttaataacattttcatatttaaaaaatacagcaacaattctctatctgtccaccatcttgccttgcccttcctggggctgaggcagacaaaggaaaggtaatgaggttagggcccccaggcgggctaagtgctattggcctgctcctgctcaaagagagccatagccagctgggcacggccccctagcccctccaggttgctgaggcggcagcggtggtagagttcttcactgagccgtgggctgcagtctcgcagggagaacttctgcaccagccctggctctacggcccgaaagaggtggagccctgagaaccggaggaaaacatccatcacctccagcccctccagggcttcctcctcttcctggcctgccagttcacctgccagccgggctcgggccgccaggtagtcagcgttgtagaagcagccctccgcagaa

SEQ ID NO: 2838 - protein, 470 aa, Homosapiens; identical to SEQ ID NO: 354

SEQ ID NO: 2839 - DNA, 1722 bp, Homosapiens
taccaaggtaactaccacccctcccttctagattcctgagtagcagaagcagtacacagtcatggtcttggagccaagagaccgaccaggattctagttcaggccctactgtggattagctctgtgctgcagccaatccatgttagcccccccaagttaggaagacctggaaaccctacaaagccaaccgctttctggaatgtaatattcttggcacttggagttaggatccccaggttctagtcctgagtctggactctgggtaagtgactcagcgattctgaaccttgtttccttatctttgaagtggagtgacaatacctgtcctatctactctcctgggcagttaggaaaatcaaattgctgcaaaagtgattgagcaaaattccaccaaaacagagaatattcttattaatgcatttaaaaataaatacagcagataaacctgaggagtaaaaatagcagttgatatttattgggcacttaccatgtgccaggcactgtcccaagcactttatgtgtattagttcactgacttctcacggcagccctgggagataggtattcttttcatccccactctagagatgaagacactgagccctgaggtgttaacttgctccaggttgcatagtaagtggcagaggcaggactgatacataagcaggctgacccagggcccgcactctcaacccctgccccacactgacccaccccctatcttgtcagccataccggtggctccaccaccagaccagcccaccccaatcccatccccatgcgcactgaggaatcagacttcctctcagcttcttgtggcctttctagaacaaaaggatctacaactgcatgatgatctcttcaagaagagtgatctctctctccccaattgtcctgcttcagatttttgattgtccccggctgaagttttctgagattccccagcgcctcacagccctgctattgccccctgacccaattgtcatcaaccatgtcatcaggtgaggtggccccagcttgcttctcagaccagggaatgatctcgttcctgccttccctgcccctccctctcctcccactcccatctcttctccctccctgttggatctgccccagccccggggccctggggccgtatgggggcatcgtggacacgaagggctggacttccctggcagcgtggacccttcagaccagaagaagacggcgtgctatgacattgacgtggaggtggaggagccattaaaggggcagatgagcagcttcctcctatccacggccaaccagcaggagatcagtgctctggacagtaagatccatgagacgattgagtccataaaccagctcaagatccagagggacttcatgctaagcttctccagagaccccaaaggctatgtccaagacctgctccgctcccagagccgggacctcaaggtgatgacagatgtagccggcaaccctgaagaggagcgccgggctgagttctaccaccagccctggtcccaggaggccgtcagtcgctacttctactgcaagatccagcagcgcaggcaggagctggagcagtcgctggttgtgcgcaacacctaggagcccaaaaataagcagcacgacggaactttcagccgtgtcccgggccccagcattttgccccgggctccagcatcactcctctgccaccttggggtgtggggctggattaaaagtcattcatctgac

SEQ ID NO: 2840 - protein, 112 aa, Homosapiens; identical to SEQ ID NO: 2832

SEQ ID NO: 2841 - DNA, 1992 bp, Homosapiens
cgcgggcctcggcggcttcgggctgcagcactgctgcccagcgcccgcggccgggctggtcggcgcgcctcgccgcttatctgcgctgtttggacagcgggcttggaaaggcaggcggccccgtccccgccgagtcaacaggcagaccccgggccgccggactatttctgtcttatcagtgcaggaatgcggcagccgcggcggcggcggcggcggcgggcgggcggcggcggcgtgggccgtgggccgtcagggcagccctgaaggggccccctccccactccgctcgagtagaagtgtgagagagcccagcaggactcagaggggagagttggaggaaaaaaaaaggcagaaaagggaaagaaagaggaagagagagagagagtgagaggagccgctgagcccaccccgatggccgcggacgaagttgccggaggggcgcgcaaagccacgaaaagcaaactttttgagtttctggtccatggggtgcgccccgggatgccgtctggagcccggatgccccaccagggggcgcccatgggccccccgggctccccgtacatgggcagccccgccgtgcgacccggcctggcccccgcgggcatggagcccgcccgcaagcgagcagcgcccccgcccgggcagagccaggcacagagccagggccagccggtgcccaccgcccccgcgcggagccgcagtgccaagaggaggaagatggctgacaaaatcctccctcaaaggattcgggagctggtccccgagtcccaggcttacatggacctcttggcatttgagaggaaactggatcaaaccatcatgcggaagcgggtggacatccaggaggctctgaagaggcccatgaagcaaaagcggaagctgcgactctatatctccaacacttttaaccctgcgaagcctgatgctgaggattccgacggcagcattgcctcctgggagctacgggtggaggggaagctcctggatgatcccagcaaacagaagcggaagttctcttctttcttcaagagtttggtcatcgagctggacaaagatctttatggccctgacaaccacctcgttgagtggcatcggacacccacgacccaggagacggacggcttccaggtgaaacggcctggggacctgagtgtgcgctgcacgctgctcctcatgctggactaccagcctccccagttcaaactggatccccgcctagcccggctgctggggctgcacacacagagccgctcagccattgtccaggccctgtggcagtatgtgaagaccaacaggctgcaggactcccatgacaaggaatacatcaatggggacaagtatttccagcagatttttgattgtccccggctgaagttttctgagattccccagcgcctcacagccctgctattgccccctgacccaattgtcatcaaccatgtcatcagcgtggacccttcagaccagaagaagacggcgtgctatgacattgacgtggaggtggaggagccattaaaggggcagatgagcagcttcctcctatccacggccaaccagcaggagatcagtgctctggacagtaagatccatgagacgattgagtccataaaccagctcaagatccagagggacttcatgctaagcttctccagagaccccaaaggctatgtccaagacctgctccgctcccagagccgggacctcaaggtgatgacagatgtagccggcaaccctgaagaggagcgccgggctgagttctaccaccagccctggtcccaggaggccgtcagtcgctacttctactgcaagatccagcagcgcaggcaggagctggagcagtcgctggttgtgcgcaacacctaggagcccaaaaataagcagcacgacggaactttcagccgtgtcccgggccccagcattttgccccgggctccagcatcactcctctgccaccttggggtgtggggctggattaaaagtcattcatctgac

SEQ ID NO: 2842 - protein, 483 aa, Homosapiens; identical to SEQ ID NO: 352

SEQ ID NO: 2843 - DNA, 2401 bp, Homosapiens
cagatcctcagaatggcccttggtgctgcaggcgcggtgggctccgggcccaggcaccgagggggcactggatgactctccaggtgcaggaccctgccatctatgactccaggtcttcagcacccacccaccgtggtacagtgccaagaggaggaagatggctgacaaaatcctccctcaaaggattcgggagctggtccccgagtcccaggcttacatggacctcttggcatttgagaggaaactggatcaaaccatcatgcggaagcgggtggacatccaggaggctctgaagaggcccatgaagcaaaagcggaagctgcgactctatatctccaacacttttaaccctgcgaagcctgatgctgaggattccgacggcagcattgcctcctgggagctacgggtggaggggaagctcctggatgatcccagcaaacagaagcggaagttctcttctttcttcaagagtttggtcatcgagctggacaaagatctttatggccctgacaaccacctcgttgagtggcatcggacacccacgacccaggagacggacggcttccaggtgaaacggcctggggacctgagtgtgcgctgcacgctgctcctcatgctggactaccagcctccccagttcaaactggatccccgcctagcccggctgctggggctgcacacacagagccgctcagccattgtccaggccctgtggcagtatgtgaagaccaacaggctgcaggactcccatgacaaggaatacatcaatggggacaagtatttccagcaggtaacctctctcctgaaccctgggatctggggagcaggcggagttctccagcaggggaagtacctctaccaaggtaactaccacccctcccttctagattcctgagtagcagaagcagtacacagtcatggtcttggagccaagagaccgaccaggattctagttcaggccctactgtggattagctctgtgctgcagccaatccatgttagcccccccaagttaggaagacctggaaaccctacaaagccaaccgctttctggaatgtaatattcttggcacttggagttaggatccccaggttctagtcctgagtctggactctgggtaagtgactcagcgattctgaaccttgtttccttatctttgaagtggagtgacaatacctgtcctatctactctcctgggcagttaggaaaatcaaattgctgcaaaagtgattgagcaaaattccaccaaaacagagaatattcttattaatgcatttaaaaataaatacagcagataaacctgaggagtaaaaatagcagttgatatttattgggcacttaccatgtgccaggcactgtcccaagcactttatgtgtattagttcactgacttctcacggcagccctgggagataggtattcttttcatccccactctagagatgaagacactgagccctgaggtgttaacttgctccaggttgcatagtaagtggcagaggcaggactgatacataagcaggctgacccagggcccgcactctcaacccctgccccacactgacccaccccctatcttgtcagccataccggtggctccaccaccagaccagcccaccccaatcccatccccatgcgcactgaggaatcagacttcctctcagcttcttgtggcctttctagaacaaaaggatctacaactgcatgatgatctcttcaagaagagtgatctctctctccccaattgtcctgcttcagatttttgattgtccccggctgaagttttctgagattccccagcgcctcacagccctgctattgccccctgacccaattgtcatcaaccatgtcatcagcgtggacccttcagaccagaagaagacggcgtgctatgacattgacgtggaggtggaggagccattaaaggggcagatgagcagcttcctcctatccacggccaaccagcaggagatcagtgctctggacagtaagatccatgagacgattgagtccataaaccagctcaagatccagagggacttcatgctaagcttctccagagaccccaaaggctatgtccaagacctgctccgctcccagagccgggacctcaaggtgatgacagatgtagccggcaaccctgaagaggagcgccgggctgagttctaccaccagccctggtcccaggaggccgtcagtcgctacttctactgcaagatccagcagcgcaggcaggagctggagcagtcgctggttgtgcgcaacacctaggagcccaaaaataagcagcacgacggaactttcagccgtgtcccgggccccagcattttgccccgggctccagcatcactcctctgccaccttggggtgtggggctggattaaaagtcattcatctgac

SEQ ID NO: 2844 - protein, 245 aa, Homosapiens [sequence omitted]

SEQ ID NO: 2845 - DNA, 2217 bp, Homosapiens
actcccaagccccacctctgtcacccacaccccgctcctacagcactgctctcttcttagctcccatgccccaccgtctgctcagggacttcatttcataagttgggtcctgacccaacgagctggaggccttcctgctcttccagcaaggaaggaagcagggcaggacaggacagagcaggcactagcagggaccaggagggaggcgcctaggccagctggtagtcatggagcaggctgactacctgcctgccacctctggagtccctccatgcccctgggctccagggccatcccagttaccatcctgacctgccctctggcctttgcctccaatgcccagctctctccctccaaccattgccacacccccaaaactggcctctccagtcagggcttgggctctgcctggggtccctgctctgtctttcaagttctttgtcccgcaggaccctggggccggtctctgtctgcttcccacacatactgctcccacctgcgccctgccttgtgccaccccagccccagctggcccatgctggttgcctccatcctaggcccttttttctgcacagtgtcctggcttcctcagacctccactccggggagtttggcttcttcgcagcttcccgaggcctccttgaatctacgctggggctcagggtctgacctctcctttcagatcctcagaatggcccttggtgctgcaggcgcggtgggctccgggcccaggcaccgagggggcactggatgactctccaggtgcaggaccctgccatctatgactccaggtcttcagcacccacccaccgtggtacagcgccccgggatgccgtctggagcccggatgccccaccagggggcgcccatgggccccccgggctccccgtacatgggcagccccgcccccccgcgcggagccgcagtgccaagaggaggaagatggctgacaaaatcctccctcaaaggattcgggagctggtccccgagtcccaggcttacatggacctcttggcatttgagaggaaactggatcaaaccatcatgcggaagcgggtggacatccaggaggctctgaagaggcccatgaagcaaaagcggaagctgcgactctatatctccaacacttttaaccctgcgaagcctgatgctgaggattccgacggcagcattgcctcctgggagctacgggtggaggggaagctcctggatgatcccagcaaacagaagcggaagttctcttctttcttcaagagtttggtcatcgagctggacaaagatctttatggccctgacaaccacctcgttgagtggcatcggacacccacgacccaggagacggacggcttccaggtgaaacggcctggggacctgagtgtgcgctgcacgctgctcctcatgctggactaccagcctccccagttcaaactggatccccgcctagcccggctgctggggctgcacacacagagccgctcagccattgtccaggccctgtggcagtatgtgaagaccaacaggctgcaggactcccatgacaaggaatacatcaatggggacaagtatttccagcagatttttgattgtccccggctgaagttttctgagattccccagcgcctcacagccctgctattgccccctgacccaattgtcatcaaccatgtcatcagcgtggacccttcagaccagaagaagacggcgtgctatgacattgacgtggaggtggaggagccattaaaggggcagatgagcagcttcctcctatccacggccaaccagcaggagatcagtgctctggacagtaagatccatgagacgattgagtccataaaccagctcaagatccagagggacttcatgctaagcttctccagagaccccaaaggctatgtccaagacctgctccgctcccagagccgggacctcaaggtgatgacagatgtagccggcaaccctgaagaggagcgccgggctgagttctaccaccagccctggtcccaggaggccgtcagtcgctacttctactgcaagatccagcagcgcaggcaggagctggagcagtcgctggttgtgcgcaacacctaggagcccaaaaataagcagcacgacggaactttcagccgtgtcccgggccccagcattttgccccgggctccagcatcactcctctgccaccttggggtgtggggctggattaaaagtcattcatctgac

SEQ ID NO: 2846 - protein, 445 aa, Homosapiens; identical to SEQ ID NO: 2836

SEQ ID NO: 2847 - DNA, 2248 bp, Homosapiens
taggcttctccaagctgccaaatttaagtattgagtacataaaaggaggagattggcattagtgagaacatggccctgaggcttgatggacccaaagcctcccagggtatgtgcgttttgagggggtggggggtgcacatgggtgtccgggacctcgtctaggtaatgtctgcagccacataggatgatctgactgaatctgtgtgaggacaaccgtttgtgtgcctgtgtgtgcgcgcccacgtgcatgcgcgtgtgtggtcctagtgtaggtgatgtctgcggccacacaggatgctgactgcgtgtgtgactcgtgggcgtgcagatgcaagcacaggcctacgacacatctgtgtacaggctgaagatcacaacgggtctggccagggcccgccgagggcctccgagctggcgagcacaccgacggctggatggggcgacgcttcctgctccggtccctaactcattattaagctcctcgctctttgcagacgctccctgcgcctcccccgctccgggctgcagcggcgcaggcgccgggccgagccgagcgccgagcagggagcgggcggccgcgctccgggccggggtcccgggggagcagatcctcagaatggcccttggtgctgcaggcgcggtgggctccgggcccaggcaccgagggggcactggatgactctccaggtgcaggaccctgccatctatgactccaggtcttcagcacccacccaccgtggtacagcgccccgggatgccgtctggagcccggatgccccaccagggggcgcccatgggccccccgggctccccgtacatgggcagccccgccgtgcgacccggcctggcccccgcgggcatggagcccgcccgcaagcgagcagcgcccccgcccgggcagagccaggcacagagccagggccagccggtgcccaccgcccccgcgcggagccgcagtgccaagaggaggaagatggctgacaaaatcctccctcaaaggattcgggagctggtccccgagtcccaggcttacatggacctcttggcatttgagaggaaactggatcaaaccatcatgcggaagcgggtggacatccaggaggctctgaagaggcccatgaagcaaaagcggaagctgcgactctatatctccaacacttttaaccctgcgaagcctgatgctgaggattccgacggcagcattgcctcctgggagctacgggtggaggggaagctcctggatgatcccagcaaacagaagcggaagttctcttctttcttcaagagtttggtcatcgagctggacaaagatctttatggccctgacaaccacctcgttgagtggcatcggacacccacgacccaggagacggacggcttccaggtgaaacggcctggggacctgagtgtgcgctgcacgctgctcctcatgctggactaccagcctccccagttcaaactggatccccgcctagcccggctgctggggctgcacacacagagccgctcagccattgtccaggccctgtggcagtatgtgaagaccaacaggctgcaggactcccatgacaaggaatacatcaatggggacaagtatttccagcagatttttgattgtccccggctgaagttttctgagattccccagcgcctcacagccctgctattgccccctgacccaattgtcatcaaccatgtcatcagcgtggacccttcagaccagaagaagacggcgtgctatgacattgacgtggaggtggaggagccattaaaggggcagatgagcagcttcctcctatccacggccaaccagcaggagatcagtgctctggacagtaagatccatgagacgattgagtccataaaccagctcaagatccagagggacttcatgctaagcttctccagagaccccaaaggctatgtccaagacctgctccgctcccagagccgggacctcaaggtgatgacagatgtagccggcaaccctgaagaggagcgccgggctgagttctaccaccagccctggtcccaggaggccgtcagtcgctacttctactgcaagatccagcagcgcaggcaggagctggagcagtcgctggttgtgcgcaacacctaggagcccaaaaataagcagcacgacggaactttcagccgtgtcccgggccccagcattttgccccgggctccagcatcactcctctgccaccttggggtgtggggctggattaaaagtcattcatctgac

SEQ ID NO: 2848 - protein, 470 aa, Homosapiens; identical to SEQ ID NO: 354

SEQ ID NO: 2849 - DNA, 277 bp, Homosapiens
ctgctccgctcccagagccgggacctcaaggtgaagagggagactcagggagtacagaacactgacacctgctcctgttctcacttcctctaaagatccagcagcgcaggcaggagctggagcagtcgctggttgtgcgcaacacctaggagcccaaaaataagcagcacgacggaactttcagccgtgtcccgggccccagcattttgccccgggctccagcatcactcctctgccaccttggggtgtggggctggattaaaagtcattcatctga

SEQ ID NO: 2850 - protein, 42 aa, Homosapiens
RGRLREYRTLTPAPVLTSSKDPAAQAGAGAVAGCAQHLGAQK

SEQ ID NO: 2851 - DNA, 216 bp, Homosapiens
gtggcgtggcagcttatgtgcgtgcagacagacgccctgtatgtgtgcctccctccacgacagcctccgtgcgcgcgcgcctgcgtgtgtggcaggacatggcctgtgcctttcagctctgtgagaggctatttctggatgctggctgcatccagatgttggctgccagggatctggggggcagccttgtggcttctggtcgacttgggatctgct

SEQ ID NO: 2852 - protein, 66 aa, Homosapiens
MCVQTDALYVCLPPRQPPCARACVCGRTWPVPFSSVRGYFWMLAASRCWLPGIWGAALWLLVDLGS

SEQ ID NO: 2853 - DNA, 2704 bp, Homosapiens
ccggaatgaaaacaaacggcggccgctgccgcatccgggcactctgctggtcgcggcgggagtggcgtggcgcagggatggcacaaaagaaatatcttcaagcaaaattgacccagtttttaagggaagacaggattcaactttggaaacctccatatacagatgaaaataaaaaagttggtttggcattaaaggaccttgctaagcagtactctgacagactagaatgctgtgaaaatgaagtagaaaaggtaatagaagaaatacgttgcaaggcaattgagcgtggaacaggaaatgacaattatagaacaacgggaattgctacaatcgaggtgtttttaccaccaagactaaaaaaagataggaaaaacttgttggagacccgattgcacatcactggcagagaactgaggtccaaaatagctgaaacctttggacttcaagaaaattatatcaaaattgtcataaataagaagcaactacaactagggaaaacccttgaagaacaaggcgtggctcacaatgtgaaagcgatggtgcttgaactaaaacaatctgaagaggacgcgaggaaaaacttccagttagaggaagaggagcaaaatgaggccaaactcaaagaaaaacaaattcagaggaccaagagaggactagaaatactggcaaagagagcagcagagacagtggtggatccagaaatgacaccgtacttagacatagctaaccagacaggcagatcaatcagaattcccccatcagaaagaaaagcccttatgttagctatgggatatcatgagaagggcagagctttcctgaaaagaaaagaatatggaatagccttgccatgtctgttggacgctgacaaatatttctgtgagtgttgcagagagctgctggacacagtggataactacgccgtcctccagctggatatagtgtggtgttacttccgcctggaacagctggaatgccttgatgatgcagaaaaaaaattaaacttggcccagaaatgctttaaaaattgttacggagaaaatcatcagagactggtccacataaaaggaaattgtgggaaagagaaggtactgtttctaagactctacttacttcaagggatccgaaactatcacagtggaaatgatgtagaggcttatgagtatcttaacaaggcacgtcagctctttaaagagctatatattgatccatcaaaagtggacaatttgttgcagttggggtttactgcccaggaagcccggcttggcctgagggcgtgtgatgggaacgtggatcatgcggccactcatattaccaaccgcagagaggaactggcccaaataaggaaggaggaaaaagagaagaaaagacgccgcctcgagaacatcaggtttctgaaagggatgggctactccacgcacgcggcccagcagattctgctcagcaatcctcagatgtggtggttaaatgattccaatcctgaaaccgacaaccgtcaagaaagtccttcccaggaaaacattgaccgattggtgtacatgggttttgatgcactcgtggccgaagctgcgctgagagtgttcagaggcaacgtccagctggccgcccagacccttgctcacaacggaggaagcctgcctcccgagctgccgctgtcgccagaagactctttgtccccgccagccacgtccccttctgactccgcaggaacctctagtgcctcaacagacgaagacatggagacagaggccgtcaatgagatactggaagacattccagagcatgaggaagactatcttgactcaactctggaagatgaagaaattattattgcagagtacctatcctatgtagaaaataggaagtcagcaacaaagaaaaactaaataatgaacagaaatagcgctaattttctgcttataaatgctatcattatgaaaaggctaatgcagctctttctgttcttactttttatctgaattacaagtcctctttgggtgtaggagggggtgggcaggggacaagtccaggaggggtcccagggccttcatgcgtggtctcggggaagaagcttcctctggcctggcgcaggccgttccatctgcctcccaggtctgcgtccctaaccccttccccagcttggtgttttaccccgaaacaggaaggaacaggggtcctgtagaacaggggtcctggggaaggtgtccagggcagggtcctgggaagggtgtcccgaccgcttcctctccagctgtggctccatctgcccagcttgcctgcctcctgcacccactgccctgaccttcctgcttcccacgctgccatctctgccagggtgccacatgggttcctgtgccaccctttccccgcccctcaaatcgtcctttaagtcttccttccaagtgctgtggggcataacgatgaggcgctggccttgggggccacaccaggtcgcagcaaatggcttcagcctgggacgccagtgttttatgctcttagttcagtaaaatacgcccccgaaattcaagattgagtgtcaggctttatatatattcagcattcctcattacagaaatcttctattgaatgggaaaggtttaaatgctaaccaaagcaatttatttttaattaatatttttagactctgtgctgtcatactgaactcactgctagctaagagacctatcagagatttagatatattttc

SEQ ID NO: 2854 - protein, 625 aa, Homosapiens
MKTNGGRCRIRALCWSRREWRGAGMAQKKYLQAKLTQFLREDRIQLWKPPYTDENKKVGLALKDLAKQYSDRLECCENEVEKVIEEIRCKAIERGTGNDNYRTTGIATIEVFLPPRLKKDRKNLLETRLHITGRELRSKIAETFGLQENYIKIVINKKQLQLGKTLEEQGVAHNVKAMVLELKQSEEDARKNFQLEEEEQNEAKLKEKQIQRTKRGLEILAKRAAETVVDPEMTPYLDIANQTGRSIRIPPSERKALMLAMGYHEKGRAFLKRKEYGIALPCLLDADKYFCECCRELLDTVDNYAVLQLDIVWCYFRLEQLECLDDAEKKLNLAQKCFKNCYGENHQRLVHIKGNCGKEKVLFLRLYLLQGIRNYHSGNDVEAYEYLNKARQLFKELYIDPSKVDNLLQLGFTAQEARLGLRACDGNVDHAATHITNRREELAQIRKEEKEKKRRRLENIRFLKGMGYSTHAAQQILLSNPQMWWLNDSNPETDNRQESPSQENIDRLVYMGFDALVAEAALRVFRGNVQLAAQTLAHNGGSLPPELPLSPEDSLSPPATSPSDSAGTSSASTDEDMETEAVNEILEDIPEHEEDYLDSTLEDEEIIIAEYLSYVENRKSATKKN

SEQ ID NO: 2855 - DNA, 3117 bp, Homosapiens
ccggaatgaaaacaaacggcggccgctgccgcatccgggcactctgctggtcgcggcgggagtggcgtggcgcagggatggcacaaaagaaatatcttcaagcaaaattgacccagtttttaagggaagacaggattcaactttggaaacctccatatacagatgaaaataaaaaagttggtttggcattaaaggaccttgctaagcagtactctgacagactagaatgctgtgaaaatgaagtagaaaaggtaatagaagaaatacgttgcaaggcaattgagcgtggaacaggaaatgacaattatagaacaacgggaattgctacaatcgaggtgtttttaccaccaagactaaaaaaagataggaaaaacttgttggagacccgattgcacatcactggcagagaactgaggtccaaaatagctgaaacctttggacttcaagaaaattatatcaaaattgtcataaataagaagcaactacaactagggaaaacccttgaagaacaaggcgtggctcacaatgtgaaagcgatggtgcttgaactaaaacaatctgaagaggacgcgaggaaaaacttccagttagaggaagaggagcaaaatgaggccaaactcaaagaaaaacaaattcagaggaccaagagaggactagaaatactggcaaagagagcagcagagacagtggtggatccagaaatgacaccgtacttagacatagctaaccagacaggcagatcaatcagaattcccccatcagaaagaaaagcccttatgttagctatgggatatcatgagaagggcagagctttcctgaaaagaaaagaatatggaatagccttgccatgtctgttggacgctgacaaatatttctgtgagtgttgcagagagctgctggacacagtggataactacgccgtcctccagctggatatagtgtggtgttacttccgcctggaacagctggaatgccttgatgatgcagaaaaaaaattaaacttggcccagaaatgctttaaaaattgttacggagaaaatcatcagagactggtccacataaaaggaaattgtgggaaagagaaggtactgtttctaagactctacttacttcaagggatccgaaactatcacagtggaaatgatgtagaggcttatgagtatcttaacaaggcacgtcagctctttaaagagctatatattgatccatcaaaagtggacaatttgttgcagttggggtttactgcccaggaagcccggcttggcctgagggcgtgtgatgggaacgtggatcatgcggccactcatattaccaaccgcagagaggaactggcccaaataaggaaggaggaaaaagagaagaaaagacgccgcctcgagaacatcaggtttctgaaagggatgggctactccacgcacgcggcccagcagattctgctcagcaatcctcagatgtggtggttaaatgattccaatcctgaaaccgacaaccgtcaagaaagtccttcccaggaaaacattgaccgattggtgtacatgggttttgatgcactcgtggccgaagctgcgctgagagtgttcagaggcaacgtccagctggccgcccagacccttgctcacaacggaggaagcctgcctcccgagctgccgctgtcgccagaagactctttgtccccgccagccacgtccccttctgactccgcaggaacctctagtgcctcaacagacgaagacatggagacagaggccgtcaatgagatactggaagacattccagagcatgaggaagactatcttgactcaactctggaagatgaagaaattattattgcagagtacctatcctatgtagaaaataggaagtcagcaacaaagaaaaactaaataatgaacagaaatagcgctaattttctgcttataaatgctatcattatgaaaaggctaatgcagctctttctgttcttactttttatctgaattacaagtcctctttgggtgtaggagggggtgggcaggggacaagtccaggaggggtcccagggccttcatgcgtggtctcggggaagaagcttcctctggcctggcgcaggccgttccatctgcctcccaggtctgcgtccctaaccccttccccagcttggtgttttaccccgaaacaggaaggaacaggggtcctgtagaacaggggtcctggggaaggtgtccagggcagggtcctgggaagggtgtcccgaccgcttcctctccagctgtggctccatctgcccagcttgcctgcctcctgcacccactgccctgaccttcctgcttcccacgctgccatctctgccagggtgccacatgggttcctgtgccaccctttccccgcccctcaaatcgtcctttaagtcttccttccaagtgctgtggggcataacgatgaggcgctggccttgggggccacaccaggtcgcagcaaatggcttcagcctgggacgccagtgttttatgctcttagttcagtaaaatacgcccccgaaattcaagattgagtgtcaggctttatatatattcagcattcctcattacagaaatcttctattgaatgggaaaggtttaaatgctaaccaaagcaatttatttttaattaatatttttagactctgtgctgtcatactgaactcactgctagctaagagacctatcagagatttagatatattttctccaggttttttgtgggttttctttgttgttgttgttgttctagccatgtgacagaggctctttctaaaagtatgtagttcgctgtgtgtcggctccagcagtaaccgtcctcactgcgccacgcactcctctgtagatgtgtgcccagtgggagttccttccagccccaggaccacagcagcagccaggtgccgagtggattgagtgccaggtgcatccaagactttccctcccttccagaaggcactgactgaagacaggatggatcatgcggagccggctgaaatgctccaactttttcaaagtgtgggtggtccagtttggactgatgggaatcttcttgtcattctttttaaacggatgataccgatggaaataaaaggtgggaaatatattcaaaaattgtcaccct

SEQ ID NO: 2856 - protein, 625 aa, Homosapiens; identical to SEQ ID NO: 2854

SEQ ID NO: 2857 - DNA, 3159 bp, Homosapiens
ccggaatgaaaacaaacggcggccgctgccgcatccgggcactctgctggtcgcggcgggagtggcgtggcgcagggatggcacaaaagaaatatcttcaagcaaaattgacccagtttttaagggaagacaggattcaactttggaaacctccatatacagatgaaaataaaaaagttggtttggcattaaaggaccttgctaagcagtactctgacagactagaatgctgtgaaaatgaagtagaaaaggtaatagaagaaatacgttgcaaggcaattgagcgtggaacaggaaatgacaattatagaacaacgggaattgctacaatcgaggtgtttttaccaccaagactaaaaaaagataggaaaaacttgttggagacccgattgcacatcactggcagagaactgaggtccaaaatagctgaaacctttggacttcaagaaaattatatcaaaattgtcataaataagaagcaactacaactagggaaaacccttgaagaacaaggcgtggctcacaatgtgaaagcgatggtgcttgaactaaaacaatctgaagaggacgcgaggaaaaacttccagttagaggaagaggagcaaaatgaggccaaactcaaagaaaaacaaattcagaggaccaagagaggactagaaatactggcaaagagagcagcagagacagtggtggatccagaaatgacaccgtacttagacatagctaaccagacaggcagatcaatcagaattcccccatcagaaagaaaagcccttatgttagctatgggatatcatgagaagggcagagctttcctgaaaagaaaagaatatggaatagccttgccatgtctgttggacgctgacaaatatttctgtgagtgttgcagagagctgctggacacagtggataactacgccgtcctccagctggatatagtgtggtgttacttccgcctggaacagctggaatgccttgatgatgcagaaaaaaaattaaacttggcccagaaatgctttaaaaattgttacggagaaaatcatcagagactggtccacataaaaggaaattgtgggaaagagaaggtactgtttctaagactctacttacttcaagggatccgaaactatcacagtggaaatgatgtagaggcttatgagtatcttaacaaggcacgtcagctctttaaagagctatatattgatccatcaaaagtggacaatttgttgcagttggggtttactgcccaggaagcccggcttggcctgagggcgtgtgatgggaacgtggatcatgcggccactcatattaccaaccgcagagaggaactggcccaaataaggaaggaggaaaaagagaagaaaagacgccgcctcgagaacatcaggtttctgaaagggatgggctactccacgcacgcggcccagcaggtactccacgcagccagcgggaacttggatgaggccctgaagattctgctcagcaatcctcagatgtggtggttaaatgattccaatcctgaaaccgacaaccgtcaagaaagtccttcccaggaaaacattgaccgattggtgtacatgggttttgatgcactcgtggccgaagctgcgctgagagtgttcagaggcaacgtccagctggccgcccagacccttgctcacaacggaggaagcctgcctcccgagctgccgctgtcgccagaagactctttgtccccgccagccacgtccccttctgactccgcaggaacctctagtgcctcaacagacgaagacatggagacagaggccgtcaatgagatactggaagacattccagagcatgaggaagactatcttgactcaactctggaagatgaagaaattattattgcagagtacctatcctatgtagaaaataggaagtcagcaacaaagaaaaactaaataatgaacagaaatagcgctaattttctgcttataaatgctatcattatgaaaaggctaatgcagctctttctgttcttactttttatctgaattacaagtcctctttgggtgtaggagggggtgggcaggggacaagtccaggaggggtcccagggccttcatgcgtggtctcggggaagaagcttcctctggcctggcgcaggccgttccatctgcctcccaggtctgcgtccctaaccccttccccagcttggtgttttaccccgaaacaggaaggaacaggggtcctgtagaacaggggtcctggggaaggtgtccagggcagggtcctgggaagggtgtcccgaccgcttcctctccagctgtggctccatctgcccagcttgcctgcctcctgcacccactgccctgaccttcctgcttcccacgctgccatctctgccagggtgccacatgggttcctgtgccaccctttccccgcccctcaaatcgtcctttaagtcttccttccaagtgctgtggggcataacgatgaggcgctggccttgggggccacaccaggtcgcagcaaatggcttcagcctgggacgccagtgttttatgctcttagttcagtaaaatacgcccccgaaattcaagattgagtgtcaggctttatatatattcagcattcctcattacagaaatcttctattgaatgggaaaggtttaaatgctaaccaaagcaatttatttttaattaatatttttagactctgtgctgtcatactgaactcactgctagctaagagacctatcagagatttagatatattttctccaggttttttgtgggttttctttgttgttgttgttgttctagccatgtgacagaggctctttctaaaagtatgtagttcgctgtgtgtcggctccagcagtaaccgtcctcactgcgccacgcactcctctgtagatgtgtgcccagtgggagttccttccagccccaggaccacagcagcagccaggtgccgagtggattgagtgccaggtgcatccaagactttccctcccttccagaaggcactgactgaagacaggatggatcatgcggagccggctgaaatgctccaactttttcaaagtgtgggtggtccagtttggactgatgggaatcttcttgtcattctttttaaacggatgataccgatggaaataaaaggtgggaaatatattcaaaaattgtcaccct

SEQ ID NO: 2858 - protein, 639 aa, Homosapiens
MKTNGGRCRIRALCWSRREWRGAGMAQKKYLQAKLTQFLREDRIQLWKPPYTDENKKVGLALKDLAKQYSDRLECCENEVEKVIEEIRCKAIERGTGNDNYRTTGIATIEVFLPPRLKKDRKNLLETRLHITGRELRSKIAETFGLQENYIKIVINKKQLQLGKTLEEQGVAHNVKAMVLELKQSEEDARKNFQLEEEEQNEAKLKEKQIQRTKRGLEILAKRAAETVVDPEMTPYLDIANQTGRSIRIPPSERKALMLAMGYHEKGRAFLKRKEYGIALPCLLDADKYFCECCRELLDTVDNYAVLQLDIVWCYFRLEQLECLDDAEKKLNLAQKCFKNCYGENHQRLVHIKGNCGKEKVLFLRLYLLQGIRNYHSGNDVEAYEYLNKARQLFKELYIDPSKVDNLLQLGFTAQEARLGLRACDGNVDHAATHITNRREELAQIRKEEKEKKRRRLENIRFLKGMGYSTHAAQQVLHAASGNLDEALKILLSNPQMWWLNDSNPETDNRQESPSQENIDRLVYMGFDALVAEAALRVFRGNVQLAAQTLAHNGGSLPPELPLSPEDSLSPPATSPSDSAGTSSASTDEDMETEAVNEILEDIPEHEEDYLDSTLEDEEIIIAEYLSYVENRKSATKKN

SEQ ID NO: 2859 - DNA, 2583 bp, Homosapiens
gataggaaaaacttgttggagacccgattgcacatcactggcagagaactgaggtccaaaatagctgaaacctttggacttcaagaaaattatatcaaaattgtcataaataagcaccatgcccagctaatttttctcctgggctcaagtgatcctcccacctcagcctcctaatgctgggattacaggtgtgagccaccgcacccagcctcccttctgcatttattgctggaattctgaaaaatttgtttttgctcatcagttattttatatgtggaggtacaatttgtataggaaagttagaataaaatactttgtttctttctccttattttcttgttttcagaataaatgagttgcttcactatcaccctccaaaggtgaccaaagaggtttctttttcttttcattttcttaagtgtcattattaactcatggatttaaaacatttgatgtgtttcaaacttcagtgcttaaattggtcatgctggctggcaggcagcccatgtttttttgacctgaccctgctagtctttgcagtctctgatttctggaatccaaagatactccaggctcatcttgggcatttaatgcccagaccaggaatcagcaatttcccaaggagtcctggttcctcttcatgggaaacggtactaagagactatgatgcagacatattcaacatttgaaaagtagacttgattttttgaaaatggtcaaaagttaacaaatttagtgttaacttcttttctgttttggtgcattcccaagataatactgtatactcccagaagatgaatgcaaatatttatagttttccattggtcagtgcctttgggttctaagtgaacaagtcccaactttaacgtacacaaaaaaggaattgggaggggaggggccgggctgggaatagtgagaatgagggctggtttgtgcttctggggtctctgtctctgcctctttctggatgtcagtttcattctcttctgcaaacagtgtagggtaaacaggctttaaattaggtcctaaaagtttaggtaaatttttcattcccttccatagttgtttctaattttttattatggaaaatttcaaatagtcataaaaataaaaattagtataatgagcttccatatacactcataactaagcttctgcagttataaagacatggttgatcttcatacatctgtgtgagcctccctcaatctttttatcctggacaaatccttgaaataatttttaggtctcagggaaccattgaatacaaatttggctacatcttcagttcatgatacattaacatgtccggtaagtggtaggtataataatgaaataataattaacaatgtctttctaagtagagaaagttttttttttcctgggcatctatttatcctgggcatctatttatcctggccaacttgttagcatatttttgtgtgtgtgtgatttctctcttttcataaaggaaatcagcagtaatgtaagccaaatagaatgcagatggaggaaacttcagtttttccatttccttttccatttgacttttcccccttacttctccaagtaagctagaagttttgtcacaacttcctaccatatgtcttggagtatggtatgtagtatgaccaagaatagtttctttccccaaattgtatgaaacagtgacttcctggcagtgcagaacggtgaccctgaggtagggaaacatgaggggagctcagtgtctggagaagtttcaggttacggggcagggagggcaaacccaggcagagccttgtgctccctggagttaaagagatggagctgggcttgcaggaggccaaggaggtgagaggagcaagctgccagagagagggtgtcagagagcttcagaggagcccttttgagtcttctgctcagtaatgatcagcacatgtgtgtgaggaaactgcccagggctgggcaaggtaccacatgaaagaagcagggaataatcctccgagttcatagaaggccaggaatagtttatgttcccaccagccagagtggaggatttggtagtcacagggcgtcaaatagagtcttcagaagggtgttgcctcagcactagggcataatttggtttcacttaacaaagcttaaaagctactcctgaacagtacccttaacttaccgttttcaaataagtgcatccctaacaaaactcaataatttagcaattcaaaaatatccagcatccactgaaaaattagcaggcatgcaaagaaacaagcaaatgtaacctataacaagcaaaaaaatcagtcagtagcaacagatccagaagtgacacagaagatagaattagtagacaaggacagtaaaacagtgactgtaatccatctgctgaagaaggcagaggaacaactgaacatgtcagataaagacatgggagacattcaaaagacccacattagaatgtaagagatgaaaagtacaacatccaagatgaaaagtacattaggtgggatgaactgcagaatagacactatagaagagaagattagttaaatgttacataaggcaatagaaactatctgaaaaaacagagaaaaggct

SEQ ID NO: 2860 - protein, 84 aa, Homosapiens
MDLKHLMCFKLQCLNWSCWLAGSPCFFDLTLLVFAVSDFWNPKILQAHLGHLMPRPGISNFPRSPGSSSWETVLRDYDADIFNI

SEQ ID NO: 2861 - DNA, 554 bp, Homosapiens
ggagcaagctgccagagagagggtgtcagagagcttcagaggagcccttttgagtcttctgctcagtaatgatcagcacatgttgattttatttttaactgacatgaggccatttctgcccacgctcttgatgcttagtaaaacatgaacgagcctgttaaagcaacatgcaggagatggagaagttcggccacatgcccattgctttcctgcgagtggcaggagagtcttctgtcactgggaccagaatgtgcctagaggcaggaaatctcaacacgactgtgagatcagaccacaatccacaaagcgctgctgtttctctcaaaggcaggttctcaggctgagccgtagatttggagaaagcacccctcacccagctccacatctgtgtgtctgcgtgcacacgtgtgtaaaacatggtgtatgtgttctcaaacattcacgaaattagaaatgttgagagagatgaaaataaatataaaaatactgctgtgatacatttttcttgccgcacccacaactggactgtgtacatgggccctctttaggagact

SEQ ID NO: 2862 - protein, 58 aa, Homosapiens
MQEMEKFGHMPIAFLRVAGESSVTGTRMCLEAGNLNTTVRSDHNPQSAAVSLKGRFSG

SEQ ID NO: 2863 - DNA, 1403 bp, Homosapiens
atctcctcacaaaactcagtggaaacagacatccttttatttccatcggtatcatccgtttaaaaagaatgacaagaagattcccatcagtccaaactggaccacccacactttgaaaaagttggagcatttcagccggctccgcatgatccatcctgtcttcagtcagtgccttctggaagggagggaaagtcttggatgcacctggcactcaatccactcggcacctggctgctgctgtggtcctggggctggaaggaactcccactgggcacacatctacagaggagtgcgtggcgcagtgaggacggttactgctggagccgacacacagcgaactacatacttttagaaagagcctctgtcacatggctagaacaacaacaacaacaaagaaaacccacaaaaaacctggagaaaatatatctaaatctctgataggtctcttagctagcagtgagttcagtatgacagcacagagtctaaaaatattaattaaaaataaattgctttggttagcatttaaacctttcccattcaatagaagatttctgtaatgaggaatgctgaatatatataaagcctgacactcaatcttgaatttcgggggcgtattttactgaactaagagcataaaacactggcgtcccaggctgaagccatttgctgcgacctggtgtggcccccaaggccagcgcctcatcgttatgccccacagcacttggaaggaagacttaaaggacgatttgaggggcggggaaagggtggcacaggaacccatgtggcaccctggcagagatggcagcgtgggaagcaggaaggtcagggcagtgggtgcaggaggcaggcaagctgggcagatggagccacagctggagaggaagcggtcgggacacccttcccaggaccctgccctggacaccttccccaggacccctgttctacaggacccctgttccttcctgtttcggggtaaaacaccaagctggggaaggggttagggacgcagacctgggaggcagatggaacggcctgcgccaggccagaggaagcttcttccccgagaccacgcatgaaggccctgggacccctcctggacttgtcccctgcccaccccctcctacacccaaagaggacttgtaattcagataaaaagtaagaacagaaagagctgcattagccttttcataatgatagcatttataagcagaaaattagcgctatttctgttcattatttagtttttctttgttgctgacttcctattttctacataggataggtactctgcaataataatttcttcatcttccagagttgagtcaagatagtcttcctcatgctctggaatgtcttccagtatctcattgacggcctctgtctccatgtcttcgtctgttgag

SEQ ID NO: 2864 - protein, 114 aa, Homosapiens
MAAWEAGRSGQWVQEAGKLGRWSHSWRGSGRDTLPRTLPWTPSPGPLFYRTPVPSCFGVKHQAGEGVRDADLGGRWNGLRQARGSFFPETTHEGPGTPPGLVPCPPPPTPKEDL

SEQ ID NO: 2865 - DNA, 1453 bp, Homosapiens
ctcaacagacgaagacatggagacagaggccgtcaatgagatactggaagacattccagagcatgaggaagactatcttgactcaactctggaagatgaagaaattattattgcagagtacctatcctatgtagaaaataggaagtcagcaacaaagaaaaactaaataatgaacagaaatagcgctaattttctgcttataaatgctatcattatgaaaaggctaatgcagctctttctgttcttactttttatctgaattacaagtcctctttgggtgtaggagggggtgggcaggggacaagtccaggaggggtcccagggccttcatgcgtggtctcggggaagaagcttcctctggcctggcgcaggccgttccatctgcctcccaggtctgcgtccctaaccccttccccagcttggtgttttaccccgaaacaggaaggaacaggggtcctgtagaacaggggtcctggggaaggtgtccagggcagggtcctgggaagggtgtcccgaccgcttcctctccagctgtggctccatctgcccagcttgcctgcctcctgcacccactgccctgaccttcctgcttcccacgctgccatctctgccagggtgccacatgggttcctgtgccaccctttccccgcccctcaaatcgtcctttaagtcttccttccaagtgctgtggggcataacgatgaggcgctggccttgggggccacaccaggtcgcagcaaatggcttcagcctgggacgccagtgttttatgctcttagttcagtaaaatacgcccccgaaattcaagattgagtgtcaggctttatatatattcagcattcctcattacagaaatcttctattgaatgggaaaggtttaaatgctaaccaaagcaatttatttttaattaatatttttagactctgtgctgtcatactgaactcactgctagctaagagacctatcagagatttagatatattttctccaggttttttgtgggttttctttgttgttgttgttgttctagccatgtgacagaggctctttctaaaagtatgtagttcgctaaatgctccaactttttcaaagtgtgggtggtccagtttggactgatgggaatcttcttgtcattctttttaaacggatgataccgatggaaataaaaggtgggaaatatattcaaaaattgtcaccctaattttgcattaatttactcagcctccccagctgtaggtgttgaaagtgtctgggtgactagctcttcattttgattgcaggatgtctgtttccactgagttttgtgaggagatgatggaaggatgatctcagaagcagagggcatctgctgtgaaagatgccgcacgccaagcggggctggggtgcatcctgggcaggggactgaaatgtacctgtcagggtttgcctcagaagtgcctggtgagctgaggt

SEQ ID NO: 2866 - protein, 83 aa, Homosapiens [sequence omitted]

SEQ ID NO: 2867 - DNA, 2583 bp, Homosapiens
ttcaagtggagcagccctttcaggtagagcagcatgcgcttcatagtcttaatgcagaagatacttcatcagagacggccggggccgccagggatcacctgctaggtgatgggcgggtccgccctcgggcgcggatgaacaggtagggattgcactgtgggcagtaggaaggaaaggacgcaggcgctgtaactcctctaggccaaacctccaaaccctgggaaccaaagtgcccccgacccccaccccaggaaaatgggcctgttgggaggcaagcagatcggtgcaggagaacccgcagaaacggcaccatgcactgttctccgggtgagacttaagcacacacagacctcgggggtggccaggtcttgctgcgtcccggagccattggggcctgtggctgccacaaggggcatacctaccagagaggacctttccatcgtgctgaagggacggttccggtggcgcaggccagagaaccgccttgagtgctgcctgcgggcagtgctgccggccggccctgagcctgcacagacgttcacactgactcctgcttgccgaagacactgctgcttggtgatgctgcgctctggcctgagcagcccctcactgacacgtcagctccagtccccaccttatctccccacagcagagaatggagcatgcatcaagccatccagagaaacccagtggggcatggacccaaaacacgggcgctgcactcactttgcatttttatagcaacacacattggggtaatttctacttccattgcacagagagctttgcgagatgttgaggacataaagatggccagatgtccattttcgctctggtttctgacagcctgagagacacggtgagtgagagagtctgatcccctgaacccaggcctggttcccttccagccacaccactgtcgccttgctatgaatgaagaaacaaggtgtctgcttttgataaattgactgaggaggagttggctaagggaggaaggacaggagctacccataggacatatgggcaggaacacaaggacagggtaaggccgtgatcagcatcaaggacacctgaccagttgtgcacaccattgtgctggcatgggctgccctcacctgcctgctacacgcccatgcccactcctgctcctctaatggcatccaacctccccgctgtgatcagcaatcataccatccgcccccattcttctctccccacaacccgcaccttctggcagcccatgaacatgtcacactcagactgtcctgccccaaatactatcttgtttgtcccacatctggaatgtgctttttcctctgactccccaaggagaaccctcccaggccccctcctctgcaacggcctctcctccaacctcagcaccgtcctgccccctcctctaccgcctgtccggtggagcaggcccggcccaagtctccatgcctggagggcagcccattctggacatagcgcatgcccagaactgcctccacagccggcttcctctgcggctctctcttcacaagacacggaagagttttggggcctgctggtgtggcattgcttctatgatggctaaaaacagctgggaagctagaagacacgcctgaaccaagcgcaggacagcgatttgttagccaaaagcttaaattcaggccccaaatccaagtgtggcattgtgtcaaatgaggctgagactccgcgtcacctcagctcaccaggcacttctgaggcaaaccctgacaggtacatttcagtcccctgcccaggatgcaccccagccccgcttggcgtgcggcatctttcacagcagatgccctctgcttctgagatcatccttccatcatctcctcacaaaactcagtggaaacagacatcctgcaatcaaaatgaagagctagtcacccagacactttcaacacctacagctggggaggctgagtaaattaatgcaaaattagggtgacaatttttgaatatatttcccaccttttatttccatcggtatcatccgtttaaaaagaatgacaagaagattcccatcagtccaaactggaccacccacactttgaaaaagttggagcatttcagccggctccgcatgatccatcctgtcttcagtcagtgccttctggaagggagggaaagtcttggatgcacctggcactcaatccactcggcacctggctgctgctgtggtcctggggctggaaggaactcccactgggcacacatctacagaggagtgcgtggcgcagtgaggacggttactgctggagccgacacacagcgaactacatacttttagaaagagcctctgtcacatggctagaacaacaacaacaacaaagaaaacccacaaaaaacctggagaaaatatatctaaatctctgataggtctcttagctagcagtgagttcagtatgacagcacagagtctaaaaatattaattaaaaataaattgctttggttagcatttaaacctttcccattcaatagaagatttctgtaatgaggaatgctgaatatatataaagcctgacactcaatcttgaatttcgggggcgtattttactgaacta

SEQ ID NO: 2868 - protein, 161 aa, Homosapiens
MGLLGGKQIGAGEPAETAPCTVLRVRLKHTQTSGVARSCCVPEPLGPVAATRGIPTREDLSIVLKGRFRWRRPENRLECCLRAVLPAGPEPAQTFTLTPACRRHCCLVMLRSGLSSPSLTRQLQSPPYLPTAENGACIKPSRETQWGMDPKHGRCTHFAFL

SEQ ID NO: 2869 - DNA, 2743 bp, Homosapiens
agagcatgggaggacctggcttgcctggtggaggcgagtagccgaggggtcggtggagctgcgccccaaatgagttcccggcgcgcgattctccccgaccccgaccctttgtccgcctccccctccctcgtcccggcccttggctcaggggacccaggcggcggcggcggaggtggcagaggccagagcccagaggcgcagcccgggcagctaggagggtcgcacgtggagccgtcccccggacccgcacagcgacgaaggggggaggctgcaggcgcgcggggtgggggctggggcgcagcccgagaagtgggaggggatcgggtgaggggtggtctctgaggaggagccaggctggaccgtattgttccgcgctcggccggggagggcgcggggcgctcggcttcccgtgttcctctccccgccccagccccgtgggcgcgagaggaggcggggggctccttgtgcaccagagacgcagctgccttgttcgcccggtggggtgtggatcctccgagcggtgctgggaagggggttctctctgcccgcgcgcccaggactctacccagggcggaggtcccgagtgggccgccccccgcagcgccctgggttcgcgggcccagaggctggaggcagcggggagctagggtccttcaccctcccctcgccgcgtgcctccgcaggagtcgggctccccgttccccgcgatggccgcgggccgcagtcgtacggagccgccgcgcggaccccggggcgcccctccctagcggggcgcagctccttcttgttccccgccctgccagcgggatggggggcggcgggtcggccctgagggtctgcgccgaccaccgcgggggcatcaactggctgagcctgagccccgacgggcagcgcctgctgacgggcagcgaggacggcacggcccggctctggagcaccgcggacggccagtgctgcgcgctcctgcaaggtagaccctcccactccctccctgacctcttcgccgcagctcaccggccccagaccgcggaccccagctcctgcgcccgcagacccctttctagaagtccagcccccgctcatcccggcacactagcggaagagcgcttgtctgggcccagcatctggctgttgagcgcacggcagggcagggtgccttgtggcctctttgtggccaattgtgctcttctgctggcatttcctgttgacgactctcacagcaacagtagacgcttgttaagggccagcggtgcggagaagtgtgccgtcgtcacactatgttaccccacatacagacgtggaaacaggctgggagacatgaaagctatgtgaccttctgccagctggaggatgaggctgccttcacatgcagcgccgactgcaccatcaggaggtgggacgtgctgaccgggcagtgtctgcaggtgtaccgaggacacacgtccatcgtgaacaggatcctggttgccaacaaccagctcttcagcagctcctatgaccggacagctcgggtctggagtgtggacaaggggcagatgtcccgggagttccggggccaccgcaactgcgtgctgaccctagcctactctgccccgtgggacctccccagcactccctgcgcggaggaggccgcggccggggggcttctggtgaccggcagcacagatggcacagccaaggtgtggcaggtggccagcggctgctgccaccagacgctgcggggccacacgggtgcagtgctgtgcctagtgctagacacgcccggccacacggccttcacaggcagcaccgacgccaccatccgtgcctgggacatcctgagtggggagcagctgcgggtgttccgggagcaccggggctccgtcatctgtctggagctggtgaaccgactcgtgtactctggcagcgcggacaggaccgtcaagtgctggctggcagacacaggggagtgtgtgcgcacgttcacggcccacagacgcaacgtgagcgccctcaagtaccacgcgggcaccttgttcacgggcagcggggacgcttgcgcccgggccttcgacgcgcagtctggagagctgcggagggtgttccggggccacacattcatcatcaactgcatccaggtgcacggccaggtgctctacaccgcctcgcacgacggcgccctgcgcctctgggacgtgcgcgggctccgaggtgccccgcggccccctccgcccatgcgcagcctctcgcggctcttcagcaacaaggtgggctgcgccgccgcgcccctgcagccggcctgatcccgcggggcccctgcagacgccagcccagacacccagcggctcccagagcgccccgccctgctacccgcggtggtggcgcccgatggccggcgaggggcgaggagcgaggaagcccgggcgggaggagagcccgtcgcaggcgtctggtttttctttggtggccaggaggcgctgggagcgggagtgctcgccctggggaccgcccccttttcccttttagggtggctcctgtcctccctccccatccctgacctggcgaaaggcctagtcctggggaccctcccacctcaggggctgcaggcggactgccccagctcccccagccccacgaaactgggcctttcctgctgagaggaagtgactttttacagaagccactgaacctggttattttggcaaatcgtccgtctcgagggccttggggggaactgaaatatacagcctgaacgttaaaagtg

SEQ ID NO: 2870 - protein, 334 aa, Homosapiens [sequence omitted]

SEQ ID NO: 2871 - DNA, 1355 bp, Homosapiens
caggccgaccccggggtccattagaggcgccccaggccgagggagcccgcggcggctggaaggacatgaaagctatgtgaccttctgccagctggaggatgaggctgccttcacatgcagcgccgactgcaccatcaggaggtgggacgtgctgaccgggcagtgtctgcaggtgtaccgaggacacacgtccatcgtgaacaggatcctggttgccaacaaccagctcttcagcagctcctatgaccggacagctcgggtctggagtgtggacaaggggcagatgtcccgggagttccggggccaccgcaactgcgtgctgaccctagcctactctgccccgtgggacctccccagcactccctgcgcggaggaggccgcggccggggggcttctggtgaccggcagcacagatggcacagccaaggtgtggcaggtggccagcggctgctgccaccagacgctgcggggccacacgggtgcagtgctgtgcctagtgctagacacgcccggccacacggccttcacaggcagcaccgacgccaccatccgtgcctgggacatcctgagtggggagcagctgcgggtgttccgggagcaccggggctccgtcatctgtctggagtgttcacgggcagcggggacgcttgcgcccgggccttcgacgcgcagtctggagagctgcggagggtgttccggggccacacattcatcatcaactgcatccaggtgcacggccaggtgctctacaccgcctcgcacgacggcgccctgcgcctctgggacgtgcgcgggctccgaggtgccccgcggccccctccgcccatgcgcagcctctcgcggctcttcagcaacaaggtgggctgcgccgccgcgcccctgcagccggcctgatcccgcggggcccctgcagacgccagcccagacacccagcggctcccagagcgccccgccctgctacccgcggtggtggcgcccgatggccggcgaggggcgaggagcgaggaagcccgggcgggaggagagcccgtcgcaggcgtctggtttttctttggtggccaggaggcgctgggagcgggagtgctcgccctggggaccgcccccttttcccttttagggtggctcctgtcctccctccccatccctgacctggcgaaaggcctagtcctggggaccctcccacctcaggggctgcaggcggactgccccagctcccccagccccacgaaactgggcctttcctgctgagaggaagtgactttttacagaagccactgaacctggttattttggcaaatcgtccgtctcgagggccttggggggaactgaaatatacagcctgaacgttaaaagtg

SEQ ID NO: 2872 - protein, 277 aa, Homosapiens
MSREFRGHRNCVLTLAYSAPWDLPSTPCAEEAAAGGLLVTGSTDGTAKVWQVASGCCHQTLRGHTGAVLCLVLDTPGHTAFTGSTDATIRAWDILSGEQLRVFREHRGSVICLECSRAAGTLAPGPSTRSLESCGGCSGATHSSSTASRCTARCSTPPRTTAPCASGTCAGSEVPRGPLRPCAASRGSSATRWAAPPRPCSRPDPAGPLQTPAQTPSGSQSAPPCYPRWWRPMAGEGRGARKPGREESPSQASGFSLVARRRWERECSPWGPPPFPF

SEQ ID NO: 2873 - DNA, 1015 bp, Homosapiens
gcccaggtcgcacagccagtgaggggtagatggcagtctgagccctctcattgctgtaaaccctgcctgcatgcctgttggtttctatttgtgccctgtactcactcaggaggtcagtgtgcctcgggtgcaccttcccctgggcctgtcccatgcactgtgaggtccctttcagctctggccctcctactgcccaggtagcacacgtagtcccctggatgagccgcgaggctttctgctgtgggtagttctttatcaccgcgggcttttccaccatcatcagtgaactctctgtggcctcgcccaggccttccaacttaggaattttcaaggacggggacagaggtcatctttctttatcctgagattctactgatacgctcaacttgcaaaagagtcattgtgagtgtgtgacagtccttttgtgtggatccccaaagaaagcaaggtgttgccagttcctttctcctgcaggattttttttttctatcagtgaaatattattaaaatgtcttaacatttgtttagtgccctatattttataaataacacatctttgtgcttttttattgtgtaatgaatcctcacaactctgaggtgggtgggattgacaccagttcacagaggagagtggggaggtgcagactcatgagcagcatacacggcattcttgttgttttctagataccatcgataatggggtgggtgctgtcgccaacatccctcgaggcgtggtgcggtggcaggacttgtccagggtcccgcagctggtccatggcagagagggtttctgaagactgtacggtgcttctcttaccactgtgggggaagttgtgtccagaccacatggctggtctgtggtggccccatccctagaagcatcctaactctaaatctagatctctttccactttggttccgtcctggcccttgcacagctctgggcccacaagagcctgtggttggccggtcctggatttctcgagcagagtggctggggctggcgactcctacg

SEQ ID NO: 2874 - protein, 59 aa, Homosapiens
MGWVLSPTSLEAWCGGRTCPGSRSWSMAERVSEDCTVLLLPLWGKLCPDHMAGLWWPHP

SEQ ID NO: 2875 - DNA, 1610 bp, Homosapiens
gcccaggtcgcacagccagtgaggggtagatggcagtctgagccctctcattgctgtaaaccctgcctgcatgcctgttggtttctatttgtgccctgtactcactcaggaggtcagtgtgcctcgggtgcaccttcccctgggcctgtcccatgcactgtgaggtccctttcagctctggccctcctactgcccaggtagcacacgtagtcccctggatgagccgcgaggctttctgctgtgggtagttctttatcaccgcgggcttttccaccatcatcagtgaactctctgtggcctcgcccaggccttccaacttaggtaggatattagccccaatattggctaatcctgatactgctggttttaaataagaacagttgaccaggctcggtggctcacaccgccttggcctcccgaagtgctgagattacaagtgtgagccactgcacccggcctagaattggcatttctaacaagcttttgggtgggtcttatgcacagctggccccgggagcccctgggctggggacgggttgtgggagcccagcttagcccacaattaggtggggtttctccccagtgaggccccaggctttgccaggctgccggtagcctggtgggcacttggctttgcccccacggcagctctggagcctcaccaagcctccagggcccaccctcctgcccagctctgtgtctggcacctgtgcctccttccttcacacccactttggtgaccctcacggctgcttgtccccttgaggtactgacactcacttcccagggagggtgcccaaccttctgccctaattgagggcagggctatccccgctcaagcaggacactggaatgaaagaactgtggcccattttgctaggattgtttttgctgttatatgggttggtattttcaggaattttcaaggacggggacagaggtcatctttctttatcctgagattctactgatacgctcaacttgcaaaagagtcattgtgagtgtgtgacagtccttttgtgtggatccccaaagaaagcaaggtgttgccagttcctttctcctgcaggattttttttttctatcagtgaaatattattaaaatgtcttaacatttgtttagtgccctatattttataaataacacatctttgtgcttttttattgtgtaatgaatcctcacaactctgaggtgggtgggattgacaccagttcacagaggagagtggggaggtgcagactcatgagcagcatacacggcattcttgttgttttctagataccatcgataatggggtgggtgctgtcgccaacatccctcgaggcgtggtgcggtggcaggacttgtccagggtcccgcagctggtccatggcagagagggtttctgaagactgtacggtgcttctcttaccactgtgggggaagttgtgtccagaccacatggctggtctgtggtggccccatccctagaagcatcctaactctaaatctagatctctttccactttggttccgtcctggcccttgcacagctctgggcccacaagagcctgtggttggccggtcctggatttctcgagcagagtggctggggctggcgactcctacg

SEQ ID NO: 2876 - protein, 59 aa, Homosapiens; identical to SEQ ID NO: 2874

SEQ ID NO: 2877 - DNA, 2152 bp, Homosapiens
agagcatgggaggacctggcttgcctggtggaggcgagtagccgaggggtcggtggagctgcgccccaaatgagttcccggcgcgcgattctccccgaccccgaccctttgtccgcctccccctccctcgtcccggcccttggctcaggggacccaggcggcggcggcggaggtggcagaggccagagcccagaggcgcagcccgggcagctaggagggtcgcacgtggagccgtcccccggacccgcacagcgacgaaggggggaggctgcaggcgcgcggggtgggggctggggcgcagcccgagaagtgggaggggatcgggtgaggggtggtctctgaggaggagccaggctggaccgtattgttccgcgctcggccggggagggcgcggggcgctcggcttcccgtgttcctctccccgccccagccccgtgggcgcgagaggaggcggggggctccttgtgcaccagagacgcagctgccttgttcgcccggtggggtgtggatcctccgagcggtgctgggaagggggttctctctgcccgcgcgcccaggactctacccagggcggaggtcccgagtgggccgccccccgcagcgccctgggttcgcgggcccagaggctggaggcagcggggagctagggtccttcaccctcccctcgccgcgtgcctccgcaggagtcgggctccccgttccccgcgatggccgcgggccgcagtcgtacggagccgccgcgcggaccccggggcgcccctccctagcggggcgcagctccttcttgttccccgccctgccagcgggatggggggcggcgggtcggccctgagggtctgcgccgaccaccgcgggggcatcaactggctgagcctgagccccgacgggcagcgcctgctgacgggcagcgaggacggcacggcccggctctggagcaccgcggacggccagtgctgcgcgctcctgcaaggtagaccctcccactccctccctgacctcttcgccgcagctcaccggccccagaccgcggaccccagctcctgcgcccgcagacccctttctagaagtccagcccccgctcatcccggcacactagcggaagagcgcttgtctgggcccagcatctggctgttgagcgcacggcagggcagggtgccttgtggcctctttgtggccaattgtgctcttctgctggcatttcctgttgacgactctcacagcaacagtagacgcttgttaagggccagcggtgcggagaagtgtgccgtcgtcacactatgttaccccacatacagacgtggaaacaggctgggaacgtggggcttcatcatgttggccaggctggtcttgaactcccgacctcaggtgatccacccgccttggcctcccgaagtgctgagattacaagtgtgagccactgcacccggcctagaattggcatttctaacaagcttttgggaattttcaaggacggggacagaggtcatctttctttatcctgagattctactgatacgctcaacttgcaaaagagtcattgtgagtgtgtgacagtccttttgtgtggatccccaaagaaagcaaggtgttgccagttcctttctcctgcaggattttttttttctatcagtgaaatattattaaaatgtcttaacatttgtttagtgccctatattttataaataacacatctttgtgcttttttattgtgtaatgaatcctcacaactctgaggtgggtgggattgacaccagttcacagaggagagtggggaggtgcagactcatgagcagcatacacggcattcttgttgttttctagataccatcgataatggggtgggtgctgtcgccaacatccctcgaggcgtggtgcggtggcaggacttgtccagggtcccgcagctggtccatggcagagagggtttctgaagactgtacggtgcttctcttaccactgtgggggaagttgtgtccagaccacatggctggtctgtggtggccccatccctagaagcatcctaactctaaatctagatctctttccactttggttccgtcctggcccttgcacagctctgggcccacaagagcctgtggttggccggtcctggatttctcgagcagagtggctggggctggcgactcctacg

SEQ ID NO: 2878 - protein, 201 aa, Homosapiens
MGGGGSALRVCADHRGGINWLSLSPDGQRLLTGSEDGTARLWSTADGQCCALLQGRPSHSLPDLFAAAHRPQTADPSSCARRPLSRSPAPAHPGTLAEERLSGPSIWLLSARQGRVPCGLFVANCALLLAFPVDDSHSNSRRLLRASGAEKCAVVTLCYPTYRRGNRLGTWGFIMLARLVLNSRPQVIHPPWPPEVLRLQV

SEQ ID NO: 2879 - DNA, 1769 bp, Homosapiens
cggaactgccctaatggaaaccagccgccgggcgctccgggagggctcaggccgaccccggggtccattagaggcgccccaggccgagggagcccgcggcggctggaaggtgaacttgacatcccggctccaccgaccccgcagcggctcgcacctcatccccactccggccagaccaaagtagaatcctgggtgtgcgcgtgatttcccagggagggcggactcggggctttccctgtcgcaccctccattgggggaccgcccccaagtccccgagagcccctcgggcagagtccttagggctcagagcatgggaggacctggcttgcctggtggaggcgagtagccgaggggtcggtggagctgcgccccaaatgagttcccggcgcgcgattctccccgaccccgaccctttgtccgcctccccctccctcgtcccggcccttggctcaggggacccaggcggcggcggcggaggtggcagaggccagagcccagaggcgcagcccgggcagctaggagggtcgcacgtggagccgtcccccggacccgcacagcgacgaaggggggaggctgcaggcgcgcggggtgggggctggggcgcagcccgagaagtgggaggggatcgggtgaggggtggtctctgaggaggagccaggctggaccgtattgttccgcgctcggccggggagggcgcggggcgctcggcttcccgtgttcctctccccgccccagccccgtgggcgcgagaggaggcggggggctccttgtgcaccagagacgcagctgccttgttcgcccggtggggtgtggatcctccgagcggtgctgggaagggggttctctctgcccgcgcgcccaggactctacccagggcggaggtcccgagtgggccgccccccgcagcgccctgggttcgcgggcccagaggctggaggcagcggggagctagggtccttcaccctcccctcgccgcgtgcctccgcaggagtcgggctccccgttccccgcgatggccgcgggccgcagtcgtacggagccgccgcgcggaccccggggcgcccctccctagcggggcgcagctccttcttgttccccgccctgccagcgggatggggggcggcgggtcggccctgagggtctgcgccgaccaccgcgggggcatcaactggctgagcctgagccccgacgggcagcgcctgctgacgggcagcgaggacggcacggcccggctctggagcaccgcggacggccagtgctgcgcgctcctgcaaggtgccttgtggcctctttgtggccaattgtgctcttctgctggcatttcctgttgacgactctcacagcaacagtagacgcttgttaagggccagcggtgcggagaagtgtgccgtcgtcacactatgttaccccacatacagacgtggaaacaggctgggagttaagtaattcgcccaggtcgcacagccagtgaggggtagatggcagtctgagccctctcattgctgtaaaccctgcctgcatgcctgttggtttctatttgtgccctgtactcactcaggaggtcagtgtgcctcgggtgcaccttcccctgggcctgtcccatgcactgtgaggtccctttcagctctggccctcctactgcccaggtagcacacgtagtcccctggatgagccgcgaggctttctgctgtgggtagttctttatcaccgcgggcttttccaccatcatcagtgaactctctgtggcctcgcccaggccttccaactta

SEQ ID NO: 2880 - protein, 72 aa, Homosapiens
MGGGGSALRVCADHRGGINWLSLSPDGQRLLTGSEDGTARLWSTADGQCCALLQGALWPLCGQLCSSAGISC

SEQ ID NO: 2881 - DNA, 1114 bp, Homosapiens
cctttgtagcggacgcccctcgacccacccacccgatcccggccgcaccctgctctgcacccgcaccccacccccagacctcaccctgccctgccgtgcgctcaacagccagatgctgggcccagacaagcgctcttccgctagtgtgccgggatgagcgggggctggacttctagaaaggggtctgcgggcgcaggagctggggtccgcggtctggggccggctgatcaccagttcctcttaggaaccggtgaacctcagggggcccattgcacatccaggtgtgaaactgcggtgtggcctccagccaacacaagccatcagccccatgctcagctcccagcaggcagagcgttcagaagcgccagcgccatcatcttgggagcctgcagtccacacaccgctgaccttacctacttcctctttccaggtcgtagattacagactctcctctgggaaattgcccccagatctaacaggagtacaagaagctgggtagattggaaaacagcaccgaattcccctggaactgaggacggaagccttcccagtcctgcagccacctgcagactctcacaagcacggtgctcccgggagaagaccttgctaccccaggcccaaggcagtcgagagaaaacgggaagccctgaaggtttttcaccccgggggaaggcagccagaggagggcacagtgtggaagaactcaactttttaaagacagagatcagctttaaatattgctaagaaagaacttggagagagaagttggtgataccggagacagcaggcaacagacagagtgagaggcccgaagaacaagaggaggagggagtctcttctgggagcagaaggagtgtcgacttaaatattagggagccaaagatgaacctcgcagagaacctgcaaaacccagttgcagaaatacctgcccacacctaaaaactcagtcactgaaagtctgaagtcaaatgattatgtgaaatcttagtagtgggtacatgtggtttcattagattattctttgtatctatatttgtactatcttataagcactataagttttaaaaccatacaagaggctctatggaaaataaattggacttcattaaaattc

SEQ ID NO: 2882 - protein, 196 aa, Homosapiens
MSGGWTSRKGSAGAGAGVRGLGPADHQFLLGTGEPQGAHCTSRCETAVWPPANTSHQPHAQLPAGRAFRSASAIILGACSPHTADLTYFLFPGRRLQTLLWEIAPRSNRSTRSWVDWKTAPNSPGTEDGSLPSPAATCRLSQARCSREKTLLPQAQGSREKTGSPEGFSPRGKAARGGHSVEELNFLKTEISFKYC

SEQ ID NO: 2883 - DNA, 2568 bp, Homosapiens
agacctcaccctgccctgccgtgcgctcaacagccagatgctgggcccagacaagcgctcttccgctagtgtgccgggatgagcgggggctggacttctagaaaggggtctgcgggcgcaggagctggggtccgcggtctggggccgccaacacaagccatcagccccatgctcagctcccagcaggcagagcgttcagaagcgccagcgccatcatcttgggagcctgcagtccacacaccgctgaccttacctacttcctctttccaggtcgtagattacagactctcctctgggaaattgcccccagatctaacaggagtacaagaagctgggtagattggaaaacagcaccgaattcccctggaactgaggacggaagccttcccagtcctgcagccacctgcagactctcacaagcacggtgctcccgggagaagaccttgctaccccaggcccaaggcagtcgagagaaaacgggaagccctgaaggtttttcaccccgggggtgagagtgtatgatcgaagatatatttgagggtaattgtacagatagtcccaacttagcattgttcaactttatgatggtatgaaagtgatgacattcagtagaaattgtacttcaagtgccaatacaatcagtttttcacttttggtgcagtattcaataaattacatgagatattcaacactttactttaaaataggctttgtgtaagatgattctgcccaaatgtaaggctgatgccagtgctctgagcacatttaagggaaagctgggctaagcaatgatgttccacaagttaggcatattaaatgcatttttgacttagaatattctcaacttgcaatgggtttatcagaacatgacatcgttaatcactcaaggagcatctgtaccactaatgacatagatgctggttgcaggaaggcagccagaggagggcacagtgtggaagaactcaactttttaaagacagagatcagctttaaatattgctaagaaagaacttggagagagaagttggtgataccggagacagcaggcaacagacagagtgagaggcccgaagaacaagaggaggagggagtctcttctgggagcagaaggagtgtcgacttaaatattagggagccaaagatgaacctcgcagagaacctgcaaaacccagttgcagaaatacctgcccacacctaaaaactcagtcactgaaagtctgaagtcaaatgattatgtgaaatcttagtagtgggtacatgtggtttcattagattattctttgtatctatatttgtactatcttataagcactataagttttaaaaccatacaagaggctctatggaaaataaattggacttcattaaaattcaaaacgtgtgcatcaaaagacactgtcaagagaatgaaaagacaacccatatgatgggagaaaatcacgtatctgacaaaggtctacaatccagaacatattaaaaaactcctacaattcaacaatgaaaaccagcctggccaacatggtgaaaccccgtttctactaaaaatagaaaaaattagccaggtgtggtggcaggcgcctgtaatccagctactcaggaggctgaggctggagaattgcttgaacctgtgaggcagaggttgcagtgagctaagatcgtgccattgcactccagcctaggcaacaagagtgaaactccgtctcaaaaaagaaagaaaagaaaagatgctcactgtcattagtcataaaggaaatgcaaatcaaaagtacagtgagatgccacttaacacccactacgatgggtaatcataggatgggaaaaataaaataagtgtgggtgaggatgtggaaaaatcaaccctcacacactgctggtgagaatgtaagatggtgcagctgctatgtgaccgtctggcagtccctcgaatgattaaacatagagttataatgtgacccagcaattccatatatacccaagagaaatgagcattattcctaatagacaagggaagaaacagccccacggttcatcagcccatgagtagattaactaaatgtggcatatgcatataatggaatactgttccgccatgacaaagagtgaggtgctgataaacggtaccacgtgcagggaccttgaaaacagattaagtgagagaagtcagtcaccaaagaccacatattacctgattccattcatctgcacggtccagaacaagggagtctacagagatagttggttagtggttgcctagggcttggggaagaggtctggggagtggagaagtgatgggtatagtatacacggttcctttttggggtgatgaaaatgttctaaaatggactgtggtactggttgcttattttaatatatctgtgaatatattaaaaaaccattgaattgtacactttacatggatcagctatacagtatgtgaactatttctccataaagctgggggtttttttgtttttgtttttgttttttatttagatggagtctcactctgttgtccaggctggagtgcagtggcgcgatctcggctcactgcaacctccacctcctgag

SEQ ID NO: 2884 - protein, 86 aa, Homosapiens
MSGGWTSRKGSAGAGAGVRGLGPPTQAISPMLSSQQAERSEAPAPSSWEPAVHTPLTLPTSSFQVVDYRLSSGKLPPDLTGVQEAG

SEQ ID NO: 2885 - DNA, 651 bp, Homosapiens
gacaagcgctcttccgctagtgtgccgggatgagcgggggctggacttctagaaaggggtctgcgggcgcaggagctggggtccgcggtctggggccgccaacacaagccatcagccccatgctcagctcccagcaggcagagcgttcagaagcgccagcgccatcatcttgggagcctgcagtccacacaccgctgaccttacctacttcctctttccaggtcgtagattacagactctcctctgggaaattgcccccagatctaacaggagtacaagaagctgggtagattggaaaacagcaccgaattcccctggaactgaggacggaagccttcccagtcctgcagccacctgcagactctcacaagcacggtgctcccgggagaagaccttgctaccccaggcccaaggcagtcgagagaaaacgggaagccctgaaggtttttcaccccgggggtgagagtgtatgatcgaagatatatttgagggtaattgtacagatagtcccaacttagcattgttcaactttatgatggtatgaaagtgatgacattcagtagaaattgtacttcaagtgccaatacaatcagtttttcacttttggtgcagtattcaataaattacatgagatattcaacactttacttt

SEQ ID NO: 2886 - protein, 86 aa, Homosapiens; identical to SEQ ID NO: 2884

SEQ ID NO: 2887 - DNA, 885 bp, Homosapiens
cctggctcctcctcagagaccacccctcacccgatcccctcccacttctcgggctgcgccccagcccccaccccgcgcgcctgcagcctccccccttcgtcgctgtgcgggtccgggggacggctccacgtgcgaccctcctagctgcccgggctgcgcctctgggctctggcctctgccacctccgccgccgccgcctgggtcccctgagccaagggccgggacgagggagggggaggcggacaaagggtcggggtcggggagaatcgcgcgccgggaactcatttggggcgcagctccaccgacccctcggctactcgcctccaccaggcaagccaggtcctcccatgctctgagccctaaggactctgcccgaggggctctcggggacttgggggcggtcccccaatggagggtgcgacagggaaagccccgagtccgccctccctgggaaatcacgcgcacacccaggattctactttggtctggccggagtggggatgaggtgcgagccgctgcggggtcggtggagccgggatgtcaagttcaccttccagccgccgcgggctccctcggcctggggcgcctctaatggaccccggggtcggcctgagccctcccggagcgcccggcggctggtttccattagggcagttccggcgccgacttcgctggggacggggaaggtgacccccctactcggatcccccaggtcctaaagccaacacaagccatcagccccatgctcagctcccagcaggcagagcgttcagaagcgccagcgccatcatcttgggagcctgcagtccacacaccgctgaccttacctacttcctctttccaggtcgtagattacagactctcctctgggaaattgcccccaga

SEQ ID NO: 2888 - protein, 46 aa, Homosapiens
MLSSQQAERSEAPAPSSWEPAVHTPLTLPTSSFQVVDYRLSSGKLP

SEQ ID NO: 2889 - DNA, 1165 bp, Homosapiens
gagaaaggaaagcgcgaggagccgccgccaccaccagcgcagcagctgcttctctccagctctcaatctgctgcattttcctctagtgcttccggatcctcttcattcttttcggctactcaaccactccgcatgctgctggaatatttctggctttagaagtacaggagggcgcagatggctaactgagtaacattcatgaaatgaggctttctgtggcggcgtagtgtttggaattagaaggtaattcagtagagtgtaacttagagaatattgcaagtgacacattgaatcctgcccgtcagggcaccttttcctcagagcaatccggccacacgaatagaaggctgtcgtgaatcacatcagatgtaaaatcattccttctgtttactcttttaattttcatcctttgcaggtagtgcaaattcaacttcaaatatggtgtaggttttgctagattccatatttttttcttggatttttgctaattatttttagcaaaaaatttttgctcagtggcactctccctagtgtccatgggttagggccatgctggggaaaacgggccggtatttacacacgcgcaaaacacccagagacggcacaaggaggttgaactcatgtttcagttcgcgaacattgactccttacgaaagtcacttcattctaactagatgcgcccacttccggtcattatttcgtttgcatgatgtattgcttcttcacgttttgtttttattgagcacggagtagaattccagggctgccttgacttcttccctgcatgctccctcccagtgactttccttccctttcacatgaggatctgccgttcatgttgctttctcctttgtcctcttggacttgagggcattgtgaaaagctttgctgtgatttaaaaatgccagcaattttaatctagcagtgttgaagctgggaattttttggcgcaatccatgtagcagtgacccaggcttgggagccagaaacaagtgtgacctgggattttatttaacacaactgttgccaaagagttggctttgtttatttggttttggcggggagaggagtggtatttgatgctttctgtggacaatgtaaccctaaacacatcatgtattttaaatgccacctacataaataaaacataagcatattgaataca

SEQ ID NO: 2890 - protein, 67 aa, Homosapiens
MLGKTGRYLHTRKTPRDGTRRLNSCFSSRTLTPYESHFILTRCAHFRSLFRLHDVLLLHVLFLLSTE

SEQ ID NO: 2891 - DNA, 646 bp, Homosapiens
actatgaagttctaggcgtgcagagacatgcctcacccgaggatattaaaaaggcatatcggaaactggcactgaagtggcatccagataaaaatcctgagaataaagaagaagcagagagaaaattcaagcaagtagcggaggcatatgaagtgctgtcggatgctaagaaacgggacatctatgacaaatatggcaaagaaggattaaatggtggaggaggaggtggaagtcattttgacagtccatttgaatttggcttcacattccgtaacccagtgactttccttccctttcacatgaggatctgccgttcatgttgctttctcctttgtcctcttggacttgagggcattgtgaaaagctttgctgtgatttaaaaatgccagcaattttaatctagcagtgttgaagctgggaattttttggcgcaatccatgtagcagtgacccaggcttgggagccagaaacaagtgtgacctgggattttatttaacacaactgttgccaaagagttggctttgtttatttggttttggcggggagaggagtggtatttgatgctttctgtggacaatgtaaccctaaacacatcatgtattttaaatgccacctacataaataaaacataagcatattgaataca

SEQ ID NO: 2892 - protein, 61 aa, Homosapiens
FKNASNFNLAVLKLGIFWRNPCSSDPGLGARNKCDLGFYLTQLLPKSWLCLFGFGGERSGI

SEQ ID NO: 2893 - DNA, 5364 bp, Homosapiens
cccagcgcaggtcacgttctcctgtgatgtttacggttctccttgatacggggtaacttaataggcaatatgtgtgtattacataagaggataagagagggaagaaaactgctatgtgcctaaatataacatgcatagattatatatgacaagtattggtcacaaaataaggaggaaatactccaggcattgatggtcctcgttcctgtaactggtcctgtggacacagccactttcttccactgcccattctgtggtcttgtggccttcagcaggcacctcactggttgtggttctttctggtgaggtaaagtaaaaaagaagttggtagcacatttgattaacacgtgtcttaagatttatttctaaggtataaaagtatgatcagttgtttataaatccaaaagtaataatacatgctgggtttaagatttgaaaatgggaatgaggtgagaggaggaggaggtcttgcccctccaccccagttggagccccacaggaacgttgtagcacgtgctgtatagttgtgatgcccgcggtcggagccccacgggagcattgtagcacgcgctgtatggttgtgcgttgtagcgtgcgctgtatagttgtgatgcccacaggcttccttgcatttctctccagctctgctagccacgaacacttcaagtctgcacttcacatgcttgcttgcctgtgcatggttacgcacgctcagcaacttagttccacgttttgggatgagttgagttccctgacgtagaattgctgggttgagggttttttataataaaaatattggttttattttgggggctgaaggttttaaaagcttaatacatacttctagattgcttttcaaaacgacagaaaccagcacatgataagtagctcttacttgaaataaggacttgtctgatctcaagtggcaacttttaactggtctttaaatattataaattttgaaattattttaatgtttcttagcactgtttctgttacaaatgagacttcatttttagggtaatttgtgattttaatatttgaaattatacgagttaaaattcagtgaatacctgaattgtgaaaaattatatttaagctacaaaatgtcagtagagaaataaacaagataaagatttttttcatacaagaaaatggaacggaaaagcattggccttctcataacatagtactcagccagcttttgaggtagcttctgtagatgatgatataattatgaatgtcattgtcttaatttagcttagaatgcaaaccagttaaaatcacttggttagtactgttaccactgagacacgggttcaagatgcatgtaaaagctcagtgccttgtggacaacttctaagggtttagttgccatggatttaaagaaattgtgactaaaccaatgttttagcattgataaatgggaaattgcggaaggatgtaaacgtagagtttaactctacaacttggcttagggactcaggtatggacagtgagaataacttggtttagggactcagatatggacagtgagactggccacatgagtgcctttctcactgtcacactcttacccaggttggagtgcagtggctgtcgacaggtgtgatcatagctccctgcagccttgaattcctgggctcaagcagtcctgcctcagcctcccaaggaggtgggactaaagatggtgtgccaccacacctggctaatttttaaatttattgtagagaaggggtcttgctatgttgcccaggttggtcttgaacccctgacctccagggatctctcctgccttggcctcctcaggagctggaactacagatatatgctaatgtcttcaatttatggaaatgcagaaatgccttttttttttttttttttttttttgagatggactcatgttctgctgcccaggctggagtgctgtggtgtgatcttagctcactgtatcctccacctccggggttcaagcaattttcgtgcctcagcctcctgggtggctgagactacagatgcccaccaccactcctggctaacttttttgtatttttagtagagacagggttttaccatgttggccaggctggtctcaaactcctgacctcaagtgatctgcccgcctcggcctcccaaagtactgggattatagctgtgagccactgcaccctcccggaaatgctttttaacggtcacctcctaggggagatgaagagagttaccgcataatcagttttaactgtatttgtaatgtttgtttctttacctgggaggatatgttgtagatacgtgagatagaatacctaagtgacacaatggtgtgcaggctatggctgcaaagtagaaagtttctaaatagcatgcttggatttttatttgaattggatgaagtttttgtgtcctagagaaattcacaaaatgttcctagtttcagataaaaggttatgatttaacatctttgcttttgttctttcttgtctttgaatagaacagtgggggacggtaaggtctgtttgcaaagtacctatgaccatcttacattatttttatgggtggggggcattgactgtggaatgtgggcagtaacttgcacagtcagtaaccgtttgagtaacttcttgttggcatccccattctggcactcctcctctaggtctccacctcacacgctggtttgtgggcggaggggcaggttggtgcgtggggtgtccgggcactggctgtgcatgccttcttcctcttctgtctcttggccaccttttccaaaaagtcaccagtgaccaattctcccagtgtttctttgggactcaatgccttgggcttggcattgggtaaagccaactggccagtttcattctgacgagctctatagtagtccggtgtggacctctgccctccctgctctgcggaagcttcctcagcctttgcttctcactatttactatttgcgggtcctgggggtacccagcgtctcagggttttggctgcccacctgtacgtcggtcctttcaaactgtggtcagagtcaacctcaggtgctgcttttctctagtcactgcattttttttttttagtagagacaaagtcttgctgtgttgtccagcctggattcaaactcctgagctcaaggaatcctcccactcagcctccagagtagctggatcaagtcactcttgttcataacctcagttgcttcatgaatctcgatttctgcttgatttcagtgcttgctgttgtatccttgtgtgctgcagtatttattgttaacatttgtgactcaaatgtatccactccctgctttggttgctctggcctgcaagtaggccgtactaattctgtagttggtcctagcttgcctttgtctttaccttgcatgcgtttatgtcttaatgcacctattaggattccttgcttttatcacaggtttcccatttttctgaaaaaattacagtaattattaacgcagaacccaggtaaattaaaaaggtttgtatgctttatgaatttttagtaagtactcattgattgataacagcaacagaggaaaacaaaacggtcagttccgatcttgatttccaggagcactttgtgtttccacttggcagcgtgatgcttcctcatgtcggtgattttctgttgagacatcttcaagcatcatcttacgtctgcttgttaacatttgttcagatttgatttcagctaatccttaaaagttttttgagacatcaaacttagaataaaaggaatttcctttgccgagattcatcaggtatttacacttagcttacatggccacaccattcctcgtgtgtgtgtgtgtgtgtgtgtgtgtgtgtgggcgcgcgcatgttagggtaatccatttttctgtttgtttctgaattgctttggagaaggcaactcagactccaaggaatacaacagctgccgtgtgaagcttttctcacttttccagtggtcgtagcaggaacagcgtcttgacctcacatcagtgacgtgaaaagagctgagtttgaagtgcatattggtcctccataaagaatgtgtgtatgtgctgtttttttaattaagtctggtaatttatttgatacaatgtattgtagttttagttgaattaaactagttagtaaaactgttggtgaggtagtgtttcagttactctgtagataagctcttttgttaaaacctcttaagttttttgttcctgaatatgttacaaacatctattttctcttactgtagctatcacatgaggaaaaaaacttgaaaaaaagacttcatagtgtgtgtttatgtttgattttagaagacccttttgaggacttctttgggaatcgaaggggtccccgaggaagcagaagccgagggacggggtcgtttttctctgcgttcagtggatttccgtcttttggaagtggattttcttcttttgatacaggatttacttcatttgggtcactaggtcacgggggcctcacttcattctcttccacgtcatttggtggtagtggcatgggcaacttcaaatcgatatcaacttcaactaaaatggttaatggcagaaaaatcactacaaagagaattgtcgagaacggtcaagaaagagtagaagttgaagaagatggccagttaaagtccttaacaataaatggtaaggagcagctgctgcgcttggataacaagtaattcaacgcacgcacttaacagaaatgttaaactataacaagcaccatttgaggattaacaggaacatttttttgaagatttcaaacgaactcgactttcagtataattgtacctaaagtatttataaacagctcatcggagcctctatttgtcatagacttttgagttgattgttgggaccacataataggaccattttttttttgtctttaaaattgttgtaaatctctgtatgcactttgcttttttattaaacgtactccaaggtgagtcttgactctttagtgtaggacaagattgtacactaacaccagcatggacctgcttttcattgtgtctgaaatgtgagccacgtagtgtcggcctgctgtgaagttaacattgccaggacgattcttctacagaaataatttcaatttttttcagtatttagtagtgaaagatattaatacattaatggtaatacatttctggtttaatataaattaaggatgttttctagttgtgcatgaatgctggcaacttagtaagttttgacaattgtttaaatatgtaatgttaagcttaggtttaaaaaagtaaagctggtaaactgggtctttgtcatttgctttaaaaaaaaaaaaaaagaaaataaatgcgaatgtgttggtgcattcttcctgagtgggatctgga

SEQ ID NO: 2894 - protein, 57 aa, Homosapiens
MGNFKSISTSTKMVNGRKITTKRIVENGQERVEVEEDGQLKSLTINGKEQLLRLDNK

SEQ ID NO: 2895 - DNA, 416 bp, Homosapiens
agtgcagtggcacgggtgagactcactgcagcctcgaactcctggtctcaggggatcctcccgcagtgctgggatgacaggcacgagccacttctcccggcctaggcgtggatctgaagctgcaggaagtcagcccgcaggagtaagaacggcactgggctgtgatgaagtcatctcggtacaaaggaattctgtgccacgaaaatattcatggaaatatttcctgatgcgatgtctttcccagcatatcgttgggtaaagcacagactgctgtgtgtccaccaagacaaggtctccaggtggcagggatcatttctttgttttcatatctgcatttctggtttttctaccaatgatcaggtattccctgtatgttgattttacttccaaaatttaggaataaaatatttaaagtt

SEQ ID NO: 2896 - protein, 61 aa, Homosapiens
MTGTSHFSRPRRGSEAAGSQPAGVRTALGCDEVISVQRNSVPRKYSWKYFLMRCLSQHIVG

SEQ ID NO: 2897 - DNA, 2052 bp, Homosapiens; identical to SEQ ID NO: 730

SEQ ID NO: 2898 - protein, 683 aa, Homosapiens; identical to SEQ ID NO: 731

SEQ ID NO: 2899 - DNA, 4053 bp, Homosapiens
atcgaatacagacgaggcatgtaagaaaacgatgttttaagaaatatgttttatgctatatcatttcttttactgaaaacaattggacaaacaaacaagaaaagccaaggaaaatgcgaccgggacgtggaatcggcccgtctgtgagtggaaggatcacactcccagctgagatagaaataaagccacgcgtgcctctgtttctatgcgtggtaaaataaacaagcaacacttcgaggaactattgattctgttattaaaacacagcctgtttggtttgccagatcgtagccattattaatgcattattaattctatgtaagtgcctgcttgtcagatccattaaccgggggagtaattgccgagggagagagctcagaaggtgtgtcacgctgctcgctcggtctaggtggaacgaagcggagggaagccacgcggagcaatggaggcagccctgtaaggcagtgtccgtttctgtctgtggccaaaatggccagggatgtttttggccaagctgatgagacagagattggaagaggaaagtttcatactgatacttcggctggctggctgcagagtaacctgcattttgggccatttttggttaaatgtatgaaagcaaacatccacataaaggctgaaatggtttgtcaatgacccagaggctgttcccgggatcttttgagccctgggaacctggaggtacctgcagagctgagcagattgcttccgcatcaaggaaacaagcgggacttgtgagaaggggcggtttgtgaggcccctggctgcaggcactggaggtcctgccacccagcggcacaaggctgccctgcctgctttaaggaggagacaggactattgacttggtccgatttgcctgaacttcttgagtttctcactgcccgtggattccagttgctttaacacgggaaatcggacctgctggaggagaccctgcgctgtcctcaaagacaacactgtttccactaacgcaaggatacagcgtgattgaaacagtgccccacccatagggtggctggcagattgaacgtggtgctctgtggaaaaatgtggtctggccatacccagtgctatgcacgtgtttaccaccattgcctccccttctcccatctcatgttatcggtctgtaaagtgggtgtcatgagtgacttctggtatctgctgaggggggtggtgtctgggtgaggcccgagtagttggaggctttggtttttgcataatgggacccctattttccacttaacccgaaccaaagcggaatcatggaaggcctcaatgcaggcagccctgagggcgcaagaaagtttgctttgttcaaagggctcctgggagccgggcgatgggtgaccacgccaggaagcaccttgacttgggtactttgcagaatcttcctcccagcgcacctagacttgccgctgtgtggcagctttgactcccagcccagtaacaaacacgtccatgacgctgtggactgacagagaccgcagagctggtcaacgtgaggaatggggcccgcgccccgggggacctccaaggctgggggcacgggagcaagcgggttactcaggcccacactaaccgcacttgtaacttctctccctgagtcaaggcaagttttcattcaagccaacgtaacacaatcttgccaatgactggaaaaataactagctttgcaaaaatttaaaaagactcagataatactcaaatttggagccctaatgaagtgtgtaaacctcatgtccacagactgtgttactggagccagagggggaagatccctgaatcagcccgcctggggccgcccacggctgctccttgcgtgggaggtggccccatgcggccgcttctctgggggacagaacagaaactggggcgagtttggcccagccgcaacatccaagtctgtgttcatttaaaactaactgcctttgattgcatttgacaaaaacattggtccatgattgactggaaataaaataatgagggtttgagacccgggctccgacctcccttctgttctgggcccgtgtgaggccggggacggcccgggcaggtgtcagcagcaggagtgttttccggggtccctgtggagaacgtctctccgcagcttctcctggaacgttgtctccgaggctcagcagcctcctcacaccccctgggtccacacctcagacccatctgcccgcccggccagcctgcctcgtcgttccccgcgggctcgtgcctcaacaggcagcgtgtggatgccaccgtcaccttcacgggagaggcaggtccgccctggagctgatcccctgatgaggaaatgaaaacacagagaggagaaggcactcgcctgaggtaccctgccagacgctggggacgggctcacacgcagcggcccaaagcctgctgcctctcggagcagcgggggtctgggacggatattgaggcacagggccttggacgtgcccgtggagctgctcagccagtggggagttagccagcgttttacaggcaaagctgcggagctgtgctggtgcctgtgtgaagatgctgaacatctccagggacaaattggagcctgaagcctcagagctactgatgatgaaggaaagaggcaaacattcaggagccacagtgcaagctgaggacaagagaaaggcaatcctggcttctggggggcgtaaaagccagaggagccgaggccccggcccacgctcggaaacactctcagcctggagacatcggctgcagctccccgcacgccctgtcccctcccgctctgcattaatcttgcactgacaccctctttatgctgttggaaaaatcgaaatgccaggaggcgggaggcagggagaatccctcatcagcaacgtttatggtattgacttgcatctcattgactgtgtcaacaagcgcttggcgtctacatgtgggaacagcctataaaactaggaaagctaagcggccattgaaaacccatcacttcggatccaccagccacataaccctggacaggaagatgaaaagtaccttcttcccagcgctcagcctccagctctgggcctggtgaagacgggcacaaaacagcagcagtgaaacacaaagtgaatcgaattagtcactactcaggcctggggcctcagctggaaatgaccttcagaattcaacggaggaggcccttcgtgggagacaaagaaggatggggcgtcattgtgggagctttaacgctgcacaaaggacgatcaggaggtggcaatgcatgtgtgacctgcgccgggcagggagggaggctctcaagaggcctctgcgcagggcggtgccctgtgtgcctctggaaatgaggcagaatttgtggtgacatcatgcccagtcttcctgccaacaaaagagtgtatcaggttggaagtgagttttccatttcataggagagtgggggtatggcaggagtccctcggaaatagtggagttttgctcctgcacaaaaataagaccctgttctgaggacgtgagtgagccgagcatgtctgtgcttccgtctggaggagccgggagccctggttggcccaggtgtctcgcagcctcgtggctggctctgtccacagggtccacgagctggaggggcacggataaaaatgcttttcccacgacagagcgcgtgtggtgggctgactccggtttatctgtgagcacagaggtgtggcctgctcaccccacaggaggtgaccccgcagaaggaacacttctgccctgatctgctgtttgcagaggacgagggctgtcatcctgctcctctgaggctgaggcctcagccagcaaggcggcggggtcaagcggggtgtctgagccagccacacagtgctcactggaagctttggtgctttgctgaccctgtgacctgaacagccacccacctctccgagccccagcatcctcgtctgtaaagtggggtgacagtagctgcctgacatgactgacagactcgtttgttaagcactgtcacgtgtgggaggcgacttccttctgggttgggggggcttctcttatccc

SEQ ID NO: 2900 - protein, 83 aa, Homosapiens
MLNISRDKLEPEASELLMMKERGKHSGATVQAEDKRKAILASGGRKSQRSRGPGPRSETLSAWRHRLQLPARPVPSRSALILH

SEQ ID NO: 2901 - DNA, 557 bp, Homosapiens
cggggcatgacgggcacctcggctggcacgtactccaccctccggggctcggggcctgaggagcagaaggtggccctgggcagatgctctgcgtgcgggaggctgcgctttcagtcattatttggatttcgttttccacatgaaaatatttagagatccagctcttggaagccaaggagaaactggcttttaagtaccatggctactgtgacgtatcctgactaatgccgacagcacagggagcctttgcctgccggaggaagcggtgaggaagaggtggtgcgtcgtgcacttcctgttgctgttttaggacagcttggacgtagtttgttccagggaagtgctgctgaaccaggtaaacccagccccccatctccaggagcagaggctgcaaggacaggaagacaatgaggcaatggtgtgctgggggaatcgtgctaaagtgaaagcatccttcgatcatttttaagtcattctaggatcttcagggcatcaaagttttgcctgtgagcctcaattggtctaatacaaaaatacagactgtggttaatcatctg

SEQ ID NO: 2902 - protein, 48 aa, Homosapiens
MTGTSAGTYSTLRGSGPEEQKVALGRCSACGRLRFQSLFGFRFPHENI

SEQ ID NO: 2903 - DNA, 292 bp, Homosapiens
ttctgaggaggaagtcccagagcagactttggctcaactctaagagagcagctggaatggccccacaggctacagcccgtgtcggtgtgggatgcgagggagaggagccaggatggccccacatgctttccttggctgcctgggcgggtgcagcagccacctgagagggccgtctgaggacacgaggcggcatcagcctcatgagatctgggatgtgcacgggacgtccatgaagccgtcggagatgatttggagtagtttacaaaggttaacaaagttcagggagtcaggg

SEQ ID NO: 2904 - protein, 66 aa, Homosapiens
MRGRGARMAPHAFLGCLGGCSSHLRGPSEDTRRHQPHEIWDVHGTSMKPSEMIWSSLQRLTKFRES

SEQ ID NO: 2905 - DNA, 499 bp, Homosapiens
tgagggttgcagcagatgcctgtgtccacatctggacagcattgctggctaacgccaaccccacctggcttgggaacaggcttgaatgtgtggtctgtcctgggcaaagagtaagttcctagaaaatcccagcagtcactgggaagtctgatgacttcctgagccgagctcttggtgtgatgtgatcccatcggtggtgttacttctggtttttgtcttgttcacaataggatttggagtagtttacaaaggttaacaaagttcagggagtcagggaagggaaaattaagaaaaagcccacaggacagagtggagcatgtggcaaggtcagcggccgcgtggacgtctccgattgtgctggctgtgctgctgtggccgcggtggggcagaaggccagacgtcctcacttcccccaaccccagtccagttgtacatgttgtgcactgcacaagggccctggcagaggaccaagttggagttgaaatccagccatggcatg

SEQ ID NO: 2906 - protein, 60 aa, Homosapiens
MWQGQRPRGRLRLCWLCCCGRGGAEGQTSSLPPTPVQLYMLCTAQGPWQRTKLELKSSHG

SEQ ID NO: 2907 - DNA, 1543 bp, Homosapiens
gaaaagagggccgtgtgcagtgtcggaaggaaaagtgggcagtgcgcactgtgggagggaaaagagggccatgtgcactgtcggagggaatgtgagtgaggatgcctgctatggagagcccctggagtttcctgaaaacactaaaaatagagccaccttgggatccagcagtcccactgctgggcatacgccccaaagaaaggaaatccgtatatcgaagatgtatctgcacatccctattcattgcagcactacttacaatggccgagatttggaatcaacctcagtgcccatcaacagacgaacggataagaaaaatgtggtgcgtaggcacagtggatactgttcagccagagaagaaaggaatcctgtcatttcagccgcatggatgagcctggaggaattggggaaatcagccaggtgcaggaagacaaacaccccaggatctcacacatctgtgggagctaaaaaagccgaactcaaggcggtggtgatggactgctggttgccagagtctggggagggggtaagagttagagccagacgggagaataagctctagtgttcctggcactccacgcaactgtggttgacaacaatttattgtatgttttcagagagctggaagagaggctttggaatgttcccagcacaaagaactgacaaaggtttgaggtgacaggcacgtgaaccgccctgatctgactatcccacatcatacacgggcgtcgaaacaccaccctgtattccagaaacaggtgcaattattgtgtgccaattaaaaaaaggagagcgagaagagagagagggcgagctgggccgtggaagtggaatcagactcggagctgatgaggccagcgtttcctcctgtctcctttgatgctgaggcctgacgtcactcccgtgccattcccagccttccttcagagtccctgcgagccctcaggagctgcgtggtggggttgacgatggccacatcccgggcacctctggctgctgcaggcctcccaagaccgcttcacacttctgtgccgaccaggccaccagccagcgttgcctcttgcagaccactcggccgctagtggggtgcgcacagcagcaggctttctgtacccagagaggcggcagcaggagagccacagagagcacgggagcttctccacctcgcctggcccctcacgtgcggagcacgtcccctccagactgaagggcgcacatcttgggctgcaggacagacgcccccagggctgagctgtgtggtgcaggccaaacgctcccggctcccctgagcactggccttggaggtgaccacagagaaatgacctgatggccagaaaacccaccgtgatatttaccaactgcactcaatttaaaaaagcaaatccctaaaccatcacgtgtgcctaataaatggagcgacataaatggctaagaccagtttctaaacaaatgcctttacaaaatgaaacccagccattgtttaggaacaaaggtataatcagatcctcattttctattccaataaagtctttgaattaatgtc

SEQ ID NO: 2908 - protein, 163 aa, Homosapiens
MCTVGGNVSEDACYGEPLEFPENTKNRATLGSSSPTAGHTPQRKEIRISKMYLHIPIHCSTTYNGRDLESTSVPINRRTDKKNVVRRHSGYCSAREERNPVISAAWMSLEELGKSARCRKTNTPGSHTSVGAKKAELKAVVMDCWLPESGEGVRVRARRENKL

SEQ ID NO: 2909 - DNA, 1061 bp, Homosapiens
tgaggaggtgaacgccatcctcaaggcccttccccaggggcagacacctgtgcaccccatgagtagtgcccacttgaggctggcactcccctgacctcacctttgcaaagttacagatgcaccccaacattgagatgtgtttttaatgttaaaatattgatttctacgttatgaaaacagatgcccccgtgaatgcttacctgtgagataaccacaaccaggaagaacaaatctgggcattgagcaagctatgagggtccccgggagcacacgaaccctgccaggcccccgctggctcctccaggcacgtcccggacctgtggggccccagagaggggacatttccctcctgggagagaaggagatcagggcaactcggagagggctgcgagcatttccctcccgggagaggagatcagggcgacctgcacgcactgcgtagagcctggaagggaagtgagaaaccagccgaccggccctgcccctcttcccgggatcacttaatgaaccacgtgttttgacatcatgtaaacctaagcacgtagagatgattcggatttgacaaaataacatttgagtatccgattcgccatcaccccctaccccagaaataggacaattcacttcattgaccaagatgatcacatggaaggcggcacagaggcagctgtgtgggctgcagatttcctgtgtggggttcagcgtagaaaacgcacctccatcccgcccttcccacagcattcctccatcttagatagatggtactctccaaaggccctaccagagggaacacggcctactgagcggacagaatgatgccaaaatattgcttatgtctctacatggtattgtaatgaatatctgctttaatatagctatcatttcttttccaaaattacttctctctatctggaatttaattaatcgaaatgaatttatctgaatataggaagcatatgcctacttgtaatttctaactccttatgtttgaagagaaacctccggtgtgagatatacaaatatatttaattgtgtcatattaaacttctgatttcacattc

SEQ ID NO: 2910 - protein, 63 aa, Homosapiens
MRVPGSTRTLPGPRWLLQARPGPVGPQRGDISLLGEKEIRATRRGLRAFPSRERRSGRPARTA

SEQ ID NO: 2911 - DNA, 1940 bp, Homosapiens
ctagctttgttgtgggtcgggcttccgtgtggacggcagcactttcatttctctccttctgttggcagtgacggtgcaggccggagcggcacctacgtcctgatcgacatggttctcaacaagatggccaaaggtgctaaagagattgatatcgcagcgaccctggagcacttgagggaccagagacccggcatggtccagacgaaggagcagtttgagttcgcgctgacagccgtggctgaggaggtgaacgccatcctcaaggcccttccccagtgagcggcagcctcaggggcctcaggggagcccccaccccacggatgttgtcaggaatcatgatctgactttaattgtgtgtcttctattataactgcatagtaatagggcccttagctctcccgtagtcagcgcagtttagcagttaaaagtgtatttttgtttaatcaaacaataataaagagagatttgtggaaaaatccagttacgggtggaggggaatcggttcatcaattttcacttgcttaaaaaaaatactttttcttaaagcacccgttcaccttcttggttgaagttgtgttaacaatgcagtagccagcacgttcgaggcggtttccaggaagagtgtgcttgtcatctgccactttcgggagggtggatccactgtgcaggagtggccggggaagctggcagcactcagtgaggccgcccggcacacaaggcacgtttggcatttctctttgagagagtttatcattgggagaagccgcagggacagaactgaacgtcctgcagcttcggggcaagtgagacaatcacagctcctcgctgcgtctccatcaacactgcgccgggtaccatggacggccccgtcagccacacctgtcagcccaagcagagtgattcaggggctccccgggggcagacacctgtgcaccccatgagtagtgcccacttgaggctggcactcccctgacctcacctttgcaaagttacagatgcaccccaacattgagatgtgtttttaatgttaaaatattgatttctacgttatgaaaacagatgcccccgtgaatgcttacctgtgagataaccacaaccaggaagaacaaatctgggcattgagcaagctatgagggtccccgggagcacacgaaccctgccaggcccccgctggctcctccaggcacgtcccggacctgtggggccccagagaggggacatttccctcctgggagagaaggagatcagggcaactcggagagggctgcgagcatttccctcccgggagaggagatcagggcgacctgcacgcactgcgtagagcctggaagggaagtgagaaaccagccgaccggccctgcccctcttcccgggatcacttaatgaaccacgtgttttgacatcatgtaaacctaagcacgtagagatgattcggatttgacaaaataacatttgagtatccgattcgccatcaccccctaccccagaaataggacaattcacttcattgaccaagatgatcacatggaaggcggcacagaggcagctgtgtgggctgcagatttcctgtgtggggttcagcgtagaaaacgcacctccatcccgcccttcccacagcattcctccatcttagatagatggtactctccaaaggccctaccagagggaacacggcctactgagcggacagaatgatgccaaaatattgcttatgtctctacatggtattgtaatgaatatctgctttaatatagctatcatttcttttccaaaattacttctctctatctggaatttaattaatcgaaatgaatttatctgaatataggaagcatatgcctacttgtaatttctaactccttatgtttgaagagaaacctccggtgtgagatatacaaatatatttaattgtgtcatattaaacttctgatttcacattc

SEQ ID NO: 2912 - protein, 56 aa, Homosapiens [sequence omitted]

SEQ ID NO: 2913 - DNA, 2024 bp, Homosapiens
acatctgagcacagcagctcatcccacaagctacaagctgctcagaggctcgaagcccccaggggcctcccttctcccctcacttggattctcccagcccgcgtccttcctccccctctcacatccgccatcctttcctctcgccggccccctgacggtgcaggccggagcggcacctacgtcctgatcgacatggttctcaacaagatggccaaaggtgctaaagagattgatatcgcagcgaccctggagcacttgagggaccagagacccggcatggtccagacgaaggagcagtttgagttcgcgctgacagccgtggctgaggaggtgaacgccatcctcaaggcccttccccagtgagcggcagcctcaggggcctcaggggagcccccaccccacggatgttgtcaggaatcatgatctgactttaattgtgtgtcttctattataactgcatagtaatagggcccttagctctcccgtagtcagcgcagtttagcagttaaaagtgtatttttgtttaatcaaacaataataaagagagatttgtggaaaaatccagttacgggtggaggggaatcggttcatcaattttcacttgcttaaaaaaaatactttttcttaaagcacccgttcaccttcttggttgaagttgtgttaacaatgcagtagccagcacgttcgaggcggtttccaggaagagtgtgcttgtcatctgccactttcgggagggtggatccactgtgcaggagtggccggggaagctggcagcactcagtgaggccgcccggcacacaaggcacgtttggcatttctctttgagagagtttatcattgggagaagccgcagggacagaactgaacgtcctgcagcttcggggcaagtgagacaatcacagctcctcgctgcgtctccatcaacactgcgccgggtaccatggacggccccgtcagccacacctgtcagcccaagcagagtgattcaggggctccccgggggcagacacctgtgcaccccatgagtagtgcccacttgaggctggcactcccctgacctcacctttgcaaagttacagatgcaccccaacattgagatgtgtttttaatgttaaaatattgatttctacgttatgaaaacagatgcccccgtgaatgcttacctgtgagataaccacaaccaggaagaacaaatctgggcattgagcaagctatgagggtccccgggagcacacgaaccctgccaggcccccgctggctcctccaggcacgtcccggacctgtggggccccagagaggggacatttccctcctgggagagaaggagatcagggcaactcggagagggctgcgagcatttccctcccgggagaggagatcagggcgacctgcacgcactgcgtagagcctggaagggaagtgagaaaccagccgaccggccctgcccctcttcccgggatcacttaatgaaccacgtgttttgacatcatgtaaacctaagcacgtagagatgattcggatttgacaaaataacatttgagtatccgattcgccatcaccccctaccccagaaataggacaattcacttcattgaccaagatgatcacatggaaggcggcacagaggcagctgtgtgggctgcagatttcctgtgtggggttcagcgtagaaaacgcacctccatcccgcccttcccacagcattcctccatcttagatagatggtactctccaaaggccctaccagagggaacacggcctactgagcggacagaatgatgccaaaatattgcttatgtctctacatggtattgtaatgaatatctgctttaatatagctatcatttcttttccaaaattacttctctctatctggaatttaattaatcgaaatgaatttatctgaatataggaagcatatgcctacttgtaatttctaactccttatgtttgaagagaaacctccggtgtgagatatacaaatatatttaattgtgtcatattaaacttctgatttcacattc

SEQ ID NO: 2914 - protein, 56 aa, Homosapiens [sequence omitted]

SEQ ID NO: 2915 - DNA, 4899 bp, Homosapiens
ccccttttatgcgtccgcagcccttttgggttctgagctgcggcaagctttaagcaagtgttttaattttctttagttcacttagctaagtcttcaacagattaactaacgttcgtaccttggtagaattatagccagattttgcaaagagcttgtgaaatgacagccagatggctgtggaatctgaatattcactgctgagaaccgaagccagctttcctactatgaagatgttctgtgtgagccacaccttgcccagggtggaagtgatgtttgtttcaggtccacagacgagggagaggacggagccagtggaccctcggtggcagtgtctggtgcagatgtgggcagggatggagtgtttggaaggtgccagaaggttccggcaatggacttttaccgctacgaggtgtcgcccgtggccctgcagcgcctgcgcgtggcgttgcagaagctttccggcacaggtttcacgtggcaggatgactatactcagtatgtgatggaccaggaacttgcagacctcccgaaaacctacctgaggcgtcctgaagcatccagcccagccaggccctcaaaacacagcgttggcagcgagaggaggtacagtcgggagggcggtgctgccctggccaacgccctccgacgccacctgcccttcctggaggccctgtcccaggccccagcctcagacgtgctcgccaggacccatacggcgcaggacagaccccccgctgagggtgatgaccgcttctccgagagcatcctgacctatgtggcccacacgtctgcgctgacctaccctcccgggtcccggacccagctccgcgaggacctcctgccgcggaccctcggccagctccagccagatgagctcagccctaaggtggacagtggtgtggacagacaccatctgatggcggccctcagtgcctatgctgcccagaggcccccagctccccccggggagggcagcctggagccacagtaccttctgcgtgcaccctcaagaatgcccaggcctttgctggcaccagccgccccccagaagtggccttcacctctgggagattccgaagacccctccagcacaggcgatggagcacggattcataccctcctgaaggacctgcagaggcagccggctgaggtgaggggcctgagtggcctggagctggacggcatggctgagctgatggctggcctgatgcaaggcgtggaccatggagtagctcgaggcagccctgggagagcggccctgggagagtctggagaacaggcggatggccccaaggccaccctccgtggagacagctttccagatgacggagtgcaggacgacgatgatagactttaccaagaggtccatcgtctgagtgccacactcgggggcctcctgcaggaccacgggtctcgactcttacctggagccctcccctttgcaaggcccctcgacatggagaggaagaagtccgagcaccctgagtcttccctgtcttcagaagaggagactgccggagtggagaacgtcaagagccagacgtattccaaagatctgctggggcagcagccgcattcggagcccggggccgctgcgtttggggagctccaaaaccagatgcctgggccctcgaaggaggagcagagccttccagcgggtgctcaggaggccctcagcgacggcctgcaattggaggtccagccttccgaggaagaggcgcggggctacatcgtgacagacagagaccccctgcgccccgaggaaggaaggcggctggtggaggacgtcgcccgcctcctgcaggtgcccagcagtgcgttcgctgacgtggaggttctcggaccagcagtgaccttcaaagtgagcgccaatgtccaaaacgtgaccactgaggatgtggagaaggccacagttgacaacaaagacaaactggaggaaacctctggactgaaaattcttcaaaccggagtcgggtcgaaaagcaaactcaagttcctgcctcctcaggcggagcaagaagactccaccaagttcatcgcgctcaccctggtctccctcgcctgcatcctgggcgtcctcctggcctctggcctcatctactgcctccgccatagctctcagcacaggctgaaggagaagctctcgggactagggggcgacccaggtgcagatgccactgccgcctaccaggagctgtgccgccagcgtatggccacgcggccaccagaccgacctgagggcccgcacacgtcacgcatcagcagcgtctcatcccagttcagcgacgggccgatccccagcccctccgcacgcagcagcgcctcatcctggtccgaggagcctgtgcagtccaacatggacatctccaccggccacatgatcctgtcctacatggaggaccacctgaagaacaagaaccggctggagaaggagtgggaagcgctgtgcgcctaccaggcggagcccaacagctcgttcgtggcccagagggaggagaacgtgcccaagaaccgctccctggccgtgctgacctatgaccactcccgggtcctgctgaaggcggagaacagccacagccactcagactacatcaacgctagccccatcatggatcacgacccgaggaaccccgcgtacatcgccacccagggaccgctgcccgccaccgtggctgacttttggcagatggtgtgggagagcggctgcgtggtgatcgtcatgctgacacccctcgcggagaacggcgtccggcagtgctaccactactggccggatgaaggctccaatctctaccacatctatgaggtgaacctggtctccgagcacatctggtgtgaggacttcctggtgaggagcttctatctgaagaacctgcagaccaacgagacgcgcaccgtgacgcagttccacttcctgagttggtatgaccgaggagtcccttcctcctcaaggtccctcctggacttccgcagaaaagtaaacaagtgctacaggggccgttcttgtccaataattgttcattgcagtgacggtgcaggccggagcggcacctacgtcctgatcgacatggttctcaacaagatggccaaaggtgctaaagagattgatatcgcagcgaccctggagcacttgagggaccagagacccggcatggtccagacgaaggagcagtttgagttcgcgctgacagccgtggctgaggaggtgaacgccatcctcaaggcccttccccagtgagcggcagcctcaggggcctcaggggagcccccaccccacggatgttgtcaggaatcatgatctgactttaattgtgtgtcttctattataactgcatagtaatagggcccttagctctcccgtagtcagcgcagtttagcagttaaaagtgtatttttgtttaatcaaacaataataaagagagatttgtggaaaaatccagttacgggtggaggggaatcggttcatcaattttcacttgcttaaaaaaaatactttttcttaaagcacccgttcaccttcttggttgaagttgtgttaacaatgcagtagccagcacgttcgaggcggtttccaggaagagtgtgcttgtcatctgccactttcgggagggtggatccactgtgcaggagtggccggggaagctggcagcactcagtgaggccgcccggcacacaaggcacgtttggcatttctctttgagagagtttatcattgggagaagccgcagggacagaactgaacgtcctgcagcttcggggcaagtgagacaatcacagctcctcgctgcgtctccatcaacactgcgccgggtaccatggacggccccgtcagccacacctgtcagcccaagcagagtgattcaggggctccccgggggcagacacctgtgcaccccatgagtagtgcccacttgaggctggcactcccctgacctcacctttgcaaagttacagatgcaccccaacattgagatgtgtttttaatgttaaaatattgatttctacgttatgaaaacagatgcccccgtgaatgcttacctgtgagataaccacaaccaggaagaacaaatctgggcattgagcaagctatgagggtccccgggagcacacgaaccctgccaggcccccgctggctcctccaggcacgtcccggacctgtggggccccagagaggggacatttccctcctgggagagaaggagatcagggcaactcggagagggctgcgagcatttccctcccgggagaggagatcagggcgacctgcacgcactgcgtagagcctggaagggaagtgagaaaccagccgaccggccctgcccctcttcccgggatcacttaatgaaccacgtgttttgacatcatgtaaacctaagcacgtagagatgattcggatttgacaaaataacatttgagtatccgattcgccatcaccccctaccccagaaataggacaattcacttcattgaccaagatgatcacatggaaggcggcacagaggcagctgtgtgggctgcagatttcctgtgtggggttcagcgtagaaaacgcacctccatcccgcccttcccacagcattcctccatcttagatagatggtactctccaaaggccctaccagagggaacacggcctactgagcggacagaatgatgccaaaatattgcttatgtctctacatggtattgtaatgaatatctgctttaatatagctatcatttcttttccaaaattacttctctctatctggaatttaattaatcgaaatgaatttatctgaatataggaagcatatgcctacttgtaatttctaactccttatgtttgaagagaaacctccggtgtgagatatacaaatatatttaattgtgtcatattaaacttctgatttcacattc

SEQ ID NO: 2916 - protein, 949 aa, Homosapiens
MDFYRYEVSPVALQRLRVALQKLSGTGFTWQDDYTQYVMDQELADLPKTYLRRPEASSPARPSKHSVGSERRYSREGGAALANALRRHLPFLEALSQAPASDVLARTHTAQDRPPAEGDDRFSESILTYVAHTSALTYPPGSRTQLREDLLPRTLGQLQPDELSPKVDSGVDRHHLMAALSAYAAQRPPAPPGEGSLEPQYLLRAPSRMPRPLLAPAAPQKWPSPLGDSEDPSSTGDGARIHTLLKDLQRQPAEVRGLSGLELDGMAELMAGLMQGVDHGVARGSPGRAALGESGEQADGPKATLRGDSFPDDGVQDDDDRLYQEVHRLSATLGGLLQDHGSRLLPGALPFARPLDMERKKSEHPESSLSSEEETAGVENVKSQTYSKDLLGQQPHSEPGAAAFGELQNQMPGPSKEEQSLPAGAQEALSDGLQLEVQPSEEEARGYIVTDRDPLRPEEGRRLVEDVARLLQVPSSAFADVEVLGPAVTFKVSANVQNVTTEDVEKATVDNKDKLEETSGLKILQTGVGSKSKLKFLPPQAEQEDSTKFIALTLVSLACILGVLLASGLIYCLRHSSQHRLKEKLSGLGGDPGADATAAYQELCRQRMATRPPDRPEGPHTSRISSVSSQFSDGPIPSPSARSSASSWSEEPVQSNMDISTGHMILSYMEDHLKNKNRLEKEWEALCAYQAEPNSSFVAQREENVPKNRSLAVLTYDHSRVLLKAENSHSHSDYINASPIMDHDPRNPAYIATQGPLPATVADFWQMVWESGCVVIVMLTPLAENGVRQCYHYWPDEGSNLYHIYEVNLVSEHIWCEDFLVRSFYLKNLQTNETRTVTQFHFLSWYDRGVPSSSRSLLDFRRKVNKCYRGRSCPIIVHCSDGAGRSGTYVLIDMVLNKMAKGAKEIDIAATLEHLRDQRPGMVQTKEQFEFALTAVAEEVNAILKALPQ

SEQ ID NO: 2917 - DNA, 4607 bp, Homosapiens
gcctcccgccgcctcccgcgcggccatggactgagcgccgccggccaggccgcggggatggggccgccgctcccgctgctgctgctgctactgctgctgctgccgccacgcgtcctgcctgccgccccttcgtccgtcccccgcggccggcagctcccggggcgtctgggcacaggtttcacgtggcaggatgactatactcagtatgtgatggaccaggaacttgcagacctcccgaaaacctacctgaggcgtcctgaagcatccagcccagccaggccctcaaaacacagcgttggcagcgagaggaggtacagtcgggagggcggtgctgccctggccaacgccctccgacgccacctgcccttcctggaggccctgtcccaggccccagcctcagacgtgctcgccaggacccatacggcgcaggacagaccccccgctgagggtgatgaccgcttctccgagagcatcctgacctatgtggcccacacgtctgcgctgacctaccctcccgggtcccggacccagctccgcgaggacctcctgccgcggaccctcggccagctccagccagatgagctcagccctaaggtggacagtggtgtggacagacaccatctgatggcggccctcagtgcctatgctgcccagaggcccccagctccccccggggagggcagcctggagccacagtaccttctgcgtgcaccctcaagaatgcccaggcctttgctggcaccagccgccccccagaagtggccttcacctctgggagattccgaagacccctccagcacaggcgatggagcacggattcataccctcctgaaggacctgcagaggcagccggctgaggtgaggggcctgagtggcctggagctggacggcatggctgagctgatggctggcctgatgcaaggcgtggaccatggagtagctcgaggcagccctgggagagcggccctgggagagtctggagaacaggcggatggccccaaggccaccctccgtggagacagctttccagatgacggagtgcaggacgacgatgatagactttaccaagaggtccatcgtctgagtgccacactcgggggcctcctgcaggaccacgggtctcgactcttacctggagccctcccctttgcaaggcccctcgacatggagaggaagaagtccgagcaccctgagtcttccctgtcttcagaagaggagactgccggagtggagaacgtcaagagccagacgtattccaaagatctgctggggcagcagccgcattcggagcccggggccgctgcgtttggggagctccaaaaccagatgcctgggccctcgaaggaggagcagagccttccagcgggtgctcaggaggccctcagcgacggcctgcaattggaggtccagccttccgaggaagaggcgcggggctacatcgtgacagacagagaccccctgcgccccgaggaaggaaggcggctggtggaggacgtcgcccgcctcctgcaggtgcccagcagtgcgttcgctgacgtggaggttctcggaccagcagtgaccttcaaagtgagcgccaatgtccaaaacgtgaccactgaggatgtggagaaggccacagttgacaacaaagacaaactggaggaaacctctggactgaaaattcttcaaaccggagtcgggtcgaaaagcaaactcaagttcctgcctcctcaggcggagcaagaagactccaccaagttcatcgcgctcaccctggtctccctcgcctgcatcctgggcgtcctcctggcctctggcctcatctactgcctccgccatagctctcagcacaggctgaaggagaagctctcgggactagggggcgacccaggtgcagatgccactgccgcctaccaggagctgtgccgccagcgtatggccacgcggccaccagaccgacctgagggcccgcacacgtcacgcatcagcagcgtctcatcccagttcagcgacgggccgatccccagcccctccgcacgcagcagcgcctcatcctggtccgaggagcctgtgcagtccaacatggacatctccaccggccacatgatcctgtcctacatggaggaccacctgaagaacaagaaccggctggagaaggagtgggaagcgctgtgcgcctaccaggcggagcccaacagctcgttcgtggcccagagggaggagaacgtgcccaagaaccgctccctggccgtgctgacctatgaccactcccgggtcctgctgaaggcggagaacagccacagccactcagactacatcaacgctagccccatcatggatcacgacccgaggaaccccgcgtacatcgccacccagggaccgctgcccgccaccgtggctgacttttggcagatggtgtgggagagcggctgcgtggtgatcgtcatgctgacacccctcgcggagaacggcgtccggcagtgctaccactactggccggatgaaggctccaatctctaccacatctatgaggtgaacctggtctccgagcacatctggtgtgaggacttcctggtgaggagcttctatctgaagaacctgcagaccaacgagacgcgcaccgtgacgcagttccacttcctgagttggtatgaccgaggagtcccttcctcctcaaggtccctcctggacttccgcagaaaagtaaacaagtgctacaggggccgttcttgtccaataattgttcattgcagtgacggtgcaggccggagcggcacctacgtcctgatcgacatggttctcaacaagatggccaaaggtgctaaagagattgatatcgcagcgaccctggagcacttgagggaccagagacccggcatggtccagacgaaggagcagtttgagttcgcgctgacagccgtggctgaggaggtgaacgccatcctcaaggcccttccccagtgagcggcagcctcaggggcctcaggggagcccccaccccacggatgttgtcaggaatcatgatctgactttaattgtgtgtcttctattataactgcatagtaatagggcccttagctctcccgtagtcagcgcagtttagcagttaaaagtgtatttttgtttaatcaaacaataataaagagagatttgtggaaaaatccagttacgggtggaggggaatcggttcatcaattttcacttgcttaaaaaaaatactttttcttaaagcacccgttcaccttcttggttgaagttgtgttaacaatgcagtagccagcacgttcgaggcggtttccaggaagagtgtgcttgtcatctgccactttcgggagggtggatccactgtgcaggagtggccggggaagctggcagcactcagtgaggccgcccggcacacaaggcacgtttggcatttctctttgagagagtttatcattgggagaagccgcagggacagaactgaacgtcctgcagcttcggggcaagtgagacaatcacagctcctcgctgcgtctccatcaacactgcgccgggtaccatggacggccccgtcagccacacctgtcagcccaagcagagtgattcaggggctccccgggggcagacacctgtgcaccccatgagtagtgcccacttgaggctggcactcccctgacctcacctttgcaaagttacagatgcaccccaacattgagatgtgtttttaatgttaaaatattgatttctacgttatgaaaacagatgcccccgtgaatgcttacctgtgagataaccacaaccaggaagaacaaatctgggcattgagcaagctatgagggtccccgggagcacacgaaccctgccaggcccccgctggctcctccaggcacgtcccggacctgtggggccccagagaggggacatttccctcctgggagagaaggagatcagggcaactcggagagggctgcgagcatttccctcccgggagaggagatcagggcgacctgcacgcactgcgtagagcctggaagggaagtgagaaaccagccgaccggccctgcccctcttcccgggatcacttaatgaaccacgtgttttgacatcatgtaaacctaagcacgtagagatgattcggatttgacaaaataacatttgagtatccgattcgccatcaccccctaccccagaaataggacaattcacttcattgaccaagatgatcacatggaaggcggcacagaggcagctgtgtgggctgcagatttcctgtgtggggttcagcgtagaaaacgcacctccatcccgcccttcccacagcattcctccatcttagatagatggtactctccaaaggccctaccagagggaacacggcctactgagcggacagaatgatgccaaaatattgcttatgtctctacatggtattgtaatgaatatctgctttaatatagctatcatttcttttccaaaattacttctctctatctggaatttaattaatcgaaatgaatttatctgaatataggaagcatatgcctacttgtaatttctaactccttatgtttgaagagaaacctccggtgtgagatatacaaatatatttaattgtgtcatattaaacttctgatttcacattc

SEQ ID NO: 2918 - protein, 962 aa, Homosapiens
MGPPLPLLLLLLLLLPPRVLPAAPSSVPRGRQLPGRLGTGFTWQDDYTQYVMDQELADLPKTYLRRPEASSPARPSKHSVGSERRYSREGGAALANALRRHLPFLEALSQAPASDVLARTHTAQDRPPAEGDDRFSESILTYVAHTSALTYPPGSRTQLREDLLPRTLGQLQPDELSPKVDSGVDRHHLMAALSAYAAQRPPAPPGEGSLEPQYLLRAPSRMPRPLLAPAAPQKWPSPLGDSEDPSSTGDGARIHTLLKDLQRQPAEVRGLSGLELDGMAELMAGLMQGVDHGVARGSPGRAALGESGEQADGPKATLRGDSFPDDGVQDDDDRLYQEVHRLSATLGGLLQDHGSRLLPGALPFARPLDMERKKSEHPESSLSSEEETAGVENVKSQTYSKDLLGQQPHSEPGAAAFGELQNQMPGPSKEEQSLPAGAQEALSDGLQLEVQPSEEEARGYIVTDRDPLRPEEGRRLVEDVARLLQVPSSAFADVEVLGPAVTFKVSANVQNVTTEDVEKATVDNKDKLEETSGLKILQTGVGSKSKLKFLPPQAEQEDSTKFIALTLVSLACILGVLLASGLIYCLRHSSQHRLKEKLSGLGGDPGADATAAYQELCRQRMATRPPDRPEGPHTSRISSVSSQFSDGPIPSPSARSSASSWSEEPVQSNMDISTGHMILSYMEDHLKNKNRLEKEWEALCAYQAEPNSSFVAQREENVPKNRSLAVLTYDHSRVLLKAENSHSHSDYINASPIMDHDPRNPAYIATQGPLPATVADFWQMVWESGCVVIVMLTPLAENGVRQCYHYWPDEGSNLYHIYEVNLVSEHIWCEDFLVRSFYLKNLQTNETRTVTQFHFLSWYDRGVPSSSRSLLDFRRKVNKCYRGRSCPIIVHCSDGAGRSGTYVLIDMVLNKMAKGAKEIDIAATLEHLRDQRPGMVQTKEQFEFALTAVAEEVNAILKALPQ

SEQ ID NO: 2919 - DNA, 4456 bp, Homosapiens
gcctcccgccgcctcccgcgcggccatggactgagcgccgccggccaggccgcggggatggggccgccgctcccgctgctgctgctgctactgctgctgctgccgccacgcgtcctgcctgccgccccttcgtccgtcccccgcggccggcagctcccggggcgtctgggcacaggtttcacgtggcaggatgactatactcagtatgtgatggaccaggaacttgcagacctcccgaaaacctacctgaggcgtcctgaagcatccagcccagccaggccctcaaaacacagcgttggcagcgagaggaggtacagtcgggagggcggtgctgccctggccaacgccctccgacgccacctgcccttcctggaggccctgtcccaggccccagcctcagacgtgctcgccaggacccatacggcgcaggacagaccccccgctgagggtgatgaccgcttctccgagagcatcctgacctatgtggcccacacgtctgcgctgacctaccctcccgggtcccggacccagctccgcgaggacctcctgccgcggaccctcggccagctccagccagatgagctcagccctaaggtggacagtggtgtggacagacaccatctgatggcggccctcagtgcctatgctgcccagaggcccccagctccccccggggagggcagcctggagccacagtaccttctgcgtgcaccctcaagaatgcccaggcctttgctggcaccagccgccccccagaagtggccttcacctctgggagattccgaagacccctccagcacaggcgatggagcacggattcataccctcctgaaggacctgcagaggcagccggctgaggtgaggggcctgagtggcctggagctggacggcatggctgagctgatggctggcctgatgcaaggcgtggaccatggagtagctcgaggcagccctgggagagcggccctgggagagtctggagaacaggcggatggccccaaggccaccctccgtggagacagctttccagatgacggagtgcaggacgacgatgatagactttaccaagaggtccatcgtctgagtgccacactcgggggcctcctgcaggaccacgggtctcgactcttacctggagccctcccctttgcaaggcccctcgacatggagaggaagaagtccgagcaccctgagtcttccctgtcttcagaagaggagactgccggagtggagaacgtcaagagccagacgtattccaaagatctgctggggcagcagccgcattcggagcccggggccgctgcgtttggggagctccaaaaccagatgcctgggccctcgaaggaggagcagagccttccagcgggtgctcaggaggccctcagcgacggcctgcaattggaggtccagccttccgaggaagaggcgcggggctacatcgtgacagacagagaggttctcggaccagcagtgaccttcaaagtgagcgccaatgtccaaaacgtgaccactgaggatgtggagaaggccacaggaaaagcaaactcaagttcctgcctcctcaggcggagcaagaagactccaccaagttcatcgcgctcaccctggtctccctcgcctgcatcctgggcgtcctcctggcctctggcctcatctactgcctccgccatagctctcagcacaggctgaaggagaagctctcgggactagggggcgacccaggtgcagatgccactgccgcctaccaggagctgtgccgccagcgtatggccacgcggccaccagaccgacctgagggcccgcacacgtcacgcatcagcagcgtctcatcccagttcagcgacgggccgatccccagcccctccgcacgcagcagcgcctcatcctggtccgaggagcctgtgcagtccaacatggacatctccaccggccacatgatcctgtcctacatggaggaccacctgaagaacaagaaccggctggagaaggagtgggaagcgctgtgcgcctaccaggcggagcccaacagctcgttcgtggcccagagggaggagaacgtgcccaagaaccgctccctggccgtgctgacctatgaccactcccgggtcctgctgaaggcggagaacagccacagccactcagactacatcaacgctagccccatcatggatcacgacccgaggaaccccgcgtacatcgccacccagggaccgctgcccgccaccgtggctgacttttggcagatggtgtgggagagcggctgcgtggtgatcgtcatgctgacacccctcgcggagaacggcgtccggcagtgctaccactactggccggatgaaggctccaatctctaccacatctatgaggtgaacctggtctccgagcacatctggtgtgaggacttcctggtgaggagcttctatctgaagaacctgcagaccaacgagacgcgcaccgtgacgcagttccacttcctgagttggtatgaccgaggagtcccttcctcctcaaggtccctcctggacttccgcagaaaagtaaacaagtgctacaggggccgttcttgtccaataattgttcattgcagtgacggtgcaggccggagcggcacctacgtcctgatcgacatggttctcaacaagatggccaaaggtgctaaagagattgatatcgcagcgaccctggagcacttgagggaccagagacccggcatggtccagacgaaggagcagtttgagttcgcgctgacagccgtggctgaggaggtgaacgccatcctcaaggcccttccccagtgagcggcagcctcaggggcctcaggggagcccccaccccacggatgttgtcaggaatcatgatctgactttaattgtgtgtcttctattataactgcatagtaatagggcccttagctctcccgtagtcagcgcagtttagcagttaaaagtgtatttttgtttaatcaaacaataataaagagagatttgtggaaaaatccagttacgggtggaggggaatcggttcatcaattttcacttgcttaaaaaaaatactttttcttaaagcacccgttcaccttcttggttgaagttgtgttaacaatgcagtagccagcacgttcgaggcggtttccaggaagagtgtgcttgtcatctgccactttcgggagggtggatccactgtgcaggagtggccggggaagctggcagcactcagtgaggccgcccggcacacaaggcacgtttggcatttctctttgagagagtttatcattgggagaagccgcagggacagaactgaacgtcctgcagcttcggggcaagtgagacaatcacagctcctcgctgcgtctccatcaacactgcgccgggtaccatggacggccccgtcagccacacctgtcagcccaagcagagtgattcaggggctccccgggggcagacacctgtgcaccccatgagtagtgcccacttgaggctggcactcccctgacctcacctttgcaaagttacagatgcaccccaacattgagatgtgtttttaatgttaaaatattgatttctacgttatgaaaacagatgcccccgtgaatgcttacctgtgagataaccacaaccaggaagaacaaatctgggcattgagcaagctatgagggtccccgggagcacacgaaccctgccaggcccccgctggctcctccaggcacgtcccggacctgtggggccccagagaggggacatttccctcctgggagagaaggagatcagggcaactcggagagggctgcgagcatttccctcccgggagaggagatcagggcgacctgcacgcactgcgtagagcctggaagggaagtgagaaaccagccgaccggccctgcccctcttcccgggatcacttaatgaaccacgtgttttgacatcatgtaaacctaagcacgtagagatgattcggatttgacaaaataacatttgagtatccgattcgccatcaccccctaccccagaaataggacaattcacttcattgaccaagatgatcacatggaaggcggcacagaggcagctgtgtgggctgcagatttcctgtgtggggttcagcgtagaaaacgcacctccatcccgcccttcccacagcattcctccatcttagatagatggtactctccaaaggccctaccagagggaacacggcctactgagcggacagaatgatgccaaaatattgcttatgtctctacatggtattgtaatgaatatctgctttaatatagctatcatttcttttccaaaattacttctctctatctggaatttaattaatcgaaatgaatttatctgaatataggaagcatatgcctacttgtaatttctaactccttatgtttgaagagaaacctccggtgtgagatatacaaatatatttaattgtgtcatattaaacttctgatttcacattc

SEQ ID NO: 2920 - protein, 543 aa, Homosapiens
MGPPLPLLLLLLLLLPPRVLPAAPSSVPRGRQLPGRLGTGFTWQDDYTQYVMDQELADLPKTYLRRPEASSPARPSKHSVGSERRYSREGGAALANALRRHLPFLEALSQAPASDVLARTHTAQDRPPAEGDDRFSESILTYVAHTSALTYPPGSRTQLREDLLPRTLGQLQPDELSPKVDSGVDRHHLMAALSAYAAQRPPAPPGEGSLEPQYLLRAPSRMPRPLLAPAAPQKWPSPLGDSEDPSSTGDGARIHTLLKDLQRQPAEVRGLSGLELDGMAELMAGLMQGVDHGVARGSPGRAALGESGEQADGPKATLRGDSFPDDGVQDDDDRLYQEVHRLSATLGGLLQDHGSRLLPGALPFARPLDMERKKSEHPESSLSSEEETAGVENVKSQTYSKDLLGQQPHSEPGAAAFGELQNQMPGPSKEEQSLPAGAQEALSDGLQLEVQPSEEEARGYIVTDREVLGPAVTFKVSANVQNVTTEDVEKATGKANSSSCLLRRSKKTPPSSSRSPWSPSPASWASSWPLASSTASAIALSTG

SEQ ID NO: 2921 - DNA, 4613 bp, Homosapiens
ggcgggaggagccggcggcgcgcgcctccctgggcccggactcggccgcctcccgccgcctcccgcgcggccatggactgagcgccgccggccaggccgcggggatggggccgccgctcccgctgctgctgctgctactgctgctgctgccgccacgcgtcctgcctgccgccccttcgtccgtcccccgcggccggcagctcccggggcgtctggggatggagtgtttggaaggtgccagaaggttccggcaatggacttttaccgctacgaggtgtcgcccgtggccctgcagcgcctgcgcgtggcgttgcagaagctttccggcacaggtttcacgtggcaggatgactatactcagtatgtgatggaccaggaacttgcagacctcccgaaaacctacctgaggcgtcctgaagcatccagcccagccaggccctcaaaacacagcgttggcagcgagaggaggtacagtcgggagggcggtgctgccctggccaacgccctccgacgccacctgcccttcctggaggccctgtcccaggccccagcctcagacgtgctcgccaggacccatacggcgcaggacagaccccccgctgagggtgatgaccgcttctccgagagcatcctgacctatgtggcccacacgtctgcgctgacctaccctcccgggtcccggacccagctccgcgaggacctcctgccgcggaccctcggccagctccagccagatgagctcagccctaaggtggacagtggtgtggacagacaccatctgatggcggccctcagtgcctatgctgcccagaggcccccagctccccccggggagggcagcctggagccacagtaccttctgcgtgcaccctcaagaatgcccaggcctttgctggcaccagccgccccccagaagtggccttcacctctgggagattccgaagacccctccagcacaggcgatggagcacggattcataccctcctgaaggacctgcagaggcagccggctgaggtgaggggcctgagtggcctggagctggacggcatggctgagctgatggctggcctgatgcaaggcgtggaccatggagtagctcgaggcagccctgggagagcggccctgggagagtctggagaacaggcggatggccccaaggccaccctccgtggagacagctttccagatgacggagtgcaggacgacgatgatagactttaccaagaggtccatcgtctgagtgccacactcgggggcctcctgcaggaccacgggtctcgactcttacctggagccctcccctttgcaaggcccctcgacatggagaggaagaagtccgagcaccctgagtcttccctgtcttcagaagaggagactgccggagtggagaacgtcaagagccagacgtattccaaagatctgctggggcagcagccgcattcggagcccggggccgctgcgtttggggagctccaaaaccagatgcctgggccctcgaaggaggagcagagccttccagcgggtgctcaggaggccctcagcgacggcctgcaattggaggtccagccttccgaggaagaggcgcggggctacatcgtgacagacagagaggttctcggaccagcagtgaccttcaaagtgagcgccaatgtccaaaacgtgaccactgaggatgtggagaaggccacaggaaaagcaaactcaagttcctgcctcctcaggcggagcaagaagactccaccaagttcatcgcgctcaccctggtctccctcgcctgcatcctgggcgtcctcctggcctctggcctcatctactgcctccgccatagctctcagcacaggctgaaggagaagctctcgggactagggggcgacccaggtgcagatgccactgccgcctaccaggagctgtgccgccagcgtatggccacgcggccaccagaccgacctgagggcccgcacacgtcacgcatcagcagcgtctcatcccagttcagcgacgggccgatccccagcccctccgcacgcagcagcgcctcatcctggtccgaggagcctgtgcagtccaacatggacatctccaccggccacatgatcctgtcctacatggaggaccacctgaagaacaagaaccggctggagaaggagtgggaagcgctgtgcgcctaccaggcggagcccaacagctcgttcgtggcccagagggaggagaacgtgcccaagaaccgctccctggccgtgctgacctatgaccactcccgggtcctgctgaaggcggagaacagccacagccactcagactacatcaacgctagccccatcatggatcacgacccgaggaaccccgcgtacatcgccacccagggaccgctgcccgccaccgtggctgacttttggcagatggtgtgggagagcggctgcgtggtgatcgtcatgctgacacccctcgcggagaacggcgtccggcagtgctaccactactggccggatgaaggctccaatctctaccacatctatgaggtgaacctggtctccgagcacatctggtgtgaggacttcctggtgaggagcttctatctgaagaacctgcagaccaacgagacgcgcaccgtgacgcagttccacttcctgagttggtatgaccgaggagtcccttcctcctcaaggtccctcctggacttccgcagaaaagtaaacaagtgctacaggggccgttcttgtccaataattgttcattgcagtgacggtgcaggccggagcggcacctacgtcctgatcgacatggttctcaacaagatggccaaaggtgctaaagagattgatatcgcagcgaccctggagcacttgagggaccagagacccggcatggtccagacgaaggagcagtttgagttcgcgctgacagccgtggctgaggaggtgaacgccatcctcaaggcccttccccagtgagcggcagcctcaggggcctcaggggagcccccaccccacggatgttgtcaggaatcatgatctgactttaattgtgtgtcttctattataactgcatagtaatagggcccttagctctcccgtagtcagcgcagtttagcagttaaaagtgtatttttgtttaatcaaacaataataaagagagatttgtggaaaaatccagttacgggtggaggggaatcggttcatcaattttcacttgcttaaaaaaaatactttttcttaaagcacccgttcaccttcttggttgaagttgtgttaacaatgcagtagccagcacgttcgaggcggtttccaggaagagtgtgcttgtcatctgccactttcgggagggtggatccactgtgcaggagtggccggggaagctggcagcactcagtgaggccgcccggcacacaaggcacgtttggcatttctctttgagagagtttatcattgggagaagccgcagggacagaactgaacgtcctgcagcttcggggcaagtgagacaatcacagctcctcgctgcgtctccatcaacactgcgccgggtaccatggacggccccgtcagccacacctgtcagcccaagcagagtgattcaggggctccccgggggcagacacctgtgcaccccatgagtagtgcccacttgaggctggcactcccctgacctcacctttgcaaagttacagatgcaccccaacattgagatgtgtttttaatgttaaaatattgatttctacgttatgaaaacagatgcccccgtgaatgcttacctgtgagataaccacaaccaggaagaacaaatctgggcattgagcaagctatgagggtccccgggagcacacgaaccctgccaggcccccgctggctcctccaggcacgtcccggacctgtggggccccagagaggggacatttccctcctgggagagaaggagatcagggcaactcggagagggctgcgagcatttccctcccgggagaggagatcagggcgacctgcacgcactgcgtagagcctggaagggaagtgagaaaccagccgaccggccctgcccctcttcccgggatcacttaatgaaccacgtgttttgacatcatgtaaacctaagcacgtagagatgattcggatttgacaaaataacatttgagtatccgattcgccatcaccccctaccccagaaataggacaattcacttcattgaccaagatgatcacatggaaggcggcacagaggcagctgtgtgggctgcagatttcctgtgtggggttcagcgtagaaaacgcacctccatcccgcccttcccacagcattcctccatcttagatagatggtactctccaaaggccctaccagagggaacacggcctactgagcggacagaatgatgccaaaatattgcttatgtctctacatggtattgtaatgaatatctgctttaatatagctatcatttcttttccaaaattacttctctctatctggaatttaattaatcgaaatgaatttatctgaatataggaagcatatgcctacttgtaatttctaactccttatgtttgaagagaaacctccggtgtgagatatacaaatatatttaattgtgtcatattaaacttctgatttcacattc

SEQ ID NO: 2922 - protein, 530 aa, Homosapiens
MDFYRYEVSPVALQRLRVALQKLSGTGFTWQDDYTQYVMDQELADLPKTYLRRPEASSPARPSKHSVGSERRYSREGGAALANALRRHLPFLEALSQAPASDVLARTHTAQDRPPAEGDDRFSESILTYVAHTSALTYPPGSRTQLREDLLPRTLGQLQPDELSPKVDSGVDRHHLMAALSAYAAQRPPAPPGEGSLEPQYLLRAPSRMPRPLLAPAAPQKWPSPLGDSEDPSSTGDGARIHTLLKDLQRQPAEVRGLSGLELDGMAELMAGLMQGVDHGVARGSPGRAALGESGEQADGPKATLRGDSFPDDGVQDDDDRLYQEVHRLSATLGGLLQDHGSRLLPGALPFARPLDMERKKSEHPESSLSSEEETAGVENVKSQTYSKDLLGQQPHSEPGAAAFGELQNQMPGPSKEEQSLPAGAQEALSDGLQLEVQPSEEEARGYIVTDREVLGPAVTFKVSANVQNVTTEDVEKATGKANSSSCLLRRSKKTPPSSSRSPWSPSPASWASSWPLASSTASAIALSTG

SEQ ID NO: 2923 - DNA, 1163 bp, Homosapiens
atcaaacaataataaagagagatttgtggaaaaatccagttacgggtggaggggaatcggttcatcaattttcacttgcttaaaaaaaatactttttcttaaagcacccgttcaccttcttggttgaagttgtgttaacaatgcagtagccagcacgttcgaggcggtttccaggaagagtgtgcttgtcatctgccactttcgggagggtggatccactgtgcaggagtggccggggaagctggcagcactcagtgaggccgcccggcacacaaggcacgtttggcatttctctttgagagagtttatcattgggagaagccgcagggacagaactgaacgtcctgcagcttcggggcaagtgagacaatcacagctcctcgctgcgtctccatcaacactgcgccgggtaccatggacggccccgtcagccacacctgtcagcccaagcagagtgattcaggggctccccgggggcagacacctgtgcaccccatgagtagtgcccacttgaggctggcactcccctgacctcacctttgcaaagttacagatgcaccccaacattgagatgtgtttttaatgttaaaatattgatttctacgttatgaaaacagatgcccccgtgaatgcttacctgtgagataaccacaaccaggaagaacaaatctgggcattgagcaagctatgagggtccccgggagcacacgaaccctgccaggcccccgctggctcctccaggcacgtcccggacctgtggggccccagagaggggacatttccctcctgggagagaaggagatcagggcaactcggagagggctgcgagcatttccctcccgggagaggagatcagggcgacctgcacgcactgcgtagagcctggaagggaagtgagaaaccagccgaccggccagaatgatgccaaaatattgcttatgtctctacatggtattgtaatgaatatctgctttaatatagctatcatttcttttccaaaattacttctctctatctggaatttaattaatcgaaatgaatttatctgaatataggaagcatatgcctacttgtaatttctaactccttatgtttgaagagaaacctccggtgtgagatatacaaatatatttaattgtgtcatattaaacttctgatttcac

SEQ ID NO: 2924 - protein, 63 aa, Homosapiens; identical to SEQ ID NO: 2910

SEQ ID NO: 2925 - DNA, 3146 bp, Homosapiens
gcctcccgccgcctcccgcgcggccatggactgagcgccgccggccaggccgcggggatggggccgccgctcccgctgctgctgctgctactgctgctgctgccgccacgcgtcctgcctgccgccccttcgtccgtcccccgcggccggcagctcccggggcgtctgggcacaggtttcacgtggcaggatgactatactcagtatgtgatggaccaggaacttgcagacctcccgaaaacctacctgaggcgtcctgaagcatccagcccagccaggccctcaaaacacagcgttggcagcgagaggaggtacagtcgggagggcggtgctgccctggccaacgccctccgacgccacctgcccttcctggaggccctgtcccaggccccagcctcagacgtgctcgccaggacccatacggcgcaggacagaccccccgctgagggtgatgaccgcttctccgagagcatcctgacctatgtggcccacacgtctgcgctgacctaccctcccgggtcccggacccagctccgcgaggacctcctgccgcggaccctcggccagctccagccagatgagctcagccctaaggtggacagtggtgtggacagacaccatctgatggcggccctcagtgcctatgctgcccagaggcccccagctccccccggggagggcagcctggagccacagtaccttctgcgtgcaccctcaagaatgcccaggcctttgctggcaccagccgccccccagaagtggccttcacctctgggagattccgaagacccctccagcacaggcgatggagcacggattcataccctcctgaaggacctgcagaggcagccggctgaggtgaggggcctgagtggcctggagctggacggcatggctgagctgatggctggcctgatgcaaggcgtggaccatggagtagctcgaggcagccctgggagagcggccctgggagagtctggagaacaggcggatggccccaaggccaccctccgtggagacagctttccagatgacggagtgcaggacgacgatgatagactttaccaagaggtccatcgtctgagtgccacactcgggggcctcctgcaggaccacgggtctcgactcttacctggagccctcccctttgcaaggcccctcgacatggagaggaagaagtccgagcaccctgagtcttccctgtcttcagaagaggagactgccggagtggagaacgtcaagagccagacgtattccaaagatctgctggggcagcagccgcattcggagcccggggccgctgcgtttggggagctccaaaaccagatgcctgggccctcgaaggaggagcagagccttccagcgggtgctcaggaggccctcagcgacggcctgcaattggaggtccagccttccgaggaagaggcgcggggctacatcgtgacagacagagaccccctgcgccccgaggaaggaaggcggctggtggaggacgtcgcccgcctcctgcaggtgcccagcagtgcgttcgctgacgtggaggttctcggaccagcagtgaccttcaaagtgagcgccaatgtccaaaacgtgaccactgaggatgtggagaaggccacagttgacaacaaagacaaactggaggaaacctctggactgaaaattcttcaaaccggagtcgggtcgaaaagcaaactcaagttcctgcctcctcaggcggagcaagaagactccaccaagttcatcgcgctcaccctggtctccctcgcctgcatcctgggcgtcctcctggcctctggcctcatctactgcctccgccatagctctcagcacaggctgaaggagaagctctcgggactagggggcgacccaggtgcagatgccactgccgcctaccaggagctgtgccgccagcgtatggccacgcggccaccagaccgacctgagggcccgcacacgtcacgcatcagcagcgtctcatcccagttcagcgacgggccgatccccagcccctccgcacgcagcagcgcctcatcctggtccgaggagcctgtgcagtccaacatggacatctccaccggccacatgatcctgtcctacatggaggaccacctgaagaacaagaaccggctggagaaggagtgggaagcgctgtgcgcctaccaggcggagcccaacagctcgttcgtggcccagagggaggagaacgtgcccaagaaccgctccctggccgtgctgacctatgaccactcccgggtcctgctgaaggcggagaacagccacagccactcagactacatcaacgctagccccatcatggatcacgacccgaggaaccccgcgtacatcgccacccagggaccgctgcccgccaccgtggctgacttttggcagatggtgtgggagagcggctgcgtggtgatcgtcatgctgacacccctcgcggagaacggcgtccggcagtgctaccactactggccggatgaaggctccaatctctaccacatctatgaggtgaacctggtctccgagcacatctggtgtgaggacttcctggtgaggagcttctatctgaagaacctgcagaccaacgagacgcgcaccgtgacgcagttccacttcctgagttggtatgaccgaggagtcccttcctcctcaaggtccctcctggacttccgcagaaaagtaaacaagtgctacaggggccgttcttgtccaataattgttcattgcagtgacggtgcaggccggagcggcacctacgtcctgatcgacatggttctcaacaagatggccaaaggtgctaaagagattgatatcgcagcgaccctggagcacttgagggaccagagacccggcatggtccagacgaaggagcagtttgagttcgcgctgacagccgtggctgaggaggtgaacgccatcctcaaggcccttccccagtgagcggcagcctcaggggcctcaggggagcccccaccccacggatgttgtcaggaatcatgatctgactttaattgtgtgtcttctattataactgcatagtaatagggcccttagctctcccgtagtcagcgcagtttagcagttaaaagtgtatttttgtttaatcaaacaataataaagagagatttgtggaaaaatcc

SEQ ID NO: 2926 - protein, 962 aa, Homosapiens; identical to SEQ ID NO: 2918

SEQ ID NO: 2927 - DNA, 266 bp, Homosapiens
ctgctgaaggcggagaacagccacagccactcagactacatcaacgctagccccatcatggatcacgacccgaggaaccccgcgtacatcgccacccagggaccgctgcccgccaccgtggctgacttttggcaggtgaacatttttaaattaaaatctctctttctgaaaagaagatctcaataactgggtcacgaatcatgtcttgaatctgattaggccaatcaaacttcttacaaatgctcatcaaatgttacttatatcag

SEQ ID NO: 2928 - protein, 42 aa, Homosapiens
MDHDPRNPAYIATQGPLPATVADFWQVNIFKLKSLFLKRRSQ

SEQ ID NO: 2929 - DNA, 1325 bp, Homosapiens
ggatagcagcgccgaggtctgctcgtggtgagagaccccgagtcccggcacactgtgggggggccgcaggacggcggcccggggtgccctcgggacccctgcgctccgagactcgaggactacgcgacaaacggcagttcaggctgccgcgggtgcaggtttgctcatccacggccgccgggttagggagacgattctggcacgttccaggcaggccggtgtcgggagagggtccctgcgtgtgggagacggaggcggcggggtcggctggagaaccggggaaggaacgcggcggcctcctcccgcgggaagaggcccaagccgggctcgccctgcggctcagcgaggagcccgccctgccggcttctgaggacgcgccccggaccctgctctcctgggcctgaggtgacacgttctgtcgattgaggccccgaggtttgcggaagtctctggccgcagccgcgggaggcgcaacacgctgaggctgcgcgacgtggggcccgcccggacccgcctccgcccgtgtctccccgcagccgtctctgccagaactatcggaagagaccggaactgttggttttgtgtctgtgagaagagcagcactgggaataagtcacctgctgagctgacagcggaaacgaaggacaagcggagtcgcctagcgccgtcgctgcttagcccagaaaacggcctcgtcagcgccctcgacctgtttgcggaccgcttcaggagctgaaggaaccaccgagatgaccactcccgggtcctgctgaaggcggagaacagccacagccactcagactacatcaacgctagccccatcctcttctcaattctggtcttcagggaaggatgaggacatctcactaaaattccaaatttgcctttaatcaaacatggtgcctgcaggatgcaatgctgttctagggctgagtgagacggggcaggtgatcgaggcacaaatcgcaccctacggtgtcccaaagtttctttgctcgtccatagggagctttggatgaaagtattggcccaactgcctgcaggccacggccactgatggcggacagtgctcagctctcggctctgctgatctcagcagccactgatggtggagggtgctcagctctcggctctgctggtctcagcggccactgatgacggacggtgctcagctctcagctctgctggtctcagtggccactgatggcagatggcgctcagctctcagctctgctggtctcagcggtcactgatggtggagggtgctcagctctcagctctgctggtctcagtggccactgatggcagacagtgctcagctctcg

SEQ ID NO: 2930 - protein, 40 aa, Homosapiens
MVPAGCNAVLGLSETGQVIEAQIAPYGVPKFLCSSIGSFG

SEQ ID NO: 2931 - DNA, 3309 bp, Homosapiens
aacgggatgccttggaaagcatcgttctgcagcaggactgctcaaccggccaatcagaacacagggaaccatgaaagagccccagctctgtccctgtgtgaatctcagggctgtttcgaggatgaaaaggaggtgtttagccccgagcctcacgtggaaacatctgatgagcctttgccaatatgctcgggacctggggacggctggggtgaccccatcgcaaggccgggccgtggaaacaatctcagccctggaaccagcgcctgggaagtcccgcggtggatccgcgtcacgggggaggattggctcagcactggtcctgcggaatgtgtttttatcaatgacttgacgacgtgaaaaacatgtttataaaacgagcagatggtgccgagctgagagggaggtgacgcagtgactcaggaaccacaagctctggaggctgaacgagaatcggttacaggagatgaacacaaggctcgattctcctgttaaacttgactgtcaccaacggggggtggggggtgcgcgaggccctgggctccaccgaagaccttaaggaaaagactctggatgttagtgggttcggcctcagaatcagccggcgctgagatgtgcacctggcaggatgaacgtaacttctggtggataaagtgggaggcctgatccaggaagaagcacaccgtggcctggggcccctctggagggtaggtcttccaagtcacgggaaacagggcgcccaggagacggtgagcccggctgctgccaccccgaaggccaggctcgccccacactgtgagaccctccccacacgaagattctgtaagcggaatcggaaggaggatgtgagaaggacgggtagccatgccacaccaggccagacatcttaccaacctatcggttcagttttaagaaagagagcaaagaggatctaaaatctgaactttgagcagctgaactgtgtggagtatcaacgtggctcctgacaaccccaccggcactgtttctttgcactggaggtcctgaagagctcacggaaggtgcacttgcagttgtagttcagagatgatgcttttagacaatctttcccttcgagaagtagcctaatgagaaggactctgtagatctcttcctaaaaaagaatcctcagtctctggcagaacagctgcccagaacagcttctgcctgtgaggtagcaaagaaaaaggcccacacagaatttgctgggatattttctttccaacaccaacaaaccgacagccttcccaaatcctagggcagagtcggctggcactgagatcaaaaggggtgaagggaaggcagccaggctgggagtctctctccagcaactttcttggcgaggtgacatatatgcccagaacctttttctatggaaggaaaaagaaaaccctggcttaatcatcagagttaggagaatcacccacgtattcatctttaaaagcaaatcatgataacttttggtcactcagaagtaaccaaggcaaaatattcctcttaggggactctgtttagagttttgggagagaaaaaaaaaaaaactaaaccaaaggtttatttagaaataaattgttttctgagtattctaaggaaagctatgcttagccaaagtgcttcagcccttgtacatgtttcaaatacttctgtagaagtttgaaatggacatggattttcccaacacacacgcacaatctcaggtgagcccaagacagcctatgaggatggcactggggagtctggatttcagctctgacgggcgggctctaaaccccaaagttcttgtcggccaagtgggggggtttcttgtgaggaccagaggtggcacatccacgggcatgggggacgctggctcacgatgccccagtgatgccgtggttaggacactgctcacgcagctgcagcgcagagcacgggggacgctggctcacgatgccccagtgatgccgtggttaggacgccgttcacgcagctgcagcgcagagcacgggggacgctggctcacgatgccccagtgatgccgtggttaggacgccgttcacgcagctgcagcgcagagcacgggcgacgctggctcacgatgccccagtgatgccgtggttaggacgccgttcacgcagctgcagcgcagaggccagtgtggtgaccctgactcctgggaacggtgatcagctgggcctctgcctcactggaccacgctgcaaggcaagggcctgggagatgcccacagccgcgcctctggctgtgaggcagctgtggtcctccagcagcaatgccctcagaagctgggagatgtgaaccccacatgactctcctccttgctgtcttcctgtccctgagccttcagctcttcgttgtctctgtcttgtctctctgcattgtttgtcctggttctctctctctctctcgttattacaacatagagccaaaaatacttttttgtttaggatatggcaccaaaatagtatcatatccctgttcttcatctgaaatgcagacaagcgaaatgctgcataattcttttttaaacattcaaaaaacagaaaatgcatgttaagttctttaaacttctgagataatacaactagacctagcatggtgccagccaagcattgcataatgtgtgtttccttctcctttgggggctcattccgatcagggtgcatctgggaagtcgggcgactgtgtccatctcctgggtggaagaatgacccagggaagtgctccatggggaaggcggggcatgagagaagggaggggtggtcccgaggaccctttccatagacctgggagttcccggtgagcacgcggaaaggacgcggtgggagcggcaggtgcagagggaggacttgaaggttccatccctaacagaggacagcgtggccgagtactcatgcttccaaccctgcacagaggatagtgcatgcccagcatgcagactcgcttccatcgcgacacagaggacagcatggagcccagctcgagtgccgtccccccaccatgacagcgcagcatgggccttccaagccacagagccacagggaagccagtcctcctggaccgtgtgtggctgttttggagccagttgtgtcctgtgaagagcgcagcggccgcaggtgaggcaggagtgaagatggaggaggcggccatctctctggggcctggcaacagcgagagcttttgccaagccactgtctcccggaggacaagatctccttcccaaaagcaagatggccaagagtatggagaagaaagtaggtaatacaagtttgctcagaataaacctatgtgttcatg

SEQ ID NO: 2932 - protein, 116 aa, Homosapiens
MPWKASFCSRTAQPANQNTGNHERAPALSLCESQGCFEDEKEVFSPEPHVETSDEPLPICSGPGDGWGDPIARPGRGNNLSPGTSAWEVPRWIRVTGEDWLSTGPAECVFINDLTT

SEQ ID NO: 2933 - DNA, 296 bp, Homosapiens
tccgccccatgcgcccagcacagttacccttttccgccccatgcgcccagcacagttactcttttccgccccatgcgcccagcacagttactctttcccgtcccatgcgcccagcacagttaccctttcccgtcccatgcgcccagcacagttaccctttcccgtcccatgcgcccacacagttactctttccctcccacgcgcccagcacagttaccctttcccgtcccacgcgcccagcacattacccttttccgccccatgcgcccagcacagttacccttttccgccccatg

SEQ ID NO: 2934 - protein, 95 aa, Homosapiens
MRPAQLPFSAPCAQHSYSFPPHAPSTVTLSRPMRPAQLPFPVPCAQHSYPFPSHAPTQLLFPSHAPSTVTLSRPTRPAHYPFPPHAPSTVTLFRP

SEQ ID NO: 2935 - DNA, 1070 bp, Homosapiens
agacggaagcagcagcattccgcttgcaggtttttgaaaaaacaaatggggcaagagaggccaggaccacgcctgactcaggcgatcggacgggcagggaggctgcaaggcatggcatgagcaggtggagctgtcaggactgccccagcccctggctcaaagatgcccgaccccaggaccctgcctcgctggatggtgaaggccaacttcccctctgttggagctggcctgggcgttgtgggaagggctgggaggaggcccaggacaatgcagaacagacaggacgtttcacagagcaggctgccatgtccctcggggccttgggggctgctgaggccctgagaaaggtcactggaggcctggccggaagtgcagggttatctcagtacttgatttaaggctcctgcagctgaaaagctgccccacacggcggaccgggtggaggaagtcagctgtgctgcttaaccgtggagtctccgtcccggtcctgctcaccagctctgcaaaggccttgtcctccctgcctgattctcggcaccatttttaacacgcctatggagaggccacgttgagtccagaggtccgtgcgcctcatggccacatcacggcacccgttcacccacacaagggccaggagcatcccctagggaggaggagatggcagatctgcacaggctctgcgctcctctctctccggagcgtcctctcctctgtgtggcaggctcggcgcgtgatggaggagccccttctgcagggctctgtttagagggtgcccgccccacagcctgtggctgctcctactcatgccaggtgaggctcctacacccaccagtggccaccggggagtcacagctccttctgcatcatccgcctgacctgtttcctcatctgggatgacaaccagatccagctctgaggtccgtgccctgagtagaaaagttcacacagcaaagtttccggagccttccctgacgcgccacgtgtccgtccataactggtcatcctccacatcctgtgaggcacgtctcagcacctcttcgtgcaagcgcccgcactagacgtttgagaaa

SEQ ID NO: 2936 - protein, 93 aa, Homosapiens
MSRWSCQDCPSPWLKDARPQDPASLDGEGQLPLCWSWPGRCGKGWEEAQDNAEQTGRFTEQAAMSLGALGAAEALRKVTGGLAGSAGLSQYLI

SEQ ID NO: 2937 - DNA, 4298 bp, Homosapiens
gaggccaggaccacgcctgactcaggcgatcggacgggcagggaggctgcaaggcatggcatgagcaggtggagctgtcaggactgccccagcccctggctcaaagatgcccgaccccaggaccctgcctcgctggatggtgaaggccaacttcccctctgttggagctggcctgggcgttgtgggaagggctgggaggaggcccaggacaatgcagaacagacaggacgtttcacagagcaggctgccatgtccctcggggccttgggggctgctgaggccctgagaaaggtcactggaggcctggccggaagtgcagggttatctcagtacttgatttaaggctcctgcagctgaaaagctgccccacacggcggaccgggtggaggaagtcagctgtgctgcttaaccgtggagtctccgtcccggtcctgctcaccagctctgcaaaggccttgtcctccctgcctgattctcggcaccatttttaacacgcctatggagaggccacgttgagtccagaggtccgtgcgcctcatggccacatcacggcacccgttcacccacacaagggccaggagcatcccctagggaggaggagatggcagatctgcacaggctctgcgctcctctctctccggagcgtcctctcctctgtgtggcaggctcggcgcgtgatggaggagccccttctgcagggctctgtttagagggtgcccgccccacagcctgtggctgctcctactcatgccagaacagaaatgggtgcccagctggtcaacatacatttgttaccttgctttaaaatgccttgagagtggaaccaccggtgcaggcttggctggtcaagaatcatgttctagaaattatttccagtgctgagcacagtccctgagatttaaaaacgcttatgggatgaatggaaaatagcagggcctcttaccggcctgcaacgcctttagaggcacggatgccacgtgcacagacccagctccgggaagcacaagcctggtggtgtgcgggaagcggcgaggtgcgcgggaagcggcgaggtgtgcgggaagcggcgaggaccggctttaaagtcacagcagtttcctgaaagatgagggggaggaggacagtgacgctcacagcacagccacttgtcaacttggacatgacacacacaaagcccagagctcggacggcaccgcgaggaggctgggattcacgtcaggcggcacttggtgggcagttacaagaaaggacggcagccaagccagtgcctcctgtgctccggctctggggccctggacacacctggggattcagttttgcatggaccagcattctccaagcgctctgatcagtcttacaggagaagtaggctgtgtggtctgggagccttgagaaggttccgctgtaatctgtcagacttttggacaggatttttctgccttacgtggctgatgtacgtctgcaggagggtagcacacggcaccctctcggcctgctgtgccacaaaacctttgcttttacaggtctcacggagccagtgggctgcccaatgccccagtgcagagtggagacgaggtcttcccctccttcccagcttgcctgggcggcgacgcgtctcagagacctctgccagggtcaatcctggcccatgctactagctcggggtgtgaagtcacagttgatgctgaacacctggctgggccagacttgtgcccaagaaaccttataccaccaactggttttcaaaagaaaaaaattaaaagtaattcaaaactttgagatataaatataattctttaaaaactgcagcgtggttcactggccctgtgatgggctgaatgcgcccccaagttcatgtggcagccttgacccccaggacctcagcgtgtggcgtcttggagacaggggctttacagaggcgatgaaggtaaaacaagctcttatggcgaccctgacccagcaggaccggtatccttatcagaaagggatatctggacacagagacagacgtgcacgtgtggagacacctgaagatgaagatggcatctaccaggcgggggagtggcctcaggagaaacgggctctgcccacgcctcgacctcggacttccagcctccagagccgtgtgaaaagaaacttccatcatttaagctgccctgtctgtgggactttgcctcggcagcctgagcagacagtacaggctccaaaaacgctctctgcatgtgtgattctggccaggaccaccctgcccgaagccacggctatgtcgaagctaattgtgcgatttctgccggccacgtggttttgatccaaaagcatttgaaagctgctctgaagatgcagaaaagctgagtcccggcatcgctgctccttccaagcgactgttcacacacagggtgtgagtgcgtccccccatccagggtccagcctggcctaaggctcactgggcaccatccagatctgtgactgggtccccccatccagggtccagcccacccgaggttcactgggcaccatccagaggccccagatgccgacacctggggacgggctgtatcaggcagatgtttcctcccgggctccacctggggacgggccccggatgctgacacctggggatgggctgtattaggcagatgttcctcccgggctctagttttccaggccgacaggaggaagtcctgttggggccaggggaggcattggggatgagattgagaggatggtggggtcgcaaaggtttacattgcctgtgccactttctccaaggtctggggccgccaccctgtggtgcctctggaagctgccatgtggggctggcccacggtgactggccacggcggggctgtgtgtggtatgcacctgtgagctgctgaaacgcagcctggcggccaggaaccagctgccccatcctctctgcaggaggtcaggtttgagcacgtattccctcaaacgctcatagacgtcagtatctcaggacaaagtgcttgtctgagacccaggtttgggccccaaggtggtaccatcgagggaggcatgttctggcaggtgacagcccctcctctgtgcctgaacctgcagtttctgcccccgcataaaatgccgccatctcaggccctccctgacccccaacctgcacaagggctcacagctggcaggcacctgtgtggggtcgtggtaggacctgtgtctctgaggtccagcccaaggctgtgccacataggcccaaatccaagcactcccctcctgggcacgtggctgtgtgtgcatgtgtggctgggtgggcaggggggttgactctggccaccgaaatggagaggagcggtgcactccctgggtctggcccacgcaggctccttcccaagtgctgctgccgggaaatggaggtccctaggtgagacgggagccgggcactgtgggggtggcccctgaggggctgcaggttggcactgcccagctgacgcattccgcagtcctgcaccaggggatgaacgaggaatcggcttctgctctgctgaacatcccactggttcatgtccacttgtttgggtgatcctaactgatctgctacctgagtttgaatctcagcgctattattagtcaggggtcctggaggtgggtgaccccacctcacctaaaccacagagatgctcatcctcatgcatgcacacgtccatctcagcttcagctcgcaagcaggaccctcaccgtggggccacgacggaccctgcaaagctggtctgactgtgccgagcctgtcgggggttgggggaaggaaggcgggagctcggcatctggagggcagtggagaccctcagcgagtgccaggaggatctgctgtcttcccagtgttgtcttcacagtggagagatgagttcacacagccttatctgtgtttccagtggcctctgtgtgcaagacgggccacgggttttgtgcggtatttgcctgtgggtcacagccaggtgaatgggccctcctggggctgcagccccaggtcctgatgttacttgtgccagcctggccacagtgcccggcctccagaagctgctgtcagaggagcagacgggagggcagggtggacggttaacagggtcaaggccccagagccccacaccctccccagcagccagcacaccctctgttctgtgacctcgcccctgcattgcggcaactgacagatgctccccggcctccttccccgctgccgcgcaacctctgacagccacgtgtactctcctgctttagaacaaggacctttcccttttgtgcatgaatacgctctcagcagatgcgag

SEQ ID NO: 2938 - protein, 93 aa, Homosapiens; identical to SEQ ID NO: 2936

SEQ ID NO: 2939 - DNA, 809 bp, Homosapiens
agccccccagctaccacccacactcctgcagggagaaccccgtcaccacccacactcctgcagggagagcctcccagccaccacccacactcctgcagggagagccccgtcaccacccacactcctgcagggagagcctcccagccaccacccacactcctgcagggagagcctcccagccaccacccacactcctgcagggagagccccgtcaccacccacactcctgtagggagagccccggccaccacccacactcctgcagggagagtcccccagccaccacccacactcctgcagggagagccccagccaccacccacactcctgcagggagagccccccagctaccacccacactcctgcagggagagccccgtcaccacccacactcctgcagggagagcctcccagccaccacccacactcctgcagggagagccccccaccaccacccacactcctgcagggagagccccccaccacccacactcctgcagggagagccccgtcaccacccacactcctgtagggagagccccggccaccacccacactcctgcagggagagtcccccagccaccacccacactcctgcagggagagccccagctactgtacacactcctgcagggagagccccagccactgtacacactcctgcagggagagcctcccagccaccacccacactcctgcagggagagccccccagccactgtacacactcctgcagggagagccccggccaccacccacactcctgcagggagagccccccagctaccacccacactcctgcagggaga

SEQ ID NO: 2940 - protein, 268 aa, Homosapiens
SPPATTHTPAGRTPSPPTLLQGEPPSHHPHSCRESPVTTHTPAGRASQPPPTLLQGEPPSHHPHSCRESPVTTHTPVGRAPATTHTPAGRVPQPPPTLLQGEPQPPPTLLQGEPPSYHPHSCRESPVTTHTPAGRASQPPPTLLQGEPPTTTHTPAGRAPHHPHSCRESPVTTHTPVGRAPATTHTPAGRVPQPPPTLLQGEPQLLYTLLQGEPQPLYTLLQGEPPSHHPHSCRESPPATVHTPAGRAPATTHTPAGRAPQLPPTLLQ

SEQ ID NO: 2941 - DNA, 3600 bp, Homosapiens
gatgccaggaggggcagatgtggattgacgtggctctcggcccccatgggctggtattgggcctccttgggagcagcctgagagtgctcattcttggccaaatcttgtgattcaacctcaatgcttctggaacccacaagccacccagcctcactttctaaaaatatgattgagaaagcaagacagagtttgggacggaggtttctccagcggagcagagccctggcatcctgtggaacatattgtgagtgttcacagccgagaaagtaagatgactgggatgtcattttcaaagaggaaatgggccccaccccaacagggccaccgagggagaatcgcaggaggcagctcccccaaaactgggagaaggtcaggcctgggttcccccataccgtcatggtcttgagtcagaaaccagagatttgtaaacagcatcaaaagccttcacttccttctgcagccttaaagtttgaactttacatacattttagacatgaaaagtacaccaagaaagccaccatggtgagttttaggcagagaccctcttgtgaataattcgtctatgatccaagatggccagacaagaatcagggcccaagctttttctccccagtgtcacatccacgctgttgtctcctctccagctcagaccaaaattctctggacattttcatggctgaaaaccccaccagaacgctggccctgacaggaccctctcctcaagtcctgaggacccggctgcggccagccagaatgtaaactacagctcgcagaagcagcaggcatggaggaagaggcaggagagcaagagcagaagctcgaaaccttcaaagggagcctgaagaacaaggccaggagaagcagcggccaggccccaccggtttcctcctttccctcctgaatctaggacagaggccatttcagacgagagaggaaagaacaacaaaatgaactgcaggagaagcagccagagcctgcaaggcccagccagagacggcagaggagagaaccgcaagccaggagcaaggaggagacaggtggactccactaaccaaccgacgcagcccagcggagacaggcggactccactgaccaaccgacgccacctggagaaagtaaatatttaactgtcagaaggaaaacactgtttgaacagtagtggccttaggaagaaggccctaatttttttgaacactgaccgggggccattctttacccagagctactatgtcccgcgcaaggcaacactggctgaagcccaggagggcggggcagctgcagaccctcaggagcctctgctggctcagggagcgtggggagagtccagcgtgcaccagaaggagggaggccacctctccttgcggcattaggagaccagggtctctgaaagggcggggaccacggccaggccagaaccaccacatcaccaggctgaaggctggttaacctggtggaatcagctgtcttcatgttcaaaccagcacatggggctattttgctccagtcacctggtgtgacatgagccactgagactcgaacacccctgctctggagcaaagaagaacccacacctctgtcctgcctggcagcctccccaccactcgccgtgggcacggggtccgtatccactcgccgggggcacggggtccgtatccactcgccgggggcacggggtccgtatcctctcgccgggggcacggggtccgtatcctctcgccgggggcacggggtccgtatccacttgctagggcatggggttcatatcctgtcctctgtctcctctaagtgtcccttaaacttaaggccaatcctatgatttccctctaaaagcattcttccgaattctaccccaaagaaaccagtgacatttctcaacatcaggcttcctaatctctgcaggccgcctgaagaaaaagaagagatatgtgtatggccatgccatttggaaatagaagaaaagcctttaaccgccttctaccttcagctgtttttgccaagcagagaaggtccagaaagcaccttcaaaggggctgggagctctggccctgcccatccacacagcaaatacagcaagcagaaataacacgttcacaggggctggaggctcctgtcctgcccatccacacagcaaacacagtaaccagaaataacacgttcacaggggctgggagctccggccctgcccatccacatggcaaacacagcaaccagaaataacacgttcacaggggctggaggctcctgtcctgcccatccacacagcaaacacagcaaccagaaataacatgttcacaggggctggaggctcctgtcctgcccatccacacagcaaacatagcaaccagaaataacacgttcacaggcttctcctccccactcccaactcagctgcaaaacagctgataaaatgaggatgggctctatgtaagtaaacagtactcgatctaccagtttacgacatcatcaaagacatgtagagagaaaatacatacacaggtaataataacaatgataattctaatactattttgttagattagaagcatttttcctggacagaagcaacatcacctggggtcccagtggaaagcacgggccaggcgtgctccctgtgaccaggtcagagtgcagagcccgcctggtgacctcatttccttagggcaattgtaccttctgtctggagccaggtccctcttaaaggtagaagactgcagaaaataattcaccagaagcaggcatggtgcatccccaggacggatccttcaccgcacccgagaacccgcaggatgaggcagctctgcgcaagcacctgaccccctgcagagctgagatggctgctcggggactatgtcccccagcaaagcacagagctgagccagctgcttggggactatgtcccccaggaaagcacgtctgagtcttggctccagctcctgtgtatgggatgtgatttggaaatggtctccgaagagggaagccagttaaagatgaggccatcagagtggctcctaatccagggactggtgtccctaagaaggagacactggacagagacagaagtgcccagtgggaaggcgaggccagaattcccgagaacacctggtgacccagcagaggtgggagggaggcccctgtaagccgaggaatggcaggggtgtcagggccaccagaggctggaggaggcaggaaggaccctctctggagccttcagagatgcacggccccgctaagaccttgatctcagaccctggggggtgcagggcctggagagctttgcactgttctaagcctgccagtgtgcggggctccgttgccaaagccttgggcactgcacgcgccatctcagaccctctggccccacacagccagagctcagcgatgagccaggcccacagctcttcctcagggccctcgttttctctctctgcaagccttctcctttctaaactgttgttgctaagtcagaaagagaagagaaggcatcacgttgaataatatcctcgagtgataaatctgcagtatctgctgaaggtccacagataatgtgtttaatttgacaaaccagggacaagaatgatgaataaaacactacttgctgat

SEQ ID NO: 2942 - protein, 30 aa, Homosapiens
MWIDVALGPHGLVLGLLGSSLRVLILGQIL

SEQ ID NO: 2943 - DNA, 695 bp, Homosapiens
gccccatcctcagtcagagtcccagcatccgccgcacctgcctgtcccttctcccttctcccctttattgtattttcactgaaggctgagaggagccagtctccacacggtgggccacttgcgattcccacagccccgtccgcactgcactgtttgtcttgttgctggaaactcagccccctgcgccccgaggaaggaaggcggctggtggaggacgtcgcccgcctcctgcaggtgcccagcagtgcgttcgctgacgtggacagtatacagacaacccaaagagtgagaaaaaatcttcatgatctatatatccgacaaaagactaatatccagactctacaaagaactcacattagcaagaaacaaacagtcccatcaaacaatgggctaaagacatgaatagacaattcttgaaagaagatatacaaatggccaacaaacatatgaaaaaatgcccaacatcactaatgatcagggaaatgcaaatcgaaaccacaatgttataccaccttactcctgcaagattggatataatcaaaaaatcaaaaaacagtagatgctggtgtggatgtggtgaacagggaacacttctacactgctggtgggagtgcaaactagcacagccactatggaaaacagtgtggagattccttaaagaactaaaagaactaccatttgattcagcaatccca

SEQ ID NO: 2944 - protein, 98 aa, Homosapiens
MNRQFLKEDIQMANKHMKKCPTSLMIREMQIETTMLYHLTPARLDIIKKSKNSRCWCGCGEQGTLLHCWWECKLAQPLWKTVWRFLKELKELPFDSAI

SEQ ID NO: 2945 - DNA, 478 bp, Homosapiens
aggtggaccctggctgctggtggaatatttgacatgaccggtgcccacgcccctctcccattcctctttcttgaaatggagagcaggcaagatgggggcagtggtggaagatgctcctcctccatgcacccagcagccctggggagcggcagggtcgcaacccaagagatgaacccccagtggccccgtcacgagctcccaacggaagggatgtcctagtgcagaggcagccaccacgctcgccccctgtactgggaaggccgccacgctcgccccgcgatggggaaggccgccacgtcgccccctgatggggaaggccgccacgctcgcccccgatggggaaggccgccacgctcgccgcctgatggggaaggccgccacgctcgccccctgatggggaaggccgccacgctcgccgcctgatggggaaggccgccacgctcgccccctgtatggggaaggccgccacgctcgcccc

SEQ ID NO: 2946 - protein, 65 aa, Homosapiens
MLLLHAPSSPGERQGRNPRDEPPVAPSRAPNGRDVLVQRQPPRSPPVLGRPPRSPRDGEGRHVAP

SEQ ID NO: 2947 - DNA, 289 bp, Homosapiens
gggaggagccggcggcgcgcgcctccctgggcccggactcggccgcctcccgccgcctcccgcgcggccatggactgagcgccgccggccaggccgcggggatggggccgccgctcccgctgctgctgctgctactgctgctgctgccgccacgcgtcctgcctgccgccccttcgtccgtcccccgcggccggcagctcccggggcgtctgggctgcctgctcgaggagggcctctgcggagcgtccgaggcctgtgtgaacgatggagtgtttggaaggtgccagaa

SEQ ID NO: 2948 - protein, 61 aa, Homosapiens
MGPPLPLLLLLLLLLPPRVLPAAPSSVPRGRQLPGRLGCLLEEGLCGASEACVNDGVFGRC

SEQ ID NO: 2949 - DNA, 585 bp, Homosapiens
tctcagtgtgcagccacatgtctcacggatgagccatgcgggatctcagtgtgcggccacgtgtctcacggatgagccaccgggatctcagtgtgcggccacgtgtctcatggatgagccactgcgggatctcagtgtgcggccacgtgtctcacggatgagccaccgggatctcagtgtgcagccacgtgtctcacggatgagccactgcgggatctcagtgtgcggacacgtgtctcacggatgagccactgcgggatctcagtgtgcggccacgtgtctcacggatgagccactgcgggatctcagtgtgcggacacgtgtctcacggatgagccactgcgggatctcagtgtgtggccacatgtctcacggatgagccaccgggatctcagtgtgcggccacatgcatggataagccacttgtggtcgtggtatgcagcatttcactttgcttctgggaaggttttccgagttttccaagtgcaggctccacacacagataagtttcactgtattaagagtatagagggccggatcttggttggattcagaaaagtagttattaaaaatatctgataccac

SEQ ID NO: 2950 - protein, 72 aa, Homosapiens
MSHAGSQCAATCLTDEPPGSQCAATCLMDEPLRDLSVRPRVSRMSHRDLSVQPRVSRMSHCGISVCGHVSHG

SEQ ID NO: 2951 - DNA, 717 bp, Homosapiens
cggcggcgcgcgcctccctgggcccggactcggccgcctcccgccgcctcccgcgcggccatggactgagcgccgccggccaggccgcggggatggggccgccgctcccgctgctgctgctgctactgctgctgctgccgccacgcgtcctgcctgccgccccttcgtccgtcccccgcggccggcagctcccggggcgtctgggctgcctgctcgaggagggcctctgcggagcgtccgaggcctgtgtgaacggtggtgccgagtcccacaaaggaacctggaatccagctgagtgggcacgtgctgcctgtcacggcccttcatgtcctgaacatctgttgagaggaggcgggggtgtcaccttaattccatcttggacaccacagtgacacaaagtgcaaagtgccgtgcccctcatccccacagatatgtggcatcccactggtctcctaaccacccaacgccgttgctcctgaccattggaaacgctggtggggctggagcacctggacagtccagtctcgttctagtggctggactggagtggggttgccttgaacccgtcttaggctggaaatgcccccagcagcagtgccaggggaactctcactggggcctgccctgggagccccggggaacacttgtcagttcagctctgaccttaaggtgggactgccccatgcccttggcccaggagtgggagctgcaggagga

SEQ ID NO: 2952 - protein, 99 aa, Homosapiens
MGPPLPLLLLLLLLLPPRVLPAAPSSVPRGRQLPGRLGCLLEEGLCGASEACVNGGAESHKGTWNPAEWARAACHGPSCPEHLLRGGGGVTLIPSWTPQ

SEQ ID NO: 2953 - DNA, 4331 bp, Homosapiens
catacattttacttctacatatgttattcccaaaattcattgtcattatttttgttttaaactgttaattaactttttaaaagatttaaacatgagagaaaattgtcttttaagtttatccacgtattcactatttctggcaatgttctttcctttgtgcagtttcagatttccatatggtgtcattttctttcttttaaagagctttctttaatatctctttagcatatatctgctagttatgagttttctcggcttttgattatctggaagagtattttgccttcatttttgaaggtttaaaaaattttaaagacagtgtcttgctctgtcacccaggctcaatcatggctcactgcaaccttgacctcctgggctcaagtagtcctcctgcctcagcctcccaagcagctagagctactggcatgtaccaccacatctggcttttttttttttttttttttttgtaaagacagggatttgggccgggcgtggtggctcacgcctgtaatcccagctcttcaggaggccaaggcaggtggattacctgaggtcaggagttcaagaacagcctggtcaacatgttgaaacctcgtctttactaaaatacaaaaattagccaggtgtggtggcgggtgcctgtaatcccagctacccgggaggctgaggcaggagaatcacttgaacccaggaggcggaggttgcagtgagccaagatcgctccgttgcactccagcctgagtgacaagagcgaaactttgtctcaaaaaaaaaaaaaaaagacgggtttgccatcttgcctaggttggtttctgaggtatttttgctagaaagagaatcctgcgttgatatttttctcccaggagtttaagcatgttttactgtgccttatttggttactgatgagcatcctactgccagtcccaccttcgtgtctctgtctgccttcatgatctctttatcacttttttgtttgtttgttttgttttgagacggagttttgctctgtcatcccaggctggagtgcagtggcgtgatcttggctcactgcaacctctgcctcccgggttcaagtgattctcctgcctcatcctcctgagtagctgggattacaggcatgcaccaccaagcccagctaatttttgtatttttagtagagtcggggtttcaccatgttgtccaggctggtcttgaactcctgacctcaagtgatccacctgcctcggtctcccaaagtgctgggattataggtgtgagctaacacactcggcctatcactggtttttagcaatttgattatgatgtatttgggtgtggttctcctcatgtttcttctgcttaggtttcattagaattgttgagtgtgttgggttttagttatcaaatttgaaaaatcttctggacctgtggtgagcctcagtgaggagggccaccctgcacccgtcgccggccccggtctcccagggcctcacccgagtgatgccccgctattgcgcggcgatttgttgtaagaactgccggggatgaaacaataaagaccggaagctgagtttttatccatttcctctacatgacaaagaaagactggaaaagtggttaaacaatatgaagcgagattcatgggttcccagtaaataccagtttctgtgtagtgaccattttactcctgactctcttgacatcagatggggtattcgatatttaaaacaaagtgcagttccaacaatattttctttgcctgaagacaatcagggaaaagacccttctaaaaaaaaatcccagaagaaaaacttggaagatgagaagtatgcccaaaagccaagtcagaagaatcagttgtattaaatgagacaaagaaaaatatagttaacacaaatgtgctccctcaacatccagaattacttcattcatcttccttggtaaagccaccagctcccaaaacaggaagtatacaaaataacatgttaactcttaatctagttaaacaacatactgggaaaccagaatctaccttggaaacatcagttaaccaagatacaggtgtaggtggttttcacacatgtttttataatctaaattctacaactattactttgacaatttcaaattcagaaagtattcatcaatctttggaaacccaagaagttcttgaagtaacttctagttatcttgctaatccaaactttacaagtaattccatggaaataaagtcagcacaggaaaatccattcttattcagcacaattaagcaaacagttgaagaattaaacacaaataaagaatctgttattgccatttttgtacctgccaaaaattctaaactttcagttaattcttttatatctgcacaaaaagaaaccacggaagtggaagacatagacatcgaagactccttgtataaggatgtagactatgggacagaagttttacaaatagaacattcttactgcagacaagatataaataaggagcatctttggcagaaagtctctaagctacattcaaagataactcttctagagttcaaagagcaacaaactctaggtagattgaagtctttggaagctcttataaggcagctaaagcaggaaaactggctatctgaagaaaatgtcaagatcatagaaaaccgttttacaacatatgaagtcactatgatatagaataactaggttttaaaactatggctgttaaataagctttttccagccaaaccaaactacatgtaaagtgaactttttcctgtataaagttctcatcttaatgaacctatgagagtgttgtgaagttatgaactgtatcctattcttgtaatgctcatttaagaaagaccagagagttgggctggagagaaaagcagttttattacttgataattttccaatttaaaatttagcacataaaaggattcagttataacatgagaaaacaaagaagtgttcaaagagcacagactagaagtcagattcaggaatcagtcctggttctaccactggcatgtgacttgggtaagttacttatgattgtgcctcagtccctaatttgtaaaataagcacttactagatttctaattgtctgcttctttatagtcccttccctttttattaagatatttctattagaacacattttctgtaagataatatatacttaatactagaagttggctagaatttgatgatattaaactatgtattattttcaatatttattgaattctgtggtgtttgaccttttggctgtagttacatattacagttatattatctgtaatagaaaggaagataaacctttttttttttttttgagatggagtcttgttctgtaacccaggctggagtgcagtggcctgatctcggctcactgcagcctctgcctcccgggttcaagtgattctcctgcctcagcctcccgagtagcggggattacaggcgcacaccaccacatccagcttatttttgtattttcagtagaaacggggtttcaccatgttggccaggctggtctcgaactcctgaccccaggtgatccacctgcctcggccttccaaagtgccgggattacagacgtgagccactgtgcctggccaagatagaacttctgtaattttattccagttgaactaaactaaggaaccatccattagcccagttcttagaagaggtacttcagacttgaaagaatatgtatttcggtaacttacatgtggctagccatcaagtacatagtcatctgagctaaacgttctgtatttacacagttatatttataaaccaaatattttaataggttaattttaaatatattttagaaatcacagtttgtatctgtttcttagtaggtgtggcctttaaaatatgtgcttattcattgttaaattccagaataatagagtaatacttaatactgtacattcccacttatgtatattttattaaaatttataagcaagaaatgatacataagtggtcatgatcttagggagacaaagaatttctcttaggaaagagaagtgatggtaatgtaaataaaaatgctgtttatagtcacatgattttaagaaaactgtaaaagcagagattttagtaatgacacaaatgtgacaaatagatgttttcttaaaattggcagtcaatataattatgtttctgcctatgatgttgaggaagttctataagttctatcagtctgattcttagttttcttatctgttaagtagaacatacttttacttaccttaaagggtggctttgagaattttgtaaggaacaaacatgtttttggttctggaatataggaggtgctcaataaaagttgactccgaatggcg

SEQ ID NO: 2954 - protein, 233 aa, Homosapiens
MLTLNLVKQHTGKPESTLETSVNQDTGVGGFHTCFYNLNSTTITLTISNSESIHQSLETQEVLEVTSSYLANPNFTSNSMEIKSAQENPFLFSTIKQTVEELNTNKESVIAIFVPAKNSKLSVNSFISAQKETTEVEDIDIEDSLYKDVDYGTEVLQIEHSYCRQDINKEHLWQKVSKLHSKITLLEFKEQQTLGRLKSLEALIRQLKQENWLSEENVKIIENRFTTYEVTMI

SEQ ID NO: 2955 - DNA, 1271 bp, Homosapiens
taaatttatttagcataaaagcacattatttacagtagatgataacaagataaagactttttgatgaaagacttattgagtaatatgtctgtttttctttatttttgtctcactgaataaacactttcgtttatcttttttttttttttgtcatattgagacaggatgtcgctctgtcacccaggctggagtgccatgatacatggctcactacagcctcaaattcctgggctgaagtgatcctcctgcctcagtctcccaagtagctgggactacaggtttctgacgtagaagagcttacccctccagagcatctttctgatcttccaccattttcaaggtgtttaataggaataataataaagtcttcgaatgtggtcaggtcatttttggatgaattaaaggcatgtgtggcttctaatgatattgaaggcattgtgtgcctcacggctgctgtgcatattatcctggttattaatgcaggtaaacataaaagctcaaaagtgagggaggttgcagccactgttcacagaaaactaaagacattcatggaaattactttggaagaggatagcattgaaagatttctctatgaatcatcatcaagaactctgggagaacttttgaattcataaccaagccaacatctccagacatgtaaaaatagggaaaagtgattcaaattgaaatgcctgtgtattttcctattgtttttaatgttaataacccatataatagggaaagggtgggatttttttgtgggaatgtgggaaggtgggggttatggaggagataactcaaaacttcttcaattttgcctagtgcctgcgtaaataatatatttaatataaaggactccaggtatgaatggtgtagaaatccatgattccaagaaaaaacacttttctagcaaacctggttgtttttaaaatgacttttatatatgtaatattgcttggaaactatgagtaataaagcaatgacaacatccatttgtttatttgaaagtattaggggcccggcgcagtggcacacgcctgtaatcccagcactttgggaggctgaggcaggcagatagatcacttgaggtcaggagttcaagaccagcctagacaacatggtgaaaccccgtctctaccaaaaatacaaaattagctgggtgtggtggtgaatgcctgtaatcccagctactcaggaagcagaggttgcagtgagctgacgtcgcgtcactgcaccccagcctgggcgacagagcaagactctgtctcaaa

SEQ ID NO: 2956 - protein, 38 aa, Homosapiens
MLITHIIGKGWDFFVGMWEGGGYGGDNSKLLQFCLVPA

SEQ ID NO: 2957 - DNA, 2854 bp, Homosapiens
taagtactgggaaatgatgcccccgaccattcttattgacctcctgaagaaggtgactggggaactggcatttgacacgagctcagctgatgttcgttgttctgtctttaagtgtctgccaatgattttggacaacaaactgagccacccattgttagagcagctccttccagctctcagatacagtctccacgacaattcggagaaagtgagggtagcttttgtggacatgctgttgaagatcaaagctgtgagggctgctaagttttggaaaatatgtcccatggagcacattctggttcgtctggaaactgattctcgacctgtgtctcggcgcctggtgagcctcatctttaattctttcctgcctgtgaatcagccggaggaggtctggtgcgagcgctgtgtcaccctggtgcagatgaaccacgccgctgccaggaggttctatcagtacgcccacgaacacaccgcctgcaccaacatagcaaagctgattcacgttattcgtcattgcttaaatgcctgtatccagagggcagtgagagagcctccagaggacgaggaggaagaggacggaagggagaaggagaatgtgactgttctggacaaaacactgtcagtaaacgatgttgcatgcatggcaggtttactagaaatcattgtgattctctggaaaagtattgacagaagtatggaaaataataaagaggccaaactttacacgattaacaagtttgcctctgtgcttccagagtatctgaaagtatttaaggatgatcgctgcaagatccctttattcatgctaatgtcctttatgccggcctctgctgtccccccattcagctgtggtgtgatttccacgctgagaagccgggaggagggcgctgtggacaagagctactgcactttgttggattgcctctgctcctgggggcaggtggggcacattctggagcttgttgacaactggctgcccacagagcatgcccaggccaagagcaacacagcttctaaaggtagggtgcagatccatgacacacgcccagtcaaacctgaattggcattggtctacattgagtatctgctgactcatccaaagaaccgcgagtgcttgctctctgctcctcggaagaaacttaaccatcttttgaaagcccttgaaacgtcaaaggcagatctggagtcacttctgcagacaccgggtgggaagcctcgtggcttcagtgaagcagctgccccgcgagcctttggtctccactgtcgcctgagcatccatcttcagcacaagttctgctcagaaggaaaggtgtatttgtccatgttggaagacactggcttttggttagaaagcaaaattttatcttttattcaagatcaagaagaagactacctgaagcttcatagggtcatttatcagcaaattatccagacctacctgactgtgtgtaaagatgttgttatggtaggccttggtgaccatcagtttcagatgcaactcttacagcggagtcttggaatcatgcaaacagtgaagggatttttttatgtttcattacttcttgacattctgaaagagataactggaagttccttgattcagaaaacagattcagatgaagaagttgcaatgctgttggacacagtccagaaagtatttcagaaaatgttggaatgtattgcacggagcttcaggaagcagccggaagaaggcctgcggctgctttattctgttcagaggcctcttcatgagttcattactgctgttcagtctcggcacacagacacccctgtgcaccggggtgtactttctactctgatcgctgggcctgtggttgagataagtcaccagctacggaaggtttctgacgtagaagagcttacccctccagagcatctttctgatcttccaccattttcaaggtgtttaataggaataataataaagtcttcgaatgtggtcaggtcatttttggatgaattaaaggcatgtgtggcttctaatgatattgaaggcattgtgtgcctcacggctgctgtgcatattatcctggttattaatgcaggtaaacataaaagctcaaaagtgagggaggttgcagccactgttcacagaaaactaaagacattcatggaaattactttggaagaggatagcattgaaagatttctctatgaatcatcatcaagaactctgggagaacttttgaattcataaccaagccaacatctccagacatgtaaaaatagggaaaagtgattcaaattgaaatgcctgtgtattttcctattgtttttaatgttaataacccatataatagggaaagggtgggatttttttgtgggaatgtgggaaggtgggggttatggaggagataactcaaaacttcttcaattttgcctagtgcctgcgtaaataatatatttaatataaaggactccaggtatgaatggtgtagaaatccatgattccaagaaaaaacacttttctagcaaacctggttgtttttaaaatgacttttatatatgtaatattgcttggaaactatgagtaataaagcaatgacaacatccatttgtttatttgaaagtattaggggcccggcgcagtggcacacgcctgtaatcccagcactttgggaggctgaggcaggcagatagatcacttgaggtcaggagttcaagaccagcctagacaacatggtgaaaccccgtctctaccaaaaatacaaaattagctgggtgtggtggtgaatgcctgtaatcccagctactcaggaagcagaggttgcagtgagctgacgtcgcgtcactgcaccccagcctgggcgacagagcaagactctgtctcaaa

SEQ ID NO: 2958 - protein, 734 aa, Homosapiens
MMPPTILIDLLKKVTGELAFDTSSADVRCSVFKCLPMILDNKLSHPLLEQLLPALRYSLHDNSEKVRVAFVDMLLKIKAVRAAKFWKICPMEHILVRLETDSRPVSRRLVSLIFNSFLPVNQPEEVWCERCVTLVQMNHAAARRFYQYAHEHTACTNIAKLIHVIRHCLNACIQRAVREPPEDEEEEDGREKENVTVLDKTLSVNDVACMAGLLEIIVILWKSIDRSMENNKEAKLYTINKFASVLPEYLKVFKDDRCKIPLFMLMSFMPASAVPPFSCGVISTLRSREEGAVDKSYCTLLDCLCSWGQVGHILELVDNWLPTEHAQAKSNTASKGRVQIHDTRPVKPELALVYIEYLLTHPKNRECLLSAPRKKLNHLLKALETSKADLESLLQTPGGKPRGFSEAAAPRAFGLHCRLSIHLQHKFCSEGKVYLSMLEDTGFWLESKILSFIQDQEEDYLKLHRVIYQQIIQTYLTVCKDVVMVGLGDHQFQMQLLQRSLGIMQTVKGFFYVSLLLDILKEITGSSLIQKTDSDEEVAMLLDTVQKVFQKMLECIARSFRKQPEEGLRLLYSVQRPLHEFITAVQSRHTDTPVHRGVLSTLIAGPVVEISHQLRKVSDVEELTPPEHLSDLPPFSRCLIGIIIKSSNVVRSFLDELKACVASNDIEGIVCLTAAVHIILVINAGKHKSSKVREVAATVHRKLKTFMEITLEEDSIERFLYESSSRTLGELLNS

SEQ ID NO: 2959 - DNA, 4203 bp, Homosapiens
gaatctggtccgagcgcgggaaacggcgggtccccgagcccagtaccagacctcctgtgcgaagagtaacctgctcttcggactgataactggatgggttacaaaataaatgccatttgaacagtgccatctgtcatggaaaaacgtgagacgtttgtacaagccgtgtctaaggagctggttggagagtttttgcaatttgttcaacttgataaagaggcctctgatcctttcagcctaaatgaattactagatgaattatcaaggaaacagaaagaagaattatggcaaaggctgaagaatttattgacagatgtgttgttagaaagcccagtggatgggtggcaggtagtggaagcccagggtgaagacaatatggaaaccgaacatggctcaaaaatgagaaaaagcatagaaataatttatgcaattacatctgtgattcttgcttctgtgtctgtaataaatgaaagtgagaactacgaagccctactggaatgtgttattatattaaatggtattttatatgcattacctgagtctgaacgaaaactacagagttctattcaggatttgtgtgttacctggtgggagaaaggcctgcctgccaaggaagacacaggaaagacagcctttgtcatgttactaaggaggagtctggagactaagacaggtgcagacgtatgtcggctttggcgtatccatcaagctttatattgctttgattatgatttggaggaaagtggagaaattaaagatatgttacttgagtgcttcataaatattaattatatcaagaaagaagagggaagaagatttcttagttgtctcttcaactggaatatcaacttcatcaaaatgatccacgggaccattaaaaaccagttacagggattacaaaagtctttgatggtatacattgcagaaatttatttcagagcttggaaaaaggcttcagggaaaatactggaggcgattgaaaatgattgcatccaggacttcatgttccacgggatacaccttccgaggaggtctccagtgcattccaaagtgcgggaggttctgagttactttcaccatcaaaagaaagttcggcagggagtggaagagatgctttatagattatataagcccatcctttggagaggattaaaggccagaaactctgaagttcgatcaaatgctgcattgttgtttgttgaagcatttcctattagggatccaaaccttcatgctattgaaatggatagtgaaatccagaaacagtttgaagagctctatagccttttagaagatccttacccgatggtccgttccacagggatccttggtgtttgtaaaataacttctaagtactgggaaatgatgcccccgaccattcttattgacctcctgaagaaggtgactggggaactggcatttgacacgagctcagctgatgttcgttgttctgtctttaagtgtctgccaatgattttggacaacaaactgagccacccattgttagagcagctccttccagctctcagatacagtctccacgacaattcggagaaagtgagggtagcttttgtggacatgctgttgaagatcaaagctgtgagggctgctaagttttggaaaatatgtcccatggagcacattctggttcgtctggaaactgattctcgacctgtgtctcggcgcctggtgagcctcatctttaattctttcctgcctgtgaatcagccggaggaggtctggtgcgagcgctgtgtcaccctggtgcagatgaaccacgccgctgccaggaggttctatcagtacgcccacgaacacaccgcctgcaccaacatagcaaagctgattcacgttattcgtcattgcttaaatgcctgtatccagagggcagtgagagagcctccagaggacgaggaggaagaggacggaagggagaaggagaatgtgactgttctggacaaaacactgtcagtaaacgatgttgcatgcatggcaggtttactagaaatcattgtgattctctggaaaagtattgacagaagtatggaaaataataaagaggccaaactttacacgattaacaagtttgcctctgtgcttccagagtatctgaaagtatttaaggatgatcgctgcaagatccctttattcatgctaatgtcctttatgccggcctctgctgtccccccattcagctgtggtgtgatttccacgctgagaagccgggaggagggcgctgtggacaagagctactgcactttgttggattgcctctgctcctgggggcaggtggggcacattctggagcttgttgacaactggctgcccacagagcatgcccaggccaagagcaacacagcttctaaaggtagggtgcagatccatgacacacgcccagtcaaacctgaattggcattggtctacattgagtatctgctgactcatccaaagaaccgcgagtgcttgctctctgctcctcggaagaaacttaaccatcttttgaaagcccttgaaacgtcaaaggcagatctggagtcacttctgcagacaccgggtgggaagcctcgtggcttcagtgaagcagctgccccgcgagcctttggtctccactgtcgcctgagcatccatcttcagcacaagttctgctcagaaggaaaggtgtatttgtccatgttggaagacactggcttttggttagaaagcaaaattttatcttttattcaagatcaagaagaagactacctgaagcttcatagggtcatttatcagcaaattatccagacctacctgactgtgtgtaaagatgttgttatggtaggccttggtgaccatcagtttcagatgcaactcttacagcggagtcttggaatcatgcaaacagtgaagggatttttttatgtttcattacttcttgacattctgaaagagataactggaagttccttgattcagaaaacagattcagatgaagaagttgcaatgctgttggacacagtccagaaagtatttcagaaaatgttggaatgtattgcacggagcttcaggaagcagccggaagaaggcctgcggctgctttattctgttcagaggcctcttcatgagttcattactgctgttcagtctcggcacacagacacccctgtgcaccggggtgtactttctactctgatcgctgggcctgtggttgagataagtcaccagctacggaaggtttctgacgtagaagagcttacccctccagagcatctttctgatcttccaccattttcaaggtgtttaataggaataataataaagtcttcgaatgtggtcaggtcatttttggatgaattaaaggcatgtgtggcttctaatgatattgaaggcattgtgtgcctcacggctgctgtgcatattatcctggttattaatgcaggtaaacataaaagctcaaaagtgagggaggttgcagccactgttcacagaaaactaaagacattcatggaaattactttggaagaggatagcattgaaagatttctctatgaatcatcatcaagaactctgggagaacttttgaattcataaccaagccaacatctccagacatgtaaaaatagggaaaagtgattcaaattgaaatgcctgtgtattttcctattgtttttaatgttaataacccatataatagggaaagggtgggatttttttgtgggaatgtgggaaggtgggggttatggaggagataactcaaaacttcttcaattttgcctagtgcctgcgtaaataatatatttaatataaaggactccaggtatgaatggtgtagaaatccatgattccaagaaaaaacacttttctagcaaacctggttgtttttaaaatgacttttatatatgtaatattgcttggaaactatgagtaataaagcaatgacaacatccatttgtttatttgaaagtattaggggcccggcgcagtggcacacgcctgtaatcccagcactttgggaggctgaggcaggcagatagatcacttgaggtcaggagttcaagaccagcctagacaacatggtgaaaccccgtctctaccaaaaatacaaaattagctgggtgtggtggtgaatgcctgtaatcccagctactcaggaagcagaggttgcagtgagctgacgtcgcgtcactgcaccccagcctgggcgacagagcaagactctgtctcaaa

SEQ ID NO: 2960 - protein, 1143 aa, Homosapiens
MEKRETFVQAVSKELVGEFLQFVQLDKEASDPFSLNELLDELSRKQKEELWQRLKNLLTDVLLESPVDGWQVVEAQGEDNMETEHGSKMRKSIEIIYAITSVILASVSVINESENYEALLECVIILNGILYALPESERKLQSSIQDLCVTWWEKGLPAKEDTGKTAFVMLLRRSLETKTGADVCRLWRIHQALYCFDYDLEESGEIKDMLLECFININYIKKEEGRRFLSCLFNWNINFIKMIHGTIKNQLQGLQKSLMVYIAEIYFRAWKKASGKILEAIENDCIQDFMFHGIHLPRRSPVHSKVREVLSYFHHQKKVRQGVEEMLYRLYKPILWRGLKARNSEVRSNAALLFVEAFPIRDPNLHAIEMDSEIQKQFEELYSLLEDPYPMVRSTGILGVCKITSKYWEMMPPTILIDLLKKVTGELAFDTSSADVRCSVFKCLPMILDNKLSHPLLEQLLPALRYSLHDNSEKVRVAFVDMLLKIKAVRAAKFWKICPMEHILVRLETDSRPVSRRLVSLIFNSFLPVNQPEEVWCERCVTLVQMNHAAARRFYQYAHEHTACTNIAKLIHVIRHCLNACIQRAVREPPEDEEEEDGREKENVTVLDKTLSVNDVACMAGLLEIIVILWKSIDRSMENNKEAKLYTINKFASVLPEYLKVFKDDRCKIPLFMLMSFMPASAVPPFSCGVISTLRSREEGAVDKSYCTLLDCLCSWGQVGHILELVDNWLPTEHAQAKSNTASKGRVQIHDTRPVKPELALVYIEYLLTHPKNRECLLSAPRKKLNHLLKALETSKADLESLLQTPGGKPRGFSEAAAPRAFGLHCRLSIHLQHKFCSEGKVYLSMLEDTGFWLESKILSFIQDQEEDYLKLHRVIYQQIIQTYLTVCKDVVMVGLGDHQFQMQLLQRSLGIMQTVKGFFYVSLLLDILKEITGSSLIQKTDSDEEVAMLLDTVQKVFQKMLECIARSFRKQPEEGLRLLYSVQRPLHEFITAVQSRHTDTPVHRGVLSTLIAGPVVEISHQLRKVSDVEELTPPEHLSDLPPFSRCLIGIIIKSSNVVRSFLDELKACVASNDIEGIVCLTAAVHIILVINAGKHKSSKVREVAATVHRKLKTFMEITLEEDSIERFLYESSSRTLGELLNS

SEQ ID NO: 2961 - DNA, 991 bp, Homosapiens
taaatttatttagcataaaagcacattatttacagtagatgataacaagataaagactttttgatgaaagacttattgagtaatatgtctgtttttctttatttttgtctcactgaataaacactttcgtttatcttttttttttttttgtcatattgagacaggatgtcgctctgtcacccaggctggagtgccatgatacatggctcactacagcctcaaattcctgggctgaagtgatcctcctgcctcagtctcccaagtagctgggactacaggtttctgacgtagaagagcttacccctccagagcatctttctgatcttccaccattttcaaggtgtttaataggaataataataaagtcttcgaatgtggtcaggtcatttttggatgaattaaaggcatgtgtggcttctaatgatattgaaggcattgtgtgcctcacggctgctgtgcatattatcctggttattaatgcaggtaaacataaaagctcaaaagtgagggaggttgcagccactgttcacagaaaactaaagacattcatggaaattactttggaagaggatagcattgaaagatttctctatgaatcatcatcaagaactctgggagaacttttgaattcataaccaagccaacatctccagacatgtaaaaatagggaaaagtgattcaaattgaaatgcctgtgtattttcctattgtttttaatgttaataacccatataatagggaaagggtgggatttttttgtgggaatgtgggaaggtgggggttatggaggagataactcaaaacttcttcaattttgcctagtgcctgcgtaaataatatatttaatataaaggactccaggtatgaatggtgtagaaatccatgattccaagaaaaaacacttttctagcaaacctggttgtttttaaaatgacttttatatatgtaatattgcttggaaactatgagtaataaagcaatgacaacatcc

SEQ ID NO: 2962 - protein, 38 aa, Homosapiens; identical to SEQ ID NO: 2956

SEQ ID NO: 2963 - DNA, 2574 bp, Homosapiens
taagtactgggaaatgatgcccccgaccattcttattgacctcctgaagaaggtgactggggaactggcatttgacacgagctcagctgatgttcgttgttctgtctttaagtgtctgccaatgattttggacaacaaactgagccacccattgttagagcagctccttccagctctcagatacagtctccacgacaattcggagaaagtgagggtagcttttgtggacatgctgttgaagatcaaagctgtgagggctgctaagttttggaaaatatgtcccatggagcacattctggttcgtctggaaactgattctcgacctgtgtctcggcgcctggtgagcctcatctttaattctttcctgcctgtgaatcagccggaggaggtctggtgcgagcgctgtgtcaccctggtgcagatgaaccacgccgctgccaggaggttctatcagtacgcccacgaacacaccgcctgcaccaacatagcaaagctgattcacgttattcgtcattgcttaaatgcctgtatccagagggcagtgagagagcctccagaggacgaggaggaagaggacggaagggagaaggagaatgtgactgttctggacaaaacactgtcagtaaacgatgttgcatgcatggcaggtttactagaaatcattgtgattctctggaaaagtattgacagaagtatggaaaataataaagaggccaaactttacacgattaacaagtttgcctctgtgcttccagagtatctgaaagtatttaaggatgatcgctgcaagatccctttattcatgctaatgtcctttatgccggcctctgctgtccccccattcagctgtggtgtgatttccacgctgagaagccgggaggagggcgctgtggacaagagctactgcactttgttggattgcctctgctcctgggggcaggtggggcacattctggagcttgttgacaactggctgcccacagagcatgcccaggccaagagcaacacagcttctaaaggtagggtgcagatccatgacacacgcccagtcaaacctgaattggcattggtctacattgagtatctgctgactcatccaaagaaccgcgagtgcttgctctctgctcctcggaagaaacttaaccatcttttgaaagcccttgaaacgtcaaaggcagatctggagtcacttctgcagacaccgggtgggaagcctcgtggcttcagtgaagcagctgccccgcgagcctttggtctccactgtcgcctgagcatccatcttcagcacaagttctgctcagaaggaaaggtgtatttgtccatgttggaagacactggcttttggttagaaagcaaaattttatcttttattcaagatcaagaagaagactacctgaagcttcatagggtcatttatcagcaaattatccagacctacctgactgtgtgtaaagatgttgttatggtaggccttggtgaccatcagtttcagatgcaactcttacagcggagtcttggaatcatgcaaacagtgaagggatttttttatgtttcattacttcttgacattctgaaagagataactggaagttccttgattcagaaaacagattcagatgaagaagttgcaatgctgttggacacagtccagaaagtatttcagaaaatgttggaatgtattgcacggagcttcaggaagcagccggaagaaggcctgcggctgctttattctgttcagaggcctcttcatgagttcattactgctgttcagtctcggcacacagacacccctgtgcaccggggtgtactttctactctgatcgctgggcctgtggttgagataagtcaccagctacggaaggtttctgacgtagaagagcttacccctccagagcatctttctgatcttccaccattttcaaggtgtttaataggaataataataaagtcttcgaatgtggtcaggtcatttttggatgaattaaaggcatgtgtggcttctaatgatattgaaggcattgtgtgcctcacggctgctgtgcatattatcctggttattaatgcaggtaaacataaaagctcaaaagtgagggaggttgcagccactgttcacagaaaactaaagacattcatggaaattactttggaagaggatagcattgaaagatttctctatgaatcatcatcaagaactctgggagaacttttgaattcataaccaagccaacatctccagacatgtaaaaatagggaaaagtgattcaaattgaaatgcctgtgtattttcctattgtttttaatgttaataacccatataatagggaaagggtgggatttttttgtgggaatgtgggaaggtgggggttatggaggagataactcaaaacttcttcaattttgcctagtgcctgcgtaaataatatatttaatataaaggactccaggtatgaatggtgtagaaatccatgattccaagaaaaaacacttttctagcaaacctggttgtttttaaaatgacttttatatatgtaatattgcttggaaactatgagtaataaagcaatgacaacatcc

SEQ ID NO: 2964 - protein, 734 aa, Homosapiens; identical to SEQ ID NO: 2958

SEQ ID NO: 2965 - DNA, 4135 bp, Homosapiens
agtaccagacctcctgtgcgaagagtaacctgctcttcggactgataactggatggaatggcctttagaaagggagcatcttcagaatctgcagctgggatcagattgttcttttgttgaatcaactcagctctgccgagccagcatcttgctaagggttacaaaataaatgccatttgaacagtgccatctgtcatggaaaaacgtgagacgtttgtacaagccgtgtctaaggagctggttggagagtttttgcaatttgttcaacttgataaagaggcctctgatcctttcagcctaaatgaattactagatgaattatcaaggaaacagaaagaagaattatggcaaaggctgaagaatttattgacagatgtgttgttagaaagcccagtggatgggtggcaggtagtggaagcccagggtgaagacaatatggaaaccgaacatggctcaaaaatgagaaaaagcatagaaataatttatgcaattacatctgtgattcttgcttctgtgtctgtaataaatgaaagtgagaactacgaagccctactggaatgtgttattatattaaatggtattttatatgcattacctgagtctgaacgaaaactacagagttctattcaggatttgtgtgttacctggtgggagaaaggcctgcctgccaaggaagacacaggaaagacagcctttgtcatgttactaaggaggagtctggagactaagacaggtgcagacgtatgtcggctttggcgtatccatcaagctttatattgctttgattatgatttggaggaaagtggagaaattaaagatatgttacttgagtgcttcataaatattaattatatcaagaaagaagagggaagaagatttcttagttgtctcttcaactggaatatcaacttcatcaaaatgatccacgggaccattaaaaaccagttacagggattacaaaagtctttgatggtatacattgcagaaatttatttcagagcttggaaaaaggcttcagggaaaatactggaggcgattgaaaatgattgcatccaggacttcatgttccacgggatacaccttccgaggaggtctccagtgcattccaaagtgcgggaggttctgagttactttcaccatcaaaagaaagttcggcagggagtggaagagatgctttatagattatataagcccatcctttggagaggattaaaggccagaaactctgaagttcgatcaaatgctgcattgttgtttgttgaagcatttcctattagggatccaaaccttcatgctattgaaatggatagtgaaatccagaaacagtttgaagagctctatggatccttggtgtttgtaaaataacttctaagtactgggaaatgatgcccccgaccattcttattgacctcctgaagaaggtgactggggaactggcatttgacacgagctcagctgatgttcgttgttctgtctttaagtgtctgccaatgattttggacaacaaactgagccacccattgttagagcagctccttccagctctcagatacagtctccacgacaattcggagaaagtgagggtagcttttgtggacatgctgttgaagatcaaagctgtgagggctgctaagaatgtatctctaaaagataagcacttaaaaccactctaccattattttataaaaaaagaataactcttcagtaaaacaaaacagaaaacagtaatagttttggaaaatatgtcccatggagcacattctggttcgtctggaaactgattctcgacctgtgtctcggcgcctggtgagcctcatctttaattctttcctgcctgtgaatcagccggaggaggtctggtgcgagcgctgtgtcaccctggtgcagatgaaccacgccgctgccaggaggttctatcagtacgcccacgaacacaccgcctgcaccaacatagcaaagctgattcacgttattcgtcattgcttaaatgcctgtatccagagggcagtgagagagcctccagaggacgaggaggaagaggacggaagggagaaggagaatgtgactgttctggacaaaacactgtcagtaaacgatgttgcatgcatggcaggtttactagaaatcattgtgattctctggaaaagtattgacagaagtatggaaaataataaagaggccaaactttacacgattaacaagtttgcctctgtgcttccagagtatctgaaagtatttaaggatgatcgctgcaagatccctttattcatgctaatgtcctttatgccggcctctgctgtccccccattcagctgtggtgtgatttccacgctgagaagccgggaggagggcgctgtggacaagagctactgcactttgttggattgcctctgctcctgggggcaggtggggcacattctggagcttgttgacaactggctgcccacagagcatgcccaggccaagagcaacacagcttctaaaggtagggtgcagatccatgacacacgcccagtcaaacctgaattggcattggtctacattgagtatctgctgactcatccaaagaaccgcgagtgcttgctctctgctcctcggaagaaacttaaccatcttttgaaagcccttgaaacgtcaaaggcagatctggagtcacttctgcagacaccgggtgggaagcctcgtggcttcagtgaagcagctgccccgcgagcctttggtctccactgtcgcctgagcatccatcttcagcacaagttctgctcagaaggaaaggtgtatttgtccatgttggaagacactggcttttggttagaaagcaaaattttatcttttattcaagatcaagaagaagactacctgaagcttcatagggtcatttatcagcaaattatccagataactagcacatggataggagaagctttgtgaggctggatttactccctttttaaaaatggcctttgttgctaagctgtgtctgtctcttacagacctacctgactgtgtgtaaagatgttgttatggtaggccttggtgaccatcagtttcagatgcaactcttacagcggagtcttggaatcatgcaaacagtgaagggatttttttatgtttcattacttcttgacattctgaaagagataactggaagttccttgattcagaaaacagattcagatgaagaagttgcaatgctgttggacacagtccagaaagtatttcagaaaatgttggaatgtattgcacggagcttcaggaagcagccggaagaaggcctgcggctgctttattctgttcagaggcctcttcatgagttcattactgctgttcagtctcggcacacagacacccctgtgcaccggggtgtactttctactctgatcgctgggcctgtggttgagataagtcaccagctacggaaggtttctgacgtagaagagcttacccctccagagcatctttctgatcttccaccattttcaaggtgtttaataggaataataataaagtcttcgaatgtggtcaggtcatttttggatgaattaaaggcatgtgtggcttctaatgatattgaaggcattgtgtgcctcacggctgctgtgcatattatcctggttattaatgcaggtaaacataaaagctcaaaagtgagggaggttgcagccactgttcacagaaaactaaagacattcatggaaattactttggaagaggatagcattgaaagatttctctatgaatcatcatcaagaactctgggagaacttttgaattcataaccaagccaacatctccagacatgtaaaaatagggaaaagtgattcaaattgaaatgcctgtgtattttcctattgtttttaatgttaataacccatataatagggaaagggtgggatttttttgtgggaatgtgggaaggtgggggttatggaggagataactcaaaacttcttcaattttgcctagtgcctgcgtaaataatatatttaatataaaggactccaggtatgaatggtgtagaaatccatgattccaagaaaaaacacttttctagcaaacctggttgtttttaaaatgacttttatatatgtaatattgcttggaaactatgagtaataaagcaatgacaacatcc

SEQ ID NO: 2966 - protein, 393 aa, Homosapiens
MEHILVRLETDSRPVSRRLVSLIFNSFLPVNQPEEVWCERCVTLVQMNHAAARRFYQYAHEHTACTNIAKLIHVIRHCLNACIQRAVREPPEDEEEEDGREKENVTVLDKTLSVNDVACMAGLLEIIVILWKSIDRSMENNKEAKLYTINKFASVLPEYLKVFKDDRCKIPLFMLMSFMPASAVPPFSCGVISTLRSREEGAVDKSYCTLLDCLCSWGQVGHILELVDNWLPTEHAQAKSNTASKGRVQIHDTRPVKPELALVYIEYLLTHPKNRECLLSAPRKKLNHLLKALETSKADLESLLQTPGGKPRGFSEAAAPRAFGLHCRLSIHLQHKFCSEGKVYLSMLEDTGFWLESKILSFIQDQEEDYLKLHRVIYQQIIQITSTWIGEAL

SEQ ID NO: 2967 - DNA, 3923 bp, Homosapiens
gaatctggtccgagcgcgggaaacggcgggtccccgagcccagtaccagacctcctgtgcgaagagtaacctgctcttcggactgataactggatgggttacaaaataaatgccatttgaacagtgccatctgtcatggaaaaacgtgagacgtttgtacaagccgtgtctaaggagctggttggagagtttttgcaatttgttcaacttgataaagaggcctctgatcctttcagcctaaatgaattactagatgaattatcaaggaaacagaaagaagaattatggcaaaggctgaagaatttattgacagatgtgttgttagaaagcccagtggatgggtggcaggtagtggaagcccagggtgaagacaatatggaaaccgaacatggctcaaaaatgagaaaaagcatagaaataatttatgcaattacatctgtgattcttgcttctgtgtctgtaataaatgaaagtgagaactacgaagccctactggaatgtgttattatattaaatggtattttatatgcattacctgagtctgaacgaaaactacagagttctattcaggatttgtgtgttacctggtgggagaaaggcctgcctgccaaggaagacacaggaaagacagcctttgtcatgttactaaggaggagtctggagactaagacaggtgcagacgtatgtcggctttggcgtatccatcaagctttatattgctttgattatgatttggaggaaagtggagaaattaaagatatgttacttgagtgcttcataaatattaattatatcaagaaagaagagggaagaagatttcttagttgtctcttcaactggaatatcaacttcatcaaaatgatccacgggaccattaaaaaccagttacagggattacaaaagtctttgatggtatacattgcagaaatttatttcagagcttggaaaaaggcttcagggaaaatactggaggcgattgaaaatgattgcatccaggacttcatgttccacgggatacaccttccgaggaggtctccagtgcattccaaagtgcgggaggttctgagttactttcaccatcaaaagaaagttcggcagggagtggaagagatgctttatagattatataagcccatcctttggagaggattaaaggccagaaactctgaagttcgatcaaatgctgcattgttgtttgttgaagcatttcctattagggatccaaaccttcatgctattgaaatggatagtgaaatccagaaacagtttgaagagctctatagccttttagaagatccttacccgatggtccgttccacagggatccttggtgtttgtaaaataacttctaagtactgggaaatgatgcccccgaccattcttattgacctcctgaagaaggtgactggggaactggcatttgacacgagctcagctgatgttcgttgttctgtctttaagtgtctgccaatgattttggacaacaaactgagccacccattgttagagcagctccttccagctctcagatacagtctccacgacaattcggagaaagtgagggtagcttttgtggacatgctgttgaagatcaaagctgtgagggctgctaagttttggaaaatatgtcccatggagcacattctggttcgtctggaaactgattctcgacctgtgtctcggcgcctggtgagcctcatctttaattctttcctgcctgtgaatcagccggaggaggtctggtgcgagcgctgtgtcaccctggtgcagatgaaccacgccgctgccaggaggttctatcagtacgcccacgaacacaccgcctgcaccaacatagcaaagctgattcacgttattcgtcattgcttaaatgcctgtatccagagggcagtgagagagcctccagaggacgaggaggaagaggacggaagggagaaggagaatgtgactgttctggacaaaacactgtcagtaaacgatgttgcatgcatggcaggtttactagaaatcattgtgattctctggaaaagtattgacagaagtatggaaaataataaagaggccaaactttacacgattaacaagtttgcctctgtgcttccagagtatctgaaagtatttaaggatgatcgctgcaagatccctttattcatgctaatgtcctttatgccggcctctgctgtccccccattcagctgtggtgtgatttccacgctgagaagccgggaggagggcgctgtggacaagagctactgcactttgttggattgcctctgctcctgggggcaggtggggcacattctggagcttgttgacaactggctgcccacagagcatgcccaggccaagagcaacacagcttctaaaggtagggtgcagatccatgacacacgcccagtcaaacctgaattggcattggtctacattgagtatctgctgactcatccaaagaaccgcgagtgcttgctctctgctcctcggaagaaacttaaccatcttttgaaagcccttgaaacgtcaaaggcagatctggagtcacttctgcagacaccgggtgggaagcctcgtggcttcagtgaagcagctgccccgcgagcctttggtctccactgtcgcctgagcatccatcttcagcacaagttctgctcagaaggaaaggtgtatttgtccatgttggaagacactggcttttggttagaaagcaaaattttatcttttattcaagatcaagaagaagactacctgaagcttcatagggtcatttatcagcaaattatccagacctacctgactgtgtgtaaagatgttgttatggtaggccttggtgaccatcagtttcagatgcaactcttacagcggagtcttggaatcatgcaaacagtgaagggatttttttatgtttcattacttcttgacattctgaaagagataactggaagttccttgattcagaaaacagattcagatgaagaagttgcaatgctgttggacacagtccagaaagtatttcagaaaatgttggaatgtattgcacggagcttcaggaagcagccggaagaaggcctgcggctgctttattctgttcagaggcctcttcatgagttcattactgctgttcagtctcggcacacagacacccctgtgcaccggggtgtactttctactctgatcgctgggcctgtggttgagataagtcaccagctacggaaggtttctgacgtagaagagcttacccctccagagcatctttctgatcttccaccattttcaaggtgtttaataggaataataataaagtcttcgaatgtggtcaggtcatttttggatgaattaaaggcatgtgtggcttctaatgatattgaaggcattgtgtgcctcacggctgctgtgcatattatcctggttattaatgcaggtaaacataaaagctcaaaagtgagggaggttgcagccactgttcacagaaaactaaagacattcatggaaattactttggaagaggatagcattgaaagatttctctatgaatcatcatcaagaactctgggagaacttttgaattcataaccaagccaacatctccagacatgtaaaaatagggaaaagtgattcaaattgaaatgcctgtgtattttcctattgtttttaatgttaataacccatataatagggaaagggtgggatttttttgtgggaatgtgggaaggtgggggttatggaggagataactcaaaacttcttcaattttgcctagtgcctgcgtaaataatatatttaatataaaggactccaggtatgaatggtgtagaaatccatgattccaagaaaaaacacttttctagcaaacctggttgtttttaaaatgacttttatatatgtaatattgcttggaaactatgagtaataaagcaatgacaacatcc

SEQ ID NO: 2968 - protein, 1143 aa, Homosapiens; identical to SEQ ID NO: 2960

SEQ ID NO: 2969 - DNA, 3914 bp, Homosapiens
gaccgggagggcggggcccgtctggggcgccggcgggtgcgtttgaatctggtccgagcgcgggaaacggcgggtccccgagcccagggttacaaaataaatgccatttgaacagtgccatctgtcatggaaaaacgtgagacgtttgtacaagccgtgtctaaggagctggttggagagtttttgcaatttgttcaacttgataaagaggcctctgatcctttcagcctaaatgaattactagatgaattatcaaggaaacagaaagaagaattatggcaaaggctgaagaatttattgacagatgtgttgttagaaagcccagtggatgggtggcaggtagtggaagcccagggtgaagacaatatggaaaccgaacatggctcaaaaatgagaaaaagcatagaaataatttatgcaattacatctgtgattcttgcttctgtgtctgtaataaatgaaagtgagaactacgaagccctactggaatgtgttattatattaaatggtattttatatgcattacctgagtctgaacgaaaactacagagttctattcaggatttgtgtgttacctggtgggagaaaggcctgcctgccaaggaagacacaggaaagacagcctttgtcatgttactaaggaggagtctggagactaagacaggtgcagacgtatgtcggctttggcgtatccatcaagctttatattgctttgattatgatttggaggaaagtggagaaattaaagatatgttacttgagtgcttcataaatattaattatatcaagaaagaagagggaagaagatttcttagttgtctcttcaactggaatatcaacttcatcaaaatgatccacgggaccattaaaaaccagttacagggattacaaaagtctttgatggtatacattgcagaaatttatttcagagcttggaaaaaggcttcagggaaaatactggaggcgattgaaaatgattgcatccaggacttcatgttccacgggatacaccttccgaggaggtctccagtgcattccaaagtgcgggaggttctgagttactttcaccatcaaaagaaagttcggcagggagtggaagagatgctttatagattatataagcccatcctttggagaggattaaaggccagaaactctgaagttcgatcaaatgctgcattgttgtttgttgaagcatttcctattagggatccaaaccttcatgctattgaaatggatagtgaaatccagaaacagtttgaagagctctatagccttttagaagatccttacccgatggtccgttccacagggatccttggtgtttgtaaaataacttctaagtactgggaaatgatgcccccgaccattcttattgacctcctgaagaaggtgactggggaactggcatttgacacgagctcagctgatgttcgttgttctgtctttaagtgtctgccaatgattttggacaacaaactgagccacccattgttagagcagctccttccagctctcagatacagtctccacgacaattcggagaaagtgagggtagcttttgtggacatgctgttgaagatcaaagctgtgagggctgctaagttttggaaaatatgtcccatggagcacattctggttcgtctggaaactgattctcgacctgtgtctcggcgcctggtgagcctcatctttaattctttcctgcctgtgaatcagccggaggaggtctggtgcgagcgctgtgtcaccctggtgcagatgaaccacgccgctgccaggaggttctatcagtacgcccacgaacacaccgcctgcaccaacatagcaaagctgattcacgttattcgtcattgcttaaatgcctgtatccagagggcagtgagagagcctccagaggacgaggaggaagaggacggaagggagaaggagaatgtgactgttctggacaaaacactgtcagtaaacgatgttgcatgcatggcaggtttactagaaatcattgtgattctctggaaaagtattgacagaagtatggaaaataataaagaggccaaactttacacgattaacaagtttgcctctgtgcttccagagtatctgaaagtatttaaggatgatcgctgcaagatccctttattcatgctaatgtcctttatgccggcctctgctgtccccccattcagctgtggtgtgatttccacgctgagaagccgggaggagggcgctgtggacaagagctactgcactttgttggattgcctctgctcctgggggcaggtggggcacattctggagcttgttgacaactggctgcccacagagcatgcccaggccaagagcaacacagcttctaaaggtagggtgcagatccatgacacacgcccagtcaaacctgaattggcattggtctacattgagtatctgctgactcatccaaagaaccgcgagtgcttgctctctgctcctcggaagaaacttaaccatcttttgaaagcccttgaaacgtcaaaggcagatctggagtcacttctgcagacaccgggtgggaagcctcgtggcttcagtgaagcagctgccccgcgagcctttggtctccactgtcgcctgagcatccatcttcagcacaagttctgctcagaaggaaaggtgtatttgtccatgttggaagacactggcttttggttagaaagcaaaattttatcttttattcaagatcaagaagaagactacctgaagcttcatagggtcatttatcagcaaattatccagacctacctgactgtgtgtaaagatgttgttatggtaggccttggtgaccatcagtttcagatgcaactcttacagcggagtcttggaatcatgcaaacagtgaagggatttttttatgtttcattacttcttgacattctgaaagagataactggaagttccttgattcagaaaacagattcagatgaagaagttgcaatgctgttggacacagtccagaaagtatttcagaaaatgttggaatgtattgcacggagcttcaggaagcagccggaagaaggcctgcggctgctttattctgttcagaggcctcttcatgagttcattactgctgttcagtctcggcacacagacacccctgtgcaccggggtgtactttctactctgatcgctgggcctgtggttgagataagtcaccagctacggaaggtttctgacgtagaagagcttacccctccagagcatctttctgatcttccaccattttcaaggtgtttaataggaataataataaagtcttcgaatgtggtcaggtcatttttggatgaattaaaggcatgtgtggcttctaatgatattgaaggcattgtgtgcctcacggctgctgtgcatattatcctggttattaatgcaggtaaacataaaagctcaaaagtgagggaggttgcagccactgttcacagaaaactaaagacattcatggaaattactttggaagaggatagcattgaaagatttctctatgaatcatcatcaagaactctgggagaacttttgaattcataaccaagccaacatctccagacatgtaaaaatagggaaaagtgattcaaattgaaatgcctgtgtattttcctattgtttttaatgttaataacccatataatagggaaagggtgggatttttttgtgggaatgtgggaaggtgggggttatggaggagataactcaaaacttcttcaattttgcctagtgcctgcgtaaataatatatttaatataaaggactccaggtatgaatggtgtagaaatccatgattccaagaaaaaacacttttctagcaaacctggttgtttttaaaatgacttttatatatgtaatattgcttggaaactatgagtaataaagcaatgacaacatcc

SEQ ID NO: 2970 - protein, 1143 aa, Homosapiens; identical to SEQ ID NO: 2960

SEQ ID NO: 2971 - DNA, 5265 bp, Homosapiens
gaccgggagggcggggcccgtctggggcgccggcgggtgcgtttgaatctggtccgagcgcgggaaacggcgggtccccgagcccagggttacaaaataaatgccatttgaacagtgccatctgtcatggaaaaacgtgagacgtttgtacaagccgtgtctaaggagctggttggagagtttttgcaatttgttcaacttgataaagaggcctctgatcctttcagcctaaatgaattactagatgaattatcaaggaaacagaaagaagaattatggcaaaggctgaagaatttattgacagatgtgttgttagaaagcccagtggatgggtggcaggtagtggaagcccagggtgaagacaatatggaaaccgaacatggctcaaaaatgagaaaaagcatagaaataatttatgcaattacatctgtgattcttgcttctgtgtctgtaataaatgaaagtgagaactacgaagccctactggaatgtgttattatattaaatggtattttatatgcattacctgagtctgaacgaaaactacagagttctattcaggatttgtgtgttacctggtgggagaaaggcctgcctgccaaggaagacacaggaaagacagcctttgtcatgttactaaggaggagtctggagactaagacaggtgcagacgtatgtcggctttggcgtatccatcaagctttatattgctttgattatgatttggaggaaagtggagaaattaaagatatgttacttgagtgcttcataaatattaattatatcaagaaagaagagggaagaagatttcttagttgtctcttcaactggaatatcaacttcatcaaaatgatccacgggaccattaaaaaccagttacagggattacaaaagtctttgatggtatacattgcagaaatttatttcagagcttggaaaaaggcttcagggaaaatactggaggcgattgaaaatgattgcatccaggacttcatgttccacgggatacaccttccgaggaggtctccagtgcattccaaagtgcgggaggttctgagttactttcaccatcaaaagaaagttcggcagggagtggaagagatgctttatagattatataagcccatcctttggagaggattaaaggccagaaactctgaagttcgatcaaatgctgcattgttgtttgttgaagcatttcctattagggatccaaaccttcatgctattgaaatggatagtgaaatccagaaacagtttgaagagctctatagccttttagaagatccttacccgatggtccgttccacagggatccttggtgtttgtaaaataacttctaagtactgggaaatgatgcccccgaccattcttattgacctcctgaagaaggtgactggggaactggcatttgacacgagctcagctgatgttcgttgttctgtctttaagtgtctgccaatgattttggacaacaaactgagccacccattgttagagcagctccttccagctctcagatacagtctccacgacaattcggagaaagtgagggtagcttttgtggacatgctgttgaagatcaaagctgtgagggctgctaagttttggaaaatatgtcccatggagcacattctggttcgtctggaaactgattctcgacctgtgtctcggcgcctggtgagcctcatctttaattctttcctgcctgtgaatcagccggaggaggtctggtgcgagcgctgtgtcaccctggtgcagatgaaccacgccgctgccaggaggttctatcagtacgcccacgaacacaccgcctgcaccaacatagcaaagctgattcacgttattcgtcattgcttaaatgcctgtatccagagggcagtgagagagcctccagaggacgaggaggaagaggacggaagggagaaggagaatgtgactgttctggacaaaacactgtcagtaaacgatgttgcatgcatggcaggtttactagaaatcattgtgattctctggaaaagtattgacagaagtatggaaaataataaagaggccaaactttacacgattaacaagtttgcctctgtgcttccagagtatctgaaagtatttaaggatgatcgctgcaagatccctttattcatgctaatgtcctttatgccggcctctgctgtccccccattcagctgtggtgtgatttccacgctgagaagccgggaggagggcgctgtggacaagagctactgcactttgttggattgcctctgctcctgggggcaggtggggcacattctggagcttgttgacaactggctgcccacagagcatgcccaggccaagagcaacacagcttctaaaggtagggtgcagatccatgacacacgcccagtcaaacctgaattggcattggtctacattgagtatctgctgactcatccaaagaaccgcgagtgcttgctctctgctcctcggaagaaacttaaccatcttttgaaagcccttgaaacgtcaaaggcagatctggagtcacttctgcagacaccgggtgggaagcctcgtggcttcagtgaagcagctgccccgcgagcctttggtctccactgtcgcctgagcatccatcttcagcacaagttctgctcagaaggaaaggtgtatttgtccatgttggaagacactggcttttggttagaaagcaaaattttatcttttattcaagatcaagaagaagactacctgaagcttcatagggtcatttatcagcaaattatccagacctacctgactgtgtgtaaagatgttgttatggtaggccttggtgaccatcagtttcagatgcaactcttacagcggagtcttggaatcatgcaaacagtgaagggatttttttatgtttcattacttcttgacattctgaaagagataactggaagttccttgattcagaaaacagattcagatgaagaagttgcaatgctgttggacacagtccagaaagtatttcagaaaatgttggaatgtattgcacggagcttcaggaagcagccggaagaaggcctgcggctgctttattctgttcagaggcctcttcatgagttcattactgctgttcagtctcggcacacagacacccctgtgcaccggggtgtactttctactctgatcgctgggcctgtggttgagataagtcaccagctacggaaggtttctgacgtagaagagcttacccctccagagcatctttctgatcttccaccattttcaaggtgtttaataggaataataataaagtcttcgaatgtggtcaggtcatttttggatgaattaaaggcatgtgtggcttctaatgatattgaaggcattgtgtgcctcacggctgctgtgcatattatcctggttattaatgcaggtaaacataaaagctcaaaagtgagggaggttgcagccactgttcacagaaaactaaagacattcatggaaattactttggaagaggatagcattgaaagatatgaggacttgctgtgttgcccaggctgggctctaactcctggactcctggactcaatctatccttctgcctcagtcccaattggctaggactgcaggcacacaccaccagacccagctaatgtaatttctatctatatgtgtctttatatttaaagtggtttttttatagacagtatataaatgggtcatgttttttgatcttctctgacaatctgtcttaaaattggtgcatatgtaccatattcaaagtgattattgatatagttggattaatatccaccatatttgttattgtcttctatttgttccccttgttatttgttcctatttctgtcttccactccttttctgtcttttgtggttttaactgaacattttatgatgccgttttctttcctagcatatcagttatacttttttttttttaaacctttcttagtggtttctttagagttggaatttttatttgtttttatctttcttagtggttgctttagagttggagttttcatttataactaatccacgtttgctttcagatgacactataccactttgcaggtagggtggtatataataacaaaataatcctaatccttgcctctcgttccttgtatcattgctgtcattcattttgctaaggtataagcagacataagcatacataattgaatatattgttgctattattattttgaacaaactacatcttaggtcatttaagaataagaaaaataaaagtttttatttaccttcacttactccttctttgatgcttctcctttgtttgtgttgatccaaattctgacctatattcttttccttccctccagagaacttcttttaatgcttctttcaaggcatgtctactggcaactaattctcttaattttggtttgtcagagagtcttttacttctactttatttctttgcagggataatgttatgtagtttataattctagttgatgaatttttttctctctgtactttatttaatttattattattattttttgagacagagtcttgctctgttgcctagggtggaacgcagtggtgtgatctcagttcactgcaacctctgcctcctaagttcaaacgattcttgtacctcagcctgctgagtagctggtatacaggcacatcgccgccacacccagctcatttttgtattagtggagacagggcttcaccatgttgcccaggctggtctcgaattcttgatctcaagtgatctactcgcctcagcttctcaaattgctgggattactccccgtgcccggccactctctgtactttaaacatttcgctatactctcttcttggctcgtgtagtatctgagaaataggatataattcttttttgctcctcagtagataaggtgtatttttccctatctggtttctttcaatactttttctttgtttgatttttctgtaggttgaatatgatatgcctaggtgtagttttcttttcttttttttttttttttttggcatttattctattcagtattctatgagcttcctggataaattctcagttattattgtctgaatatttcttctgttcctttctctcttctgaaattcttattatacatgttaacaccttttacagttgtctcacaggtcttggatatttcattctatcaaaacagctgcatttttgaattctgtttgctaatattttatttgagaatgtttgcattaggtttgaaataagattaaatggttgttggttgttttgtt

SEQ ID NO: 2972 - protein, 1156 aa, Homosapiens; identical to SEQ ID NO: 372

SEQ ID NO: 2973 - DNA, 596 bp, Homosapiens
gaattcaaaggaatcctgaataccctacgtccaggtttgccagtttttaccacttgccacattttctttatcatcctttgtatttacatttttttgaatcacttgagtcagttgtaggcattgtgcctctttatctctaaacatttcagttcgtatttttctaaaagatattctgttatataatcacattaaaatcctcaaaatcaggaaatttaacattgtggataatcctgttaaataaccctctgcagcctatgtcctctcctcttgaatctggattgggcttgtgctgctttgacggacggaatattgaggaagtggccttcagaaagtttggcagcttctacttcctctcggagcccgtggttgtcatgtaagaagtgcaggatcaccctctgctggagagagagaccacacacaaaggctggaggatgagactgcagagggagacctcattagtgggcaccaaagtgccagacatccaacacccagctgccaccttaagcacagaaagaggcctctgatcctttcagcctaaatgaattactagatgaattatcaaggaaacagaaagaagaattatggcaaaggctgaa

SEQ ID NO: 2974 - protein, 30 aa, Homosapiens
MRLQRETSLVGTKVPDIQHPAATLSTERGL

SEQ ID NO: 2975 - DNA, 339 bp, Homosapiens; identical to SEQ ID NO: 736

SEQ ID NO: 2976 - protein, 112 aa, Homosapiens [sequence omitted]

SEQ ID NO: 2977 - DNA, 1552 bp, Homosapiens
cgtaggctgtgtgtgtctgtaaagaaagaatgcacatatgtagacgattaagtgtatattataagctatatgctgaaaatggcttccatagccatgagaacatcttaaaactatgtgtaaatatattaaggaaagtatagctttgtaatttaaattggagcttttagcttgtttcatggaactatacaacttgtgggtaactcacatgaccaaacaaaccaaagtgcctgtgacggggcgggtggcgtctacccaccctcccttctagcagattcttattttgtttgaatttataaacaaggctggtggctgtctacccaccctcccttctagcagattttgattttgtttcaatttataacttacactttgaaccatgggtttacttataatggagtctgtagcttcacagcatatttcatgtaatcataaagaccagtatattccctcctgctgaatgacatgcgactgtaaagcctctttataaaccatttccaatgttagtatataggattatttgggaagcgtatcaatacctttatagacaaatacgaacatgtatgcacacaaaacatttaactatggtatttatggaagacaggtaacaacattaaatctagttgctttcccttagtattagatttgttgagggttttttaaaaatcaggtctgttgaaagtcttctgtcataatctataaagcagcagcactcatggaaattgtagcatgccagtaatttttaccaacatcccatacatctgagttctgcagtccagtgtgtaatccgctccatgtgtattttgcttaatggaatgctttatttaagcacttaggcagagtagacacaattaaaggtacaaagcccagaggaagtggtagagcagcaccgtgcctgccctgaggcagtggagtcagtagcgctgtccccagggccttgagtgcctggaggtgcttggcctccagtagctgcctccattctcttttaaaaaaagggggtgattctgaggcactgaagtgcctcccagatgtggaggagtgaagccaccatcgaggccacactcagcactccaggatcccagcgatgtcagacactcttgagttgtcaaaacgttaattttcagttttaaataatcagtttatctaagaaaagggaattttaacttttctaccttgaccaagatcgcaccactgcactccagcctgggcaacagagtgagactccgtctcaaaaaataaataaaatagaagcagccttgtaactgtatttaccatgataatatattctgcacggtaagaattccttttacagacattctttatcaagaggtcggcccttctttttcaggcacataagccaaatgcaggcctgtgtgtagctgtgtgttttttctgtggttgccgcatttattccacctccagctggaccccccactgcaaatagagaacagcggtgggggatgggggttaaaaagtagagaacctcctttctgttcaactaatttcacgtgacagtgcatgtatttattcaataaaacctttatgttagctcagt

SEQ ID NO: 2978 - protein, 36 aa, Homosapiens
MHICRRLSVYYKLYAENGFHSHENILKLCVNILRKV

SEQ ID NO: 2979 - DNA, 4382 bp, Homosapiens
gaaatattgaaagtaaaactggcaaacatatggggaaatactaaaactcatgaatcaaagaaatgcaaattaaaataaagagccagctttttaagaaaattacaaatgtcttctattgagggggcaatgggaacagcctccttgccccggcagagactggaggtgtcgcacacctctccagagggagctgcgacaaccctgagccactcatctgaaggctccttggcctttcttctagaaacctgacttttgttttggtgatacaaagtgtggggagaccaggaacataaagatgttcaccgcagcgttatttcctaaaaccagaaaaaacctttaagctgtcacgtgagtggagtgatttacaaggtgtggactctgctcaagccagcccagggaccagctcatgtgctcacacaactgggagaccccaggccctgcgggaaccccctgctcctgcactcatgtcaggttgttggggtgatcttgctggatagcaggggttctggactttcttcctccctctggggacgccgggtggaaaccccttatgtagaatacgggctttggtcttgtgtcgaggaaatgcgactctgggctcttgatgtaaaaacattgtcccacaattgtgtagaaatacatggaaacggaagagactagaggaatacgcagaagtctcctccagcctcctggcctccccaggccacatctcagtcaaggagccgacccccagcatcgcctcggacatctcgctgcccatcgccacccaggagctgcggcaaaggctgaggcagctggaaaacgggacgaccctgggacagtctccactggggcagatccagctgaccatccggcacagctcgcagagaaacaagcttatcgtggtcgtgcatgcctgcagacaagaggcggtcaggaaggaggaaaacacacgtgtcaaagaaaacattaaatccagtgtttgatcaaagctttgatttcagtgtttcgttaccagaagtgcagaggagaacgctcgacgttgccgtgaagaacagtggcggcttcctgtccaaagacaaagggctccttggcaaagtattggttgctctggcatctgaagaacttgccaaaggctggacccagtggtatgacctcacggaagatgggacgaggcctcaggcgatgacatagccgcagcaggcaggaggcgtcctcttcagcgtagctctccacctctacccggaacacaccctctcacagacgtaccaatgttatttttataatttcatggatttagttatacataccttaatagttttataaaattgttgacatttcaggcaaatttggccaatattatcattgaattttctgtgttggatttcctctaggatttcgccagttcctacaacgtgcagtagggcggcggtagctcttgtgtctgtggactctgctcagctgtgtccgtaggagtcggatgtgtctgtgctttattatggccttgtttatatatcactgaggtatactatgccatgtaaatagactattttttataatctttacatgctggtttaaattcagaaggaaatagatcaaggaaatatatatattttcttctaaaacttattaaattcgtgtgacaaataatcattttcatcttggcagcaaaaagttctcagtgacctattttgtggtgtttctttttgaaaagaaaagctgaaatattattaaatgctagtatgtttctgcccattatgaaagatgaaataaagtattcaaaatattaacattttcataaatataaggatgtattattgagaagtaagttgaagggcttataaggaaaaatgttttataactgagtaatatattaagagaattgtcatggttcataaatcacattatgctaatctgaaatttcttacataaaaatgaagtgtcttatgtttattttaattgctgttgtaacttactcatgaaacagtatacagacaccttgtacttttcctcaactgtaagagcagactttcaatgttagcaattaagctgttgtcaaacaatcagtcatgagctttgttaattttcaatgttttcccagcctataaaaaaaggaaggtacacgttgtccttttaaaggttgtgaggtagattggagtgagtagacaggatattgcattaaaaattgaaagctcgatctcattattgtcaggaacccccagtgtgacctcacacataggatgtgggacctttgagccgatgtgcactggccaccaccagggttgggggcgccacagctgcgagcccggcccctgctgttctcagcagccacttcccaggctgcctcactttatgccatgactgaccttaatattgggatattgttatgcaatttttatcctgtttagactgttaaaagcaggtttctgtacttaagagtcccccagacctcctgtgaggtgaggctctgttgcagtgtcgtaggctgtgtgtgtctgtaaagaaagaatgcacatatgtagacgattaagtgtatattataagctatatgctgaaaatggcttccatagccatgagaacatcttaaaactatgtgtaaatatattaaggaaagtatagctttgtaatttaaattggagcttttagcttgtttcatggaactatacaacttgtgggtaactcacatgaccaaacaaaccaaagtgcctgtgacggggcgggtggcgtctacccaccctcccttctagcagattcttattttgtttgaatttataaacaaggctggtggctgtctacccaccctcccttctagcagattttgattttgtttcaatttataacttacactttgaaccatgggtttacttataatggagtctgtagcttcacagcatatttcatgtaatcataaagaccagtatattccctcctgctgaatgacatgcgactgtaaagcctctttataaaccatttccaatgttagtatataggattatttgggaagcgtatcaatacctttatagacaaatacgaacatgtatgcacacaaaacatttaactatggtatttatggaagacaggtaacaacattaaatctagttgctttcccttagtattagatttgttgagggttttttaaaaatcaggtctgttgaaagtcttctgtcataatctataaagcagcagcactcatggaaattgtagcatgccagtaatttttaccaacatcccatacatctgagttctgcagtccagtgtgtaatccgctccatgtgtattttgcttaatggaatgctttatttaagcacttaggcagagtagacacaattaaaggtacaaagcccagaggaagtggtagagcagcaccgtgcctgccctgaggcagtggagtcagtagcgctgtccccagggccttgagtgcctggaggtgcttggcctccagtagctgcctccattctcttttaaaaaaagggggtgattctgaggcactgaagtgcctcccagatgtggaggagtgaagccaccatcgaggccacactcagcactccaggatcccagcgatgtcagacactcttgagttgtcaaaacgttaattttcagttttaaataatcagtttatctaagaaaagggaattttaacttttctaccttgagccaagccaatgaagggaaaattaattaacttagtaaatttgaagtgcagctctgttagctcgtacatgtgggttcttatcctgatcctgtgccttaaagtaggaaggtgtttccaagttcagattaaaatagaagcagctggccgggtgcggtggctcacgcctgtaatcccagcactttgggaggccgaggcgggcggatgacctgaggtcaggagttcaagaccagcctggccaacatggagaaaccccatctttactaaaaatacaaaaattagccgggcgtggtggtggagcgcacgcctgtagtcccagctactcgggaggctgaggcaggagaattgcttgaacccaggaggcggaggttgcagtgagccaagatcgcaccactgcactccagcctgggcaacagagtgagactccgtctcaaaaaataaataaaatagaagcagccttgtaactgtatttaccatgataatatattctgcacggtaagaattccttttacagacattctttatcaagaggtcggcccttctttttcaggcacataagccaaatgcaggcctgtgtgtagctgtgtgttttttctgtggttgccgcatttattccacctccagctggaccccccactgcaaatagagaacagcggtgggggatgggggttaaaaagtagagaacctcctttctgttcaactaatttcacgtgacagtgcatgtatttattcaataaaacctttatgttagctcagt

SEQ ID NO: 2980 - protein, 103 aa, Homosapiens
METEETRGIRRSLLQPPGLPRPHLSQGADPQHRLGHLAAHRHPGAAAKAEAAGKRDDPGTVSTGADPADHPAQLAEKQAYRGRACLQTRGGQEGGKHTCQRKH

SEQ ID NO: 2981 - DNA, 5535 bp, Homosapiens
acattctgttttatacaaaaggatttgtgttttgtctagctggtttttccttcataaagtgcacttctgtattctcaaaataatctatgcttactggaccttggattttaaaaataatttttaaagttccacaaacattgtcatagttatttcatttaaaactgcttttgtgattatagtttagtttgaaaagaaatatgcaatcaaccttttaggttttcctgagtagttatgtgttaatttctctgaccatttttgtatagcctgagaaaccttcagagttcttactctatttgattaaattattttatattacagccatctaacaggaataattcctgttgcagagataatgcagaaggttattatacaggaaaaagaggctgggcatggtggctcacacctgtaatctcagtactttgggaggctgagatgagaggatcacttgaggccaagagtttgagaacagcctgggcaacatagtgagatccacctctgttttttaaaaaatttttaaatgccttgctgtaaattttctttaatgtggattttgaatggagaaggcttaaaaggtacttagaaatgtattgtctccataaatgtcatgaatggaaactgtatacatcgttatgagtgtgtattgccaccattttcccaggggttaaaagacaggtagactattgcctattaacccagggttctccgaaccgattggtcattattgtcattactgcttttctcatttgtcattattacatcatttctttctgtgctcattgtaatctataatgacgaaatagcagatcttttgcttgttaacagtgttttgtgtctttgttaggagatttcataccatgttaatcattatggaaacactacttaagagaatatggctgaaatatgtttgggtttttaaaaatatctttcttacagactaatattgtctgtggacctttctacatttgtttgtttgtttttgaaacagttttgtcacccaggctggagtgcagtggcgcgatatcagctcactgcagccgcctcctcccaggttcaagcgattctcatgcctcagcctcttgagtggctgggactacaggtgcgcgccaccatgcccaactaattttttgtatttttagtagagatgaggtttcaccatgttggccaggctggtctcgaacccctggcctcaggtgatctgagcctcccaaagtgctgaaattacaggcgtgagccaccccacctggcccctttctacattttctaagttcctatctctgaggacaaagggtcaggagcgtagacaacgtagaaaggttctgcagacatgatcctagttatgccagtgtttccaccctgtgttttgcaggtcagagacgagcagcaccagtgttccctggggaacctgaaggtccccctcagccagctgctcaccagtgaggacatgactgtgagccagcgcttccagctcagtaactcgggtccaaacagcaccatcaagatgaagattgccctgcgggtgctccatctcgaaaagcgagaaaggcctccagaccaccaacactcagctcaagtcaaacgtccctctgtgtccaaagaggggaggaaaacatccatcaaatctcatatgtctgggtctccaggccctggtggcagcaacacagctccatccacaccagtcattgggggcagtgataagcctggtatggaagaaaaggcccagccccctgaggccggccctcaggggctgcacgacctgggcagaagctcctccagcctcctggcctccccaggccacatctcagtcaaggagccgacccccagcatcgcctcggacatctcgctgcccatcgccacccaggagctgcggcaaaggctgaggcagctggaaaacgggacgaccctgggacagtctccactggggcagatccagctgaccatccggcacagctcgcagagaaacaagcttatcgtggtcgtgcatgcctgcagaaacctcattgccttctctgaagacggctctgacccctatgtccgcatgtatttattaccagacaagaggcggtcaggaaggaggaaaacacacgtgtcaaagaaaacattaaatccagtgtttgatcaaagctttgatttcagtgtttcgttaccagaagtgcagaggagaacgctcgacgttgccgtgaagaacagtggcggcttcctgtccaaagacaaagggctccttggcaaagtattggttgctctggcatctgaagaacttgccaaaggctggacccagtggtatgacctcacggaagatgggacgaggcctcaggcgatgacatagccgcagcaggcaggaggcgtcctcttcagcgtagctctccacctctacccggaacacaccctctcacagacgtaccaatgttatttttataatttcatggatttagttatacataccttaatagttttataaaattgttgacatttcaggcaaatttggccaatattatcattgaattttctgtgttggatttcctctaggatttcgccagttcctacaacgtgcagtagggcggcggtagctcttgtgtctgtggactctgctcagctgtgtccgtaggagtcggatgtgtctgtgctttattatggccttgtttatatatcactgaggtatactatgccatgtaaatagactattttttataatctttacatgctggtttaaattcagaaggaaatagatcaaggaaatatatatattttcttctaaaacttattaaattcgtgtgacaaataatcattttcatcttggcagcaaaaagttctcagtgacctattttgtggtgtttctttttgaaaagaaaagctgaaatattattaaatgctagtatgtttctgcccattatgaaagatgaaataaagtattcaaaatattaacattttcataaatataaggatgtattattgagaagtaagttgaagggcttataaggaaaaatgttttataactgagtaatatattaagagaattgtcatggttcataaatcacattatgctaatctgaaatttcttacataaaaatgaagtgtcttatgtttattttaattgctgttgtaacttactcatgaaacagtatacagacaccttgtacttttcctcaactgtaagagcagactttcaatgttagcaattaagctgttgtcaaacaatcagtcatgagctttgttaattttcaatgttttcccagcctataaaaaaaggaaggtacacgttgtccttttaaaggttgtgaggtagattggagtgagtagacaggatattgcattaaaaattgaaagctcgatctcattattgtcaggaacccccagtgtgacctcacacataggatgtgggacctttgagccgatgtgcactggccaccaccagggttgggggcgccacagctgcgagcccggcccctgctgttctcagcagccacttcccaggctgcctcactttatgccatgactgaccttaatattgggatattgttatgcaatttttatcctgtttagactgttaaaagcaggtttctgtacttaagagtcccccagacctcctgtgaggtgaggctctgttgcagtgtcgtaggctgtgtgtgtctgtaaagaaagaatgcacatatgtagacgattaagtgtatattataagctatatgctgaaaatggcttccatagccatgagaacatcttaaaactatgtgtaaatatattaaggaaagtatagctttgtaatttaaattggagcttttagcttgtttcatggaactatacaacttgtgggtaactcacatgaccaaacaaaccaaagtgcctgtgacggggcgggtggcgtctacccaccctcccttctagcagattcttattttgtttgaatttataaacaaggctggtggctgtctacccaccctcccttctagcagattttgattttgtttcaatttataacttacactttgaaccatgggtttacttataatggagtctgtagcttcacagcatatttcatgtaatcataaagaccagtatattccctcctgctgaatgacatgcgactgtaaagcctctttataaaccatttccaatgttagtatataggattatttgggaagcgtatcaatacctttatagacaaatacgaacatgtatgcacacaaaacatttaactatggtatttatggaagacaggtaacaacattaaatctagttgctttcccttagtattagatttgttgagggttttttaaaaatcaggtctgttgaaagtcttctgtcataatctataaagcagcagcactcatggaaattgtagcatgccagtaatttttaccaacatcccatacatctgagttctgcagtccagtgtgtaatccgctccatgtgtattttgcttaatggaatgctttatttaagcacttaggcagagtagacacaattaaaggtacaaagcccagaggaagtggtagagcagcaccgtgcctgccctgaggcagtggagtcagtagcgctgtccccagggccttgagtgcctggaggtgcttggcctccagtagctgcctccattctcttttaaaaaaagggggtgattctgaggcactgaagtgcctcccagatgtggaggagtgaagccaccatcgaggccacactcagcactccaggatcccagcgatgtcagacactcttgagttgtcaaaacgttaattttcagttttaaataatcagtttatctaagaaaagggaattttaacttttctaccttgagccaagccaatgaagggaaaattaattaacttagtaaatttgaagtgcagctctgttagctcgtacatgtgggttcttatcctgatcctgtgccttaaagtaggaaggtgtttccaagttcagattaaaatagaagcagctggccgggtgcggtggctcacgcctgtaatcccagcactttgggaggccgaggcgggcggatgacctgaggtcaggagttcaagaccagcctggccaacatggagaaaccccatctttactaaaaatacaaaaattagccgggcgtggtggtggagcgcacgcctgtagtcccagctactcgggaggctgaggcaggagaattgcttgaacccaggaggcggaggttgcagtgagccaagatcgcaccactgcactccagcctgggcaacagagtgagactccgtctcaaaaaataaataaaatagaagcagccttgtaactgtatttaccatgataatatattctgcacggtaagaattccttttacagacattctttatcaagaggtcggcccttctttttcaggcacataagccaaatgcaggcctgtgtgtagctgtgtgttttttctgtggttgccgcatttattccacctccagctggaccccccactgcaaatagagaacagcggtgggggatgggggttaaaaagtagagaacctcctttctgttcaactaatttcacgtgacagtgcatgtatttattcaataaaacctttatgttagctcagt

SEQ ID NO: 2982 - protein, 332 aa, Homosapiens [sequence omitted]

SEQ ID NO: 2983 - DNA, 652 bp, Homosapiens
taataaactgccaaattgttttccaaagagattgtgccgtgtcacattcccaccgaagtgcatgtgagtcgagcgggccccacatctcgccagtgctgtggtgttagtgggtagataggagtattaccgggtggtttcagcgtcattactaatgacgttgagcacctttttatgcttttttacggtctttgtatcttctatggtgaaatgtctattcagtttttttgcctgtcttttttatttggttatttgtcttcttaatactgagtttgtaagacgtttggggttttttttttaatgtttcattctttcttgagactccgtctcaaaaaataaataaaatagaagcagccttgtaactgtatttaccatgataatatattctgcacggtaagaattccttttacagacattctttatcaagaggtcggcccttctttttcaggcacataagccaaatgcaggcctgtgtgtagctgtgtgttttttctgtggttgccgcatttattccacctccagctggaccccccactgcaaatagagaacagcggtgggggatgggggttaaaaagtagagaacctcctttctgttcaactaatttcacgtgacagtgcatgtatttattcaataaaacctttatgttagctcagt

SEQ ID NO: 2984 - protein, 48 aa, Homosapiens
MTLSTFLCFFTVFVSSMVKCLFSFFACLFYLVICLLNTEFVRRLGFFF

SEQ ID NO: 2985 - DNA, 5476 bp, Homosapiens
agaaccttgtttcctctttggtttgatgggggttgagcctgactctgtgctgtggttgtgaggctggaatgcggagaggccagtgaacacactggacatgggcgggcagggaggcatgtcctcgggtcagccgtctgagtcacaggcccagagatgcccagctgtgaccatttcctcctaggttcattttccagacactgaaagagcagaatggctaaataagactgtaaaacacatgtggcctttcatttgccaatttatagagaagttgtttcgagaaactatagaaccagccgtgcggggagcaaacacccaccttagcacctttagtttcacgaaggtcgacgtgggccagcagcccctcaggatcaatggtgttaaggtatacactgaaaatgtagacaaaaggcaaattattttggaccttcagattagttttgtaggaaattgtgagattgatttggagatcaaacgatatttttgtagagctggtgtgaaaagtatccagattcatggtaccatgcgggtgatcctggaaccgttgattggagatatgcccttagttggagctttgtctatcttcttccttaggaaaccacttttagaaattaactggacaggactgacgaatcttctggatgtccctggattgaatggtttatcagatactatcattttggatataatatcaaactatctggtgcttcccaatcgaatcaccgttccacttgtcagtgaagttcaaatagctcagttgcggtttcctgtaccaaagggtgttctaaggatacattttattgaagctcaggatcttcaggggaaagacacttaccttaagggacttgtcaagggaaagtcagacccctatggaatcattagagttggcaaccaaatcttccaaagcagagtcatcaaggagaacctcagtccaaagtggaatgaagtctatgaggctttagtgtatgaacatcctggacaagaattagagattgagctctttgatgaagacccagacaaggatgactttttaggaagtcttatgattgacctcattgaagttgaaaaggagcgccttttagatgaatggttcactctggacgaggttcccaaggggaagctacacttgagactggagtggctcacgttaatgccaaatgcgtcaaacctcgacaaggtgctaacagacatcaaagctgacaaagaccaagccaacgatggtctttcctctgcattgctgatcttgtacttggattcagcaaggaaccttccgtcagggaagaaaataagcagcaacccaaatcctgttgtccagatgtcagttgggcacaaggcccaggagagcaagattcgatacaaaaccaatgaacctgtgtgggaggaaaacttcactttcttcattcacaatcccaagcgccaggaccttgaagttgaggtcagagacgagcagcaccagtgttccctggggaacctgaaggtccccctcagccagctgctcaccagtgaggacatgactgtgagccagcgcttccagctcagtaactcgggtccaaacagcaccatcaagatgaagattgccctgcgggtgctccatctcgaaaagcgagaaaggcctccagaccaccaacactcagctcaagtcaaacgtccctctgtgtccaaagaggggaggaaaacatccatcaaatctcatatgtctgggtctccaggccctggtggcagcaacacagctccgccacatctcagtcaaggagccgacccccagcatcgcctcggacatctcgctgcccatcgccacccaggagctgcggcaaaggctgaggcagctggaaaacgggacgaccctgggacagtctccactggggcagatccagctgaccatccggcacagctcgcagagaaacaagcttatcgtggtcgtgcatgcctgcagaaacctcattgccttctctgaagacggctctgacccctatgtccgcatgtatttattaccagacaagaggcggtcaggaaggaggaaaacacacgtgtcaaagaaaacattaaatccagtgtttgatcaaagctttgatttcagtgtttcgttaccagaagtgcagaggagaacgctcgacgttgccgtgaagaacagtggcggcttcctgtccaaagacaaagggctccttggcaaagtattggttgctctggcatctgaagaacttgccaaaggctggacccagtggtatgacctcacggaagatgggacgaggcctcaggcgatgacatagccgcagcaggcaggaggcgtcctcttcagcgtagctctccacctctacccggaacacaccctctcacagacgtaccaatgttatttttataatttcatggatttagttatacataccttaatagttttataaaattgttgacatttcaggcaaatttggccaatattatcattgaattttctgtgttggatttcctctaggatttcgccagttcctacaacgtgcagtagggcggcggtagctcttgtgtctgtggactctgctcagctgtgtccgtaggagtcggatgtgtctgtgctttattatggccttgtttatatatcactgaggtatactatgccatgtaaatagactattttttataatctttacatgctggtttaaattcagaaggaaatagatcaaggaaatatatatattttcttctaaaacttattaaattcgtgtgacaaataatcattttcatcttggcagcaaaaagttctcagtgacctattttgtggtgtttctttttgaaaagaaaagctgaaatattattaaatgctagtatgtttctgcccattatgaaagatgaaataaagtattcaaaatattaacattttcataaatataaggatgtattattgagaagtaagttgaagggcttataaggaaaaatgttttataactgagtaatatattaagagaattgtcatggttcataaatcacattatgctaatctgaaatttcttacataaaaatgaagtgtcttatgtttattttaattgctgttgtaacttactcatgaaacagtatacagacaccttgtacttttcctcaactgtaagagcagactttcaatgttagcaattaagctgttgtcaaacaatcagtcatgagctttgttaattttcaatgttttcccagcctataaaaaaaggaaggtacacgttgtccttttaaaggttgtgaggtagattggagtgagtagacaggatattgcattaaaaattgaaagctcgatctcattattgtcaggaacccccagtgtgacctcacacataggatgtgggacctttgagccgatgtgcactggccaccaccagggttgggggcgccacagctgcgagcccggcccctgctgttctcagcagccacttcccaggctgcctcactttatgccatgactgaccttaatattgggatattgttatgcaatttttatcctgtttagactgttaaaagcaggtttctgtacttaagagtcccccagacctcctgtgaggtgaggctctgttgcagtgtcgtaggctgtgtgtgtctgtaaagaaagaatgcacatatgtagacgattaagtgtatattataagctatatgctgaaaatggcttccatagccatgagaacatcttaaaactatgtgtaaatatattaaggaaagtatagctttgtaatttaaattggagcttttagcttgtttcatggaactatacaacttgtgggtaactcacatgaccaaacaaaccaaagtgcctgtgacggggcgggtggcgtctacccaccctcccttctagcagattcttattttgtttgaatttataaacaaggctggtggctgtctacccaccctcccttctagcagattttgattttgtttcaatttataacttacactttgaaccatgggtttacttataatggagtctgtagcttcacagcatatttcatgtaatcataaagaccagtatattccctcctgctgaatgacatgcgactgtaaagcctctttataaaccatttccaatgttagtatataggattatttgggaagcgtatcaatacctttatagacaaatacgaacatgtatgcacacaaaacatttaactatggtatttatggaagacaggtaacaacattaaatctagttgctttcccttagtattagatttgttgagggttttttaaaaatcaggtctgttgaaagtcttctgtcataatctataaagcagcagcactcatggaaattgtagcatgccagtaatttttaccaacatcccatacatctgagttctgcagtccagtgtgtaatccgctccatgtgtattttgcttaatggaatgctttatttaagcacttaggcagagtagacacaattaaaggtacaaagcccagaggaagtggtagagcagcaccgtgcctgccctgaggcagtggagtcagtagcgctgtccccagggccttgagtgcctggaggtgcttggcctccagtagctgcctccattctcttttaaaaaaagggggtgattctgaggcactgaagtgcctcccagatgtggaggagtgaagccaccatcgaggccacactcagcactccaggatcccagcgatgtcagacactcttgagttgtcaaaacgttaattttcagttttaaataatcagtttatctaagaaaagggaattttaacttttctaccttgagccaagccaatgaagggaaaattaattaacttagtaaatttgaagtgcagctctgttagctcgtacatgtgggttcttatcctgatcctgtgccttaaagtaggaaggtgtttccaagttcagattaaaatagaagcagctggccgggtgcggtggctcacgcctgtaatcccagcactttgggaggccgaggcgggcggatgacctgaggtcaggagttcaagaccagcctggccaacatggagaaaccccatctttactaaaaatacaaaaattagccgggcgtggtggtggagcgcacgcctgtagtcccagctactcgggaggctgaggcaggagaattgcttgaacccaggaggcggaggttgcagtgagccaagatcgcaccactgcactccagcctgggcaacagagtgagactccgtctcaaaaaataaataaaatagaagcagccttgtaactgtatttaccatgataatatattctgcacggtaagaattccttttacagacattctttatcaagaggtcggcccttctttttcaggcacataagccaaatgcaggcctgtgtgtagctgtgtgttttttctgtggttgccgcatttattccacctccagctggaccccccactgcaaatagagaacagcggtgggggatgggggttaaaaagtagagaacctcctttctgttcaactaatttcacgtgacagtgcatgtatttattcaataaaacctttatgttagctcagt

SEQ ID NO: 2986 - protein, 571 aa, Homosapiens
MWPFICQFIEKLFRETIEPAVRGANTHLSTFSFTKVDVGQQPLRINGVKVYTENVDKRQIILDLQISFVGNCEIDLEIKRYFCRAGVKSIQIHGTMRVILEPLIGDMPLVGALSIFFLRKPLLEINWTGLTNLLDVPGLNGLSDTIILDIISNYLVLPNRITVPLVSEVQIAQLRFPVPKGVLRIHFIEAQDLQGKDTYLKGLVKGKSDPYGIIRVGNQIFQSRVIKENLSPKWNEVYEALVYEHPGQELEIELFDEDPDKDDFLGSLMIDLIEVEKERLLDEWFTLDEVPKGKLHLRLEWLTLMPNASNLDKVLTDIKADKDQANDGLSSALLILYLDSARNLPSGKKISSNPNPVVQMSVGHKAQESKIRYKTNEPVWEENFTFFIHNPKRQDLEVEVRDEQHQCSLGNLKVPLSQLLTSEDMTVSQRFQLSNSGPNSTIKMKIALRVLHLEKRERPPDHQHSAQVKRPSVSKEGRKTSIKSHMSGSPGPGGSNTAPPHLSQGADPQHRLGHLAAHRHPGAAAKAEAAGKRDDPGTVSTGADPADHPAQLAEKQAYRGRACLQKPHCLL

SEQ ID NO: 2987 - DNA, 5747 bp, Homosapiens
gcgcggggctgagccgcccgggatcagcgcgagcacccagcccgcctcggccgggaggcgcctgagaaccccgggggcgtgctgagcgtggagctgcccgggctgctggcgcagctggcgcggagcttcgcgctgctgctgcccgtgtacgcgctgggctacctggggctcagcttcagctgggttctcctcgcgctcgcgctgctcgcctggtgtcgccgcagccgcggcctcaaggccctgcgcctgtgccgcgcgctggcgctgctggaagacgaggagcgcgtcgtgcgcctgggggtgcgcgcctgcgacctgcccgcctgggttcattttccagacactgaaagagcagaatggctaaataagactgtaaaacacatgtggcctttcatttgccaatttatagagaagttgtttcgagaaactatagaaccagccgtgcggggagcaaacacccaccttagcacctttagtttcacgaaggtcgacgtgggccagcagcccctcaggatcaatggtgttaaggtatacactgaaaatgtagacaaaaggcaaattattttggaccttcagattagttttgtaggaaattgtgagattgatttggagatcaaacgatatttttgtagagctggtgtgaaaagtatccagattcatggtaccatgcgggtgatcctggaaccgttgattggagatatgcccttagttggagctttgtctatcttcttccttaggaaaccacttttagaaattaactggacaggactgacgaatcttctggatgtccctggattgaatggtttatcagatactatcattttggatataatatcaaactatctggtgcttcccaatcgaatcaccgttccacttgtcagtgaagttcaaatagctcagttgcggtttcctgtaccaaagggtgttctaaggatacattttattgaagctcaggatcttcaggggaaagacacttaccttaagggacttgtcaagggaaagtcagacccctatggaatcattagagttggcaaccaaatcttccaaagcagagtcatcaaggagaacctcagtccaaagtggaatgaagtctatgaggctttagtgtatgaacatcctggacaagaattagagattgagctctttgatgaagacccagacaaggatgactttttaggaagtcttatgattgacctcattgaagttgaaaaggagcgccttttagatgaatggttcactctggacgaggttcccaaggggaagctacacttgagactggagtggctcacgttaatgccaaatgcgtcaaacctcgacaaggtgctaacagacatcaaagctgacaaagaccaagccaacgatggtctttcctctgcattgctgatcttgtacttggattcagcaaggaaccttccgtcagggaagaaaataagcagcaacccaaatcctgttgtccagatgtcagttgggcacaaggcccaggagagcaagattcgatacaaaaccaatgaacctgtgtgggaggaaaacttcactttcttcattcacaatcccaagcgccaggaccttgaagttgaggtcagagacgagcagcaccagtgttccctggggaacctgaaggtccccctcagccagctgctcaccagtgaggacatgactgtgagccagcgcttccagctcagtaactcgggtccaaacagcaccatcaagatgaagattgccctgcgggtgctccatctcgaaaagcgagaaaggcctccagaccaccaacactcagctcaagtcaaacgtccctctgtgtccaaagaggggaggaaaacatccatcaaatctcatatgtctgggtctccaggccctggtggcagcaacacagctccatccacaccagtcattgggggcagtgataagcctggtatggaagaaaaggcccagccccctgaggccggccctcaggggctgcacgacctgggcagaagctcctccagcctcctggcctccccaggccacatctcagtcaaggagccgacccccagcatcgcctcggacatctcgctgcccatcgccacccaggagctgcggcaaaggctgaggcagctggaaaacgggacgaccctgggacagtctccactggggcagatccagctgaccatccggcacagctcgcagagaaacaagcttatcgtggtcgtgcatgcctgcagaaacctcattgccttctctgaagacggctctgacccctatgtccgcatgtatttattaccagacaagaggcggtcaggaaggaggaaaacacacgtgtcaaagaaaacattaaatccagtgtttgatcaaagctttgatttcagtgtttcgttaccagaagtgcagaggagaacgctcgacgttgccgtgaagaacagtggcggcttcctgtccaaagacaaagggctccttggcaaagtattggttgctctggcatctgaagaacttgccaaaggctggacccagtggtatgacctcacggaagatgggacgaggcctcaggcgatgacatagccgcagcaggcaggaggcgtcctcttcagcgtagctctccacctctacccggaacacaccctctcacagacgtaccaatgttatttttataatttcatggatttagttatacataccttaatagttttataaaattgttgacatttcaggcaaatttggccaatattatcattgaattttctgtgttggatttcctctaggatttcgccagttcctacaacgtgcagtagggcggcggtagctcttgtgtctgtggactctgctcagctgtgtccgtaggagtcggatgtgtctgtgctttattatggccttgtttatatatcactgaggtatactatgccatgtaaatagactattttttataatctttacatgctggtttaaattcagaaggaaatagatcaaggaaatatatatattttcttctaaaacttattaaattcgtgtgacaaataatcattttcatcttggcagcaaaaagttctcagtgacctattttgtggtgtttctttttgaaaagaaaagctgaaatattattaaatgctagtatgtttctgcccattatgaaagatgaaataaagtattcaaaatattaacattttcataaatataaggatgtattattgagaagtaagttgaagggcttataaggaaaaatgttttataactgagtaatatattaagagaattgtcatggttcataaatcacattatgctaatctgaaatttcttacataaaaatgaagtgtcttatgtttattttaattgctgttgtaacttactcatgaaacagtatacagacaccttgtacttttcctcaactgtaagagcagactttcaatgttagcaattaagctgttgtcaaacaatcagtcatgagctttgttaattttcaatgttttcccagcctataaaaaaaggaaggtacacgttgtccttttaaaggttgtgaggtagattggagtgagtagacaggatattgcattaaaaattgaaagctcgatctcattattgtcaggaacccccagtgtgacctcacacataggatgtgggacctttgagccgatgtgcactggccaccaccagggttgggggcgccacagctgcgagcccggcccctgctgttctcagcagccacttcccaggctgcctcactttatgccatgactgaccttaatattgggatattgttatgcaatttttatcctgtttagactgttaaaagcaggtttctgtacttaagagtcccccagacctcctgtgaggtgaggctctgttgcagtgtcgtaggctgtgtgtgtctgtaaagaaagaatgcacatatgtagacgattaagtgtatattataagctatatgctgaaaatggcttccatagccatgagaacatcttaaaactatgtgtaaatatattaaggaaagtatagctttgtaatttaaattggagcttttagcttgtttcatggaactatacaacttgtgggtaactcacatgaccaaacaaaccaaagtgcctgtgacggggcgggtggcgtctacccaccctcccttctagcagattcttattttgtttgaatttataaacaaggctggtggctgtctacccaccctcccttctagcagattttgattttgtttcaatttataacttacactttgaaccatgggtttacttataatggagtctgtagcttcacagcatatttcatgtaatcataaagaccagtatattccctcctgctgaatgacatgcgactgtaaagcctctttataaaccatttccaatgttagtatataggattatttgggaagcgtatcaatacctttatagacaaatacgaacatgtatgcacacaaaacatttaactatggtatttatggaagacaggtaacaacattaaatctagttgctttcccttagtattagatttgttgagggttttttaaaaatcaggtctgttgaaagtcttctgtcataatctataaagcagcagcactcatggaaattgtagcatgccagtaatttttaccaacatcccatacatctgagttctgcagtccagtgtgtaatccgctccatgtgtattttgcttaatggaatgctttatttaagcacttaggcagagtagacacaattaaaggtacaaagcccagaggaagtggtagagcagcaccgtgcctgccctgaggcagtggagtcagtagcgctgtccccagggccttgagtgcctggaggtgcttggcctccagtagctgcctccattctcttttaaaaaaagggggtgattctgaggcactgaagtgcctcccagatgtggaggagtgaagccaccatcgaggccacactcagcactccaggatcccagcgatgtcagacactcttgagttgtcaaaacgttaattttcagttttaaataatcagtttatctaagaaaagggaattttaacttttctaccttgagccaagccaatgaagggaaaattaattaacttagtaaatttgaagtgcagctctgttagctcgtacatgtgggttcttatcctgatcctgtgccttaaagtaggaaggtgtttccaagttcagattaaaatagaagcagctggccgggtgcggtggctcacgcctgtaatcccagcactttgggaggccgaggcgggcggatgacctgaggtcaggagttcaagaccagcctggccaacatggagaaaccccatctttactaaaaatacaaaaattagccgggcgtggtggtggagcgcacgcctgtagtcccagctactcgggaggctgaggcaggagaattgcttgaacccaggaggcggaggttgcagtgagccaagatcgcaccactgcactccagcctgggcaacagagtgagactccgtctcaaaaaataaataaaatagaagcagccttgtaactgtatttaccatgataatatattctgcacggtaagaattccttttacagacattctttatcaagaggtcggcccttctttttcaggcacataagccaaatgcaggcctgtgtgtagctgtgtgttttttctgtggttgccgcatttattccacctccagctggaccccccactgcaaatagagaacagcggtgggggatgggggttaaaaagtagagaacctcctttctgttcaactaatttcacgtgacagtgcatgtatttattcaataaaacctttatgttagctcagt

SEQ ID NO: 2988 - protein, 717 aa, Homosapiens [sequence omitted]

SEQ ID NO: 2989 - DNA, 5960 bp, Homosapiens
agtatccaccccgcccgctcccggtgacgtgccagccccaggcccacgccgctcccgccccgcgtgatgacgccaccgtcccgggcggaggcgggcgtgcggcggagccgcgtcccctcagaggggcgctggcgcggggctgagccgcccgggatcagcgcgagcacccagcccgcctcggccgggagggcagcgcggcactgcggggcgatgagcggcgcccggggcgagggcccggaggcgggcgccggcggggctgggggccgcgcggcgcctgagaaccccgggggcgtgctgagcgtggagctgcccgggctgctggcgcagctggcgcggagcttcgcgctgctgctgcccgtgtacgcgctgggctacctggggctcagcttcagctgggttctcctcgcgctcgcgctgctcgcctggtgtcgccgcagccgcggcctcaaggccctgcgcctgtgccgcgcgctggcgctgctggaagacgaggagcgcgtcgtgcgcctgggggtgcgcgcctgcgacctgcccgcctgggttcattttccagacactgaaagagcagaatggctaaataagactgtaaaacacatgtggcctttcatttgccaatttatagagaagttgtttcgagaaactatagaaccagccgtgcggggagcaaacacccaccttagcacctttagtttcacgaaggtcgacgtgggccagcagcccctcaggatcaatggtgttaaggtatacactgaaaatgtagacaaaaggcaaattattttggaccttcagattagttttgtaggaaattgtgagattgatttggagatcaaacgatatttttgtagagctggtgtgaaaagtatccagattcatggtaccatgcgggtgatcctggaaccgttgattggagatatgcccttagttggagctttgtctatcttcttccttaggaaaccacttttagaaattaactggacaggactgacgaatcttctggatgtccctggattgaatggtttatcagatactatcattttggatataatatcaaactatctggtgcttcccaatcgaatcaccgttccacttgtcagtgaagttcaaatagctcagttgcggtttcctgtaccaaagggtgttctaaggatacattttattgaagctcaggatcttcaggggaaagacacttaccttaagggacttgtcaagggaaagtcagacccctatggaatcattagagttggcaaccaaatcttccaaagcagagtcatcaaggagaacctcagtccaaagtggaatgaagtctatgaggctttagtgtatgaacatcctggacaagaattagagattgagctctttgatgaagacccagacaaggatgactttttaggaagtcttatgattgacctcattgaagttgaaaaggagcgccttttagatgaatggttcactctggacgaggttcccaaggggaagctacacttgagactggagtggctcacgttaatgccaaatgcgtcaaacctcgacaaggtgctaacagacatcaaagctgacaaagaccaagccaacgatggtctttcctctgcattgctgatcttgtacttggattcagcaaggaaccttccgtcagggaagaaaataagcagcaacccaaatcctgttgtccagatgtcagttgggcacaaggcccaggagagcaagattcgatacaaaaccaatgaacctgtgtgggaggaaaacttcactttcttcattcacaatcccaagcgccaggaccttgaagttgaggtcagagacgagcagcaccagtgttccctggggaacctgaaggtccccctcagccagctgctcaccagtgaggacatgactgtgagccagcgcttccagctcagtaactcgggtccaaacagcaccatcaagatgaagattgccctgcgggtgctccatctcgaaaagcgagaaaggcctccagaccaccaacactcagctcaagtcaaacgtccctctgtgtccaaagaggggaggaaaacatccatcaaatctcatatgtctgggtctccaggccctggtggcagcaacacagctccatccacaccagtcattgggggcagtgataagcctggtatggaagaaaaggcccagccccctgaggccggccctcaggggctgcacgacctgggcagaagctcctccagcctcctggcctccccaggccacatctcagtcaaggagccgacccccagcatcgcctcggacatctcgctgcccatcgccacccaggagctgcggcaaaggctgaggcagctggaaaacgggacgaccctgggacagtctccactggggcagatccagctgaccatccggcacagctcgcagagaaacaagcttatcgtggtcgtgcatgcctgcagaaacctcattgccttctctgaagacggctctgacccctatgtccgcatgtatttattaccagacaagaggcggtcaggaaggaggaaaacacacgtgtcaaagaaaacattaaatccagtgtttgatcaaagctttgatttcagtgtttcgttaccagaagtgcagaggagaacgctcgacgttgccgtgaagaacagtggcggcttcctgtccaaagacaaagggctccttggcaaagtattggttgctctggcatctgaagaacttgccaaaggctggacccagtggtatgacctcacggaagatgggacgaggcctcaggcgatgacatagccgcagcaggcaggaggcgtcctcttcagcgtagctctccacctctacccggaacacaccctctcacagacgtaccaatgttatttttataatttcatggatttagttatacataccttaatagttttataaaattgttgacatttcaggcaaatttggccaatattatcattgaattttctgtgttggatttcctctaggatttcgccagttcctacaacgtgcagtagggcggcggtagctcttgtgtctgtggactctgctcagctgtgtccgtaggagtcggatgtgtctgtgctttattatggccttgtttatatatcactgaggtatactatgccatgtaaatagactattttttataatctttacatgctggtttaaattcagaaggaaatagatcaaggaaatatatatattttcttctaaaacttattaaattcgtgtgacaaataatcattttcatcttggcagcaaaaagttctcagtgacctattttgtggtgtttctttttgaaaagaaaagctgaaatattattaaatgctagtatgtttctgcccattatgaaagatgaaataaagtattcaaaatattaacattttcataaatataaggatgtattattgagaagtaagttgaagggcttataaggaaaaatgttttataactgagtaatatattaagagaattgtcatggttcataaatcacattatgctaatctgaaatttcttacataaaaatgaagtgtcttatgtttattttaattgctgttgtaacttactcatgaaacagtatacagacaccttgtacttttcctcaactgtaagagcagactttcaatgttagcaattaagctgttgtcaaacaatcagtcatgagctttgttaattttcaatgttttcccagcctataaaaaaaggaaggtacacgttgtccttttaaaggttgtgaggtagattggagtgagtagacaggatattgcattaaaaattgaaagctcgatctcattattgtcaggaacccccagtgtgacctcacacataggatgtgggacctttgagccgatgtgcactggccaccaccagggttgggggcgccacagctgcgagcccggcccctgctgttctcagcagccacttcccaggctgcctcactttatgccatgactgaccttaatattgggatattgttatgcaatttttatcctgtttagactgttaaaagcaggtttctgtacttaagagtcccccagacctcctgtgaggtgaggctctgttgcagtgtcgtaggctgtgtgtgtctgtaaagaaagaatgcacatatgtagacgattaagtgtatattataagctatatgctgaaaatggcttccatagccatgagaacatcttaaaactatgtgtaaatatattaaggaaagtatagctttgtaatttaaattggagcttttagcttgtttcatggaactatacaacttgtgggtaactcacatgaccaaacaaaccaaagtgcctgtgacggggcgggtggcgtctacccaccctcccttctagcagattcttattttgtttgaatttataaacaaggctggtggctgtctacccaccctcccttctagcagattttgattttgtttcaatttataacttacactttgaaccatgggtttacttataatggagtctgtagcttcacagcatatttcatgtaatcataaagaccagtatattccctcctgctgaatgacatgcgactgtaaagcctctttataaaccatttccaatgttagtatataggattatttgggaagcgtatcaatacctttatagacaaatacgaacatgtatgcacacaaaacatttaactatggtatttatggaagacaggtaacaacattaaatctagttgctttcccttagtattagatttgttgagggttttttaaaaatcaggtctgttgaaagtcttctgtcataatctataaagcagcagcactcatggaaattgtagcatgccagtaatttttaccaacatcccatacatctgagttctgcagtccagtgtgtaatccgctccatgtgtattttgcttaatggaatgctttatttaagcacttaggcagagtagacacaattaaaggtacaaagcccagaggaagtggtagagcagcaccgtgcctgccctgaggcagtggagtcagtagcgctgtccccagggccttgagtgcctggaggtgcttggcctccagtagctgcctccattctcttttaaaaaaagggggtgattctgaggcactgaagtgcctcccagatgtggaggagtgaagccaccatcgaggccacactcagcactccaggatcccagcgatgtcagacactcttgagttgtcaaaacgttaattttcagttttaaataatcagtttatctaagaaaagggaattttaacttttctaccttgagccaagccaatgaagggaaaattaattaacttagtaaatttgaagtgcagctctgttagctcgtacatgtgggttcttatcctgatcctgtgccttaaagtaggaaggtgtttccaagttcagattaaaatagaagcagctggccgggtgcggtggctcacgcctgtaatcccagcactttgggaggccgaggcgggcggatgacctgaggtcaggagttcaagaccagcctggccaacatggagaaaccccatctttactaaaaatacaaaaattagccgggcgtggtggtggagcgcacgcctgtagtcccagctactcgggaggctgaggcaggagaattgcttgaacccaggaggcggaggttgcagtgagccaagatcgcaccactgcactccagcctgggcaacagagtgagactccgtctcaaaaaataaataaaatagaagcagccttgtaactgtatttaccatgataatatattctgcacggtaagaattccttttacagacattctttatcaagaggtcggcccttctttttcaggcacataagccaaatgcaggcctgtgtgtagctgtgtgttttttctgtggttgccgcatttattccacctccagctggaccccccactgcaaatagagaacagcggtgggggatgggggttaaaaagtagagaacctcctttctgttcaactaatttcacgtgacagtgcatgtatttattcaataaaacctttatgttagctcagt

SEQ ID NO: 2990 - protein, 893 aa, Homosapiens; identical to SEQ ID NO: 374

SEQ ID NO: 2991 - DNA, 1933 bp, Homosapiens
gaaatattgaaagtaaaactggcaaacatatggggaaatactaaaactcatgaatcaaagaaatgcaaattaaaataaagagccagctttttaagaaaattacaaatgtcttctattgagggggcaatgggaacagcctccttgccccggcagagactggaggtgtcgcacacctctccagagggagctgcgacaaccctgagccactcatctgaaggctccttggcctttcttctagaaacctgacttttgttttggtgatacaaagtgtggggagaccaggaacataaagatgttcaccgcagcgttatttcctaaaaccagaaaaaacctttaagctgtcacgtgagtggagtgatttacaaggtgtggactctgctcaagccagcccagggaccagctcatgtgctcacacaactgggagaccccaggccctgcgggaaccccctgctcctgcactcatgtcaggttgttggggtgatcttgctggatagcaggggttctggactttcttcctccctctggggacgccgggtggaaaccccttatgtagaatacgggctttggtcttgtgtcgaggaaatgcgactctgggctcttgatgtaaaaacattgtcccacaattgtgtagaaatacatggaaacggaagagactagaggaatacgcagaagtctcctccagcctcctggcctccccaggccacatctcagtcaaggagccgacccccagcatcgcctcggacatctcgctgcccatcgccacccaggagctgcggcaaaggctgaggcagctggaaaacgggacgaccctgggacagtctccactggggcagatccagctgaccatccggcacagctcgcagagaaacaagcttatcgtggtcgtgcatgcctgcagacaagaggcggtcaggaaggaggaaaacacacgtgtcaaagaaaacattaaatccagtgtttgatcaaagctttgatttcagtgtttcgttaccagaagtgcagaggagaacgctcgacgttgccgtgaagaacagtggcggcttcctgtccaaagacaaagggctccttggcaaagtattggttgctctggcatctgaagaacttgccaaaggctggacccagtggtatgacctcacggaagatgggacgaggcctcaggcgatgacatagccgcagcaggcaggaggcgtcctcttcagcgtagctctccacctctacccggaacacaccctctcacagacgtaccaatgttatttttataatttcatggatttagttatacataccttaatagttttataaaattgttgacatttcaggcaaatttggccaatattatcattgaattttctgtgttggatttcctctaggatttcgccagttcctacaacgtgcagtagggcggcggtagctcttgtgtctgtggactctgctcagctgtgtccgtaggagtcggatgtgtctgtgctttattatggccttgtttatatatcactgaggtatactatgccatgtaaatagactattttttataatctttacatgctggtttaaattcagaaggaaatagatcaaggaaatatatatattttcttctaaaacttattaaattcgtgtgacaaataatcattttcatcttggcagcaaaaagttctcagtgacctattttgtggtgtttctttttgaaaagaaaagctgaaatattattaaatgctagtatgtttctgcccattatgaaagatgaaataaagtattcaaaatattaacattttcataaatataaggatgtattattgagaagtaagttgaagggcttataaggaaaaatgttttataactgagtaatatattaagagaattgtcatggttcataaatcacattatgctaatctgaaatttcttacataaaaatgaagtgtcttatgtttatttt

SEQ ID NO: 2992 - protein, 103 aa, Homosapiens; identical to SEQ ID NO: 2980

SEQ ID NO: 2993 - DNA, 3086 bp, Homosapiens
acattctgttttatacaaaaggatttgtgttttgtctagctggtttttccttcataaagtgcacttctgtattctcaaaataatctatgcttactggaccttggattttaaaaataatttttaaagttccacaaacattgtcatagttatttcatttaaaactgcttttgtgattatagtttagtttgaaaagaaatatgcaatcaaccttttaggttttcctgagtagttatgtgttaatttctctgaccatttttgtatagcctgagaaaccttcagagttcttactctatttgattaaattattttatattacagccatctaacaggaataattcctgttgcagagataatgcagaaggttattatacaggaaaaagaggctgggcatggtggctcacacctgtaatctcagtactttgggaggctgagatgagaggatcacttgaggccaagagtttgagaacagcctgggcaacatagtgagatccacctctgttttttaaaaaatttttaaatgccttgctgtaaattttctttaatgtggattttgaatggagaaggcttaaaaggtacttagaaatgtattgtctccataaatgtcatgaatggaaactgtatacatcgttatgagtgtgtattgccaccattttcccaggggttaaaagacaggtagactattgcctattaacccagggttctccgaaccgattggtcattattgtcattactgcttttctcatttgtcattattacatcatttctttctgtgctcattgtaatctataatgacgaaatagcagatcttttgcttgttaacagtgttttgtgtctttgttaggagatttcataccatgttaatcattatggaaacactacttaagagaatatggctgaaatatgtttgggtttttaaaaatatctttcttacagactaatattgtctgtggacctttctacatttgtttgtttgtttttgaaacagttttgtcacccaggctggagtgcagtggcgcgatatcagctcactgcagccgcctcctcccaggttcaagcgattctcatgcctcagcctcttgagtggctgggactacaggtgcgcgccaccatgcccaactaattttttgtatttttagtagagatgaggtttcaccatgttggccaggctggtctcgaacccctggcctcaggtgatctgagcctcccaaagtgctgaaattacaggcgtgagccaccccacctggcccctttctacattttctaagttcctatctctgaggacaaagggtcaggagcgtagacaacgtagaaaggttctgcagacatgatcctagttatgccagtgtttccaccctgtgttttgcaggtcagagacgagcagcaccagtgttccctggggaacctgaaggtccccctcagccagctgctcaccagtgaggacatgactgtgagccagcgcttccagctcagtaactcgggtccaaacagcaccatcaagatgaagattgccctgcgggtgctccatctcgaaaagcgagaaaggcctccagaccaccaacactcagctcaagtcaaacgtccctctgtgtccaaagaggggaggaaaacatccatcaaatctcatatgtctgggtctccaggccctggtggcagcaacacagctccatccacaccagtcattgggggcagtgataagcctggtatggaagaaaaggcccagccccctgaggccggccctcaggggctgcacgacctgggcagaagctcctccagcctcctggcctccccaggccacatctcagtcaaggagccgacccccagcatcgcctcggacatctcgctgcccatcgccacccaggagctgcggcaaaggctgaggcagctggaaaacgggacgaccctgggacagtctccactggggcagatccagctgaccatccggcacagctcgcagagaaacaagcttatcgtggtcgtgcatgcctgcagaaacctcattgccttctctgaagacggctctgacccctatgtccgcatgtatttattaccagacaagaggcggtcaggaaggaggaaaacacacgtgtcaaagaaaacattaaatccagtgtttgatcaaagctttgatttcagtgtttcgttaccagaagtgcagaggagaacgctcgacgttgccgtgaagaacagtggcggcttcctgtccaaagacaaagggctccttggcaaagtattggttgctctggcatctgaagaacttgccaaaggctggacccagtggtatgacctcacggaagatgggacgaggcctcaggcgatgacatagccgcagcaggcaggaggcgtcctcttcagcgtagctctccacctctacccggaacacaccctctcacagacgtaccaatgttatttttataatttcatggatttagttatacataccttaatagttttataaaattgttgacatttcaggcaaatttggccaatattatcattgaattttctgtgttggatttcctctaggatttcgccagttcctacaacgtgcagtagggcggcggtagctcttgtgtctgtggactctgctcagctgtgtccgtaggagtcggatgtgtctgtgctttattatggccttgtttatatatcactgaggtatactatgccatgtaaatagactattttttataatctttacatgctggtttaaattcagaaggaaatagatcaaggaaatatatatattttcttctaaaacttattaaattcgtgtgacaaataatcattttcatcttggcagcaaaaagttctcagtgacctattttgtggtgtttctttttgaaaagaaaagctgaaatattattaaatgctagtatgtttctgcccattatgaaagatgaaataaagtattcaaaatattaacattttcataaatataaggatgtattattgagaagtaagttgaagggcttataaggaaaaatgttttataactgagtaatatattaagagaattgtcatggttcataaatcacattatgctaatctgaaatttcttacataaaaatgaagtgtcttatgtttatttt

SEQ ID NO: 2994 - protein, 332 aa, Homosapiens [sequence omitted]

SEQ ID NO: 2995 - DNA, 3027 bp, Homosapiens
agaaccttgtttcctctttggtttgatgggggttgagcctgactctgtgctgtggttgtgaggctggaatgcggagaggccagtgaacacactggacatgggcgggcagggaggcatgtcctcgggtcagccgtctgagtcacaggcccagagatgcccagctgtgaccatttcctcctaggttcattttccagacactgaaagagcagaatggctaaataagactgtaaaacacatgtggcctttcatttgccaatttatagagaagttgtttcgagaaactatagaaccagccgtgcggggagcaaacacccaccttagcacctttagtttcacgaaggtcgacgtgggccagcagcccctcaggatcaatggtgttaaggtatacactgaaaatgtagacaaaaggcaaattattttggaccttcagattagttttgtaggaaattgtgagattgatttggagatcaaacgatatttttgtagagctggtgtgaaaagtatccagattcatggtaccatgcgggtgatcctggaaccgttgattggagatatgcccttagttggagctttgtctatcttcttccttaggaaaccacttttagaaattaactggacaggactgacgaatcttctggatgtccctggattgaatggtttatcagatactatcattttggatataatatcaaactatctggtgcttcccaatcgaatcaccgttccacttgtcagtgaagttcaaatagctcagttgcggtttcctgtaccaaagggtgttctaaggatacattttattgaagctcaggatcttcaggggaaagacacttaccttaagggacttgtcaagggaaagtcagacccctatggaatcattagagttggcaaccaaatcttccaaagcagagtcatcaaggagaacctcagtccaaagtggaatgaagtctatgaggctttagtgtatgaacatcctggacaagaattagagattgagctctttgatgaagacccagacaaggatgactttttaggaagtcttatgattgacctcattgaagttgaaaaggagcgccttttagatgaatggttcactctggacgaggttcccaaggggaagctacacttgagactggagtggctcacgttaatgccaaatgcgtcaaacctcgacaaggtgctaacagacatcaaagctgacaaagaccaagccaacgatggtctttcctctgcattgctgatcttgtacttggattcagcaaggaaccttccgtcagggaagaaaataagcagcaacccaaatcctgttgtccagatgtcagttgggcacaaggcccaggagagcaagattcgatacaaaaccaatgaacctgtgtgggaggaaaacttcactttcttcattcacaatcccaagcgccaggaccttgaagttgaggtcagagacgagcagcaccagtgttccctggggaacctgaaggtccccctcagccagctgctcaccagtgaggacatgactgtgagccagcgcttccagctcagtaactcgggtccaaacagcaccatcaagatgaagattgccctgcgggtgctccatctcgaaaagcgagaaaggcctccagaccaccaacactcagctcaagtcaaacgtccctctgtgtccaaagaggggaggaaaacatccatcaaatctcatatgtctgggtctccaggccctggtggcagcaacacagctccgccacatctcagtcaaggagccgacccccagcatcgcctcggacatctcgctgcccatcgccacccaggagctgcggcaaaggctgaggcagctggaaaacgggacgaccctgggacagtctccactggggcagatccagctgaccatccggcacagctcgcagagaaacaagcttatcgtggtcgtgcatgcctgcagaaacctcattgccttctctgaagacggctctgacccctatgtccgcatgtatttattaccagacaagaggcggtcaggaaggaggaaaacacacgtgtcaaagaaaacattaaatccagtgtttgatcaaagctttgatttcagtgtttcgttaccagaagtgcagaggagaacgctcgacgttgccgtgaagaacagtggcggcttcctgtccaaagacaaagggctccttggcaaagtattggttgctctggcatctgaagaacttgccaaaggctggacccagtggtatgacctcacggaagatgggacgaggcctcaggcgatgacatagccgcagcaggcaggaggcgtcctcttcagcgtagctctccacctctacccggaacacaccctctcacagacgtaccaatgttatttttataatttcatggatttagttatacataccttaatagttttataaaattgttgacatttcaggcaaatttggccaatattatcattgaattttctgtgttggatttcctctaggatttcgccagttcctacaacgtgcagtagggcggcggtagctcttgtgtctgtggactctgctcagctgtgtccgtaggagtcggatgtgtctgtgctttattatggccttgtttatatatcactgaggtatactatgccatgtaaatagactattttttataatctttacatgctggtttaaattcagaaggaaatagatcaaggaaatatatatattttcttctaaaacttattaaattcgtgtgacaaataatcattttcatcttggcagcaaaaagttctcagtgacctattttgtggtgtttctttttgaaaagaaaagctgaaatattattaaatgctagtatgtttctgcccattatgaaagatgaaataaagtattcaaaatattaacattttcataaatataaggatgtattattgagaagtaagttgaagggcttataaggaaaaatgttttataactgagtaatatattaagagaattgtcatggttcataaatcacattatgctaatctgaaatttcttacataaaaatgaagtgtcttatgtttatttt

SEQ ID NO: 2996 - protein, 571 aa, Homosapiens; identical to SEQ ID NO: 2986

SEQ ID NO: 2997 - DNA, 2928 bp, Homosapiens
acattctgttttatacaaaaggatttgtgttttgtctagctggtttttccttcataaagtgcacttctgtattctcaaaataatctatgcttactggaccttggattttaaaaataatttttaaagttccacaaacattgtcatagttatttcatttaaaactgcttttgtgattatagtttagtttgaaaagaaatatgcaatcaaccttttaggttttcctgagtagttatgtgttaatttctctgaccatttttgtatagcctgagaaaccttcagagttcttactctatttgattaaattattttatattacagccatctaacaggaataattcctgttgcagagataatgcagaaggttattatacaggaaaaagaggctgggcatggtggctcacacctgtaatctcagtactttgggaggctgagatgagaggatcacttgaggccaagagtttgagaacagcctgggcaacatagtgagatccacctctgttttttaaaaaatttttaaatgccttgctgtaaattttctttaatgtggattttgaatggagaaggcttaaaaggtacttagaaatgtattgtctccataaatgtcatgaatggaaactgtatacatcgttatgagtgtgtattgccaccattttcccaggggttaaaagacaggtagactattgcctattaacccagggttctccgaaccgattggtcattattgtcattactgcttttctcatttgtcattattacatcatttctttctgtgctcattgtaatctataatgacgaaatagcagatcttttgcttgttaacagtgttttgtgtctttgttaggagatttcataccatgttaatcattatggaaacactacttaagagaatatggctgaaatatgtttgggtttttaaaaatatctttcttacagactaatattgtctgtggacctttctacatttgtttgtttgtttttgaaacagttttgtcacccaggctggagtgcagtggcgcgatatcagctcactgcagccgcctcctcccaggttcaagcgattctcatgcctcagcctcttgagtggctgggactacaggtgcgcgccaccatgcccaactaattttttgtatttttagtagagatgaggtttcaccatgttggccaggctggtctcgaacccctggcctcaggtgatctgagcctcccaaagtgctgaaattacaggcgtgagccaccccacctggcccctttctacattttctaagttcctatctctgaggacaaagggtcaggagcgtagacaacgtagaaaggttctgcagacatgatcctagttatgccagtgtttccaccctgtgttttgcaggtcagagacgagcagcaccagtgttccctggggaacctgaaggtccccctcagccagctgctcaccagtgaggacatgactgtgagccagcgcttccagctcagtaactcgggtccaaacagcaccatcaagatgaagattgccctgcgggtgctccatctcgaaaagcgagaaaggcctccagaccaccaacactcagctcaagtcaaacgtccctctgtgtccaaagaggggaggaaaacatccatcaaatctcatatgtctgggtctccaggccctggtggcagcaacacagctccatccacaccagtcattgggggcagtgataagcctggtatggaagaaaaggcccagccccctgaggccggccctcaggggctgcacgacctgggcagaagctcctccagcctcctggcctccccaggccacatctcagtcaaggagccgacccccagcatcgcctcggacatctcgctgcccatcgccacccaggagctgcggcaaaggctgaggcagctggaaaacgggacgaccctgggacagtctccactggggcagatccagctgaccatccggcacagctcgcagagaaacaagcttatcgtggtcgtgcatgcctgcagaaacctcattgccttctctgaagacggctctgacccctatgtccgcatgtatttattaccagacaagaggcggtcaggaaggaggaaaacacacgtgtcaaagaaaacattaaatccagtgtttgatcaaagctttgatttcagtgtttcgttaccagaagtgcagaggagaacgctcgacgttgccgtgaagaacagtggcggcttcctgtccaaagacaaagggctccttggcaaagtattggttgctctggcatctgaagaacttgccaaaggctggacccagtggtatgacctcacggaagatgggacgaggcctcaggcgatgacatagccgcagcaggcaggaggcgtcctcttcagcgtagctctccacctctacccggaacacaccctctcacagacgtaccaatgttatttttataatttcatggatttagttatacataccttaatagttttataaaattgttgacatttcaggcaaatttggccaatattatcattgaattttctgtgttggatttcctctaggatttcgccagttcctacaacgtgcagtagggcggcggtagctcttgtgtctgtggactctgctcagctgtgtccgtaggagtcggatgtgtctgtgctttattatggccttgtttatatatcactgaggtatactatgccatgtaaatagactattttttataatctttacatgctggtttaaattcagaaggaaatagatcaaggaaatatatatattttcttctaaaacttattaaattcgtgtgacaaataatcattttcatcttggcagcaaaaagttctcagtgacctattttgtggtgtttctttttgaaaagaaaagctgaaatattattaaatgctagtatgtttctgcccattatgaaagatgaaataaagtattcaaaatattaacattttcat

SEQ ID NO: 2998 - protein, 332 aa, Homosapiens [sequence omitted]

SEQ ID NO: 2999 - DNA, 2869 bp, Homosapiens
agaaccttgtttcctctttggtttgatgggggttgagcctgactctgtgctgtggttgtgaggctggaatgcggagaggccagtgaacacactggacatgggcgggcagggaggcatgtcctcgggtcagccgtctgagtcacaggcccagagatgcccagctgtgaccatttcctcctaggttcattttccagacactgaaagagcagaatggctaaataagactgtaaaacacatgtggcctttcatttgccaatttatagagaagttgtttcgagaaactatagaaccagccgtgcggggagcaaacacccaccttagcacctttagtttcacgaaggtcgacgtgggccagcagcccctcaggatcaatggtgttaaggtatacactgaaaatgtagacaaaaggcaaattattttggaccttcagattagttttgtaggaaattgtgagattgatttggagatcaaacgatatttttgtagagctggtgtgaaaagtatccagattcatggtaccatgcgggtgatcctggaaccgttgattggagatatgcccttagttggagctttgtctatcttcttccttaggaaaccacttttagaaattaactggacaggactgacgaatcttctggatgtccctggattgaatggtttatcagatactatcattttggatataatatcaaactatctggtgcttcccaatcgaatcaccgttccacttgtcagtgaagttcaaatagctcagttgcggtttcctgtaccaaagggtgttctaaggatacattttattgaagctcaggatcttcaggggaaagacacttaccttaagggacttgtcaagggaaagtcagacccctatggaatcattagagttggcaaccaaatcttccaaagcagagtcatcaaggagaacctcagtccaaagtggaatgaagtctatgaggctttagtgtatgaacatcctggacaagaattagagattgagctctttgatgaagacccagacaaggatgactttttaggaagtcttatgattgacctcattgaagttgaaaaggagcgccttttagatgaatggttcactctggacgaggttcccaaggggaagctacacttgagactggagtggctcacgttaatgccaaatgcgtcaaacctcgacaaggtgctaacagacatcaaagctgacaaagaccaagccaacgatggtctttcctctgcattgctgatcttgtacttggattcagcaaggaaccttccgtcagggaagaaaataagcagcaacccaaatcctgttgtccagatgtcagttgggcacaaggcccaggagagcaagattcgatacaaaaccaatgaacctgtgtgggaggaaaacttcactttcttcattcacaatcccaagcgccaggaccttgaagttgaggtcagagacgagcagcaccagtgttccctggggaacctgaaggtccccctcagccagctgctcaccagtgaggacatgactgtgagccagcgcttccagctcagtaactcgggtccaaacagcaccatcaagatgaagattgccctgcgggtgctccatctcgaaaagcgagaaaggcctccagaccaccaacactcagctcaagtcaaacgtccctctgtgtccaaagaggggaggaaaacatccatcaaatctcatatgtctgggtctccaggccctggtggcagcaacacagctccgccacatctcagtcaaggagccgacccccagcatcgcctcggacatctcgctgcccatcgccacccaggagctgcggcaaaggctgaggcagctggaaaacgggacgaccctgggacagtctccactggggcagatccagctgaccatccggcacagctcgcagagaaacaagcttatcgtggtcgtgcatgcctgcagaaacctcattgccttctctgaagacggctctgacccctatgtccgcatgtatttattaccagacaagaggcggtcaggaaggaggaaaacacacgtgtcaaagaaaacattaaatccagtgtttgatcaaagctttgatttcagtgtttcgttaccagaagtgcagaggagaacgctcgacgttgccgtgaagaacagtggcggcttcctgtccaaagacaaagggctccttggcaaagtattggttgctctggcatctgaagaacttgccaaaggctggacccagtggtatgacctcacggaagatgggacgaggcctcaggcgatgacatagccgcagcaggcaggaggcgtcctcttcagcgtagctctccacctctacccggaacacaccctctcacagacgtaccaatgttatttttataatttcatggatttagttatacataccttaatagttttataaaattgttgacatttcaggcaaatttggccaatattatcattgaattttctgtgttggatttcctctaggatttcgccagttcctacaacgtgcagtagggcggcggtagctcttgtgtctgtggactctgctcagctgtgtccgtaggagtcggatgtgtctgtgctttattatggccttgtttatatatcactgaggtatactatgccatgtaaatagactattttttataatctttacatgctggtttaaattcagaaggaaatagatcaaggaaatatatatattttcttctaaaacttattaaattcgtgtgacaaataatcattttcatcttggcagcaaaaagttctcagtgacctattttgtggtgtttctttttgaaaagaaaagctgaaatattattaaatgctagtatgtttctgcccattatgaaagatgaaataaagtattcaaaatattaacattttcat

SEQ ID NO: 3000 - protein, 571 aa, Homosapiens; identical to SEQ ID NO: 2986

SEQ ID NO: 3001 - DNA, 483 bp, Homosapiens
tcatgaaacacgtggatacatctgtgtcattccagttgaaacctgacattgttttccgatcttggagtgccgtacacgttctgcttctcgtagaaaagccgcaacagctcagaggtgacttcctgtcctttggaaatgcctgttccactggcttttcagtttcctgaaatagctcagtcctccagaggcgaggctcccagcatcctgaggcacgtgtccatggggaaggaggggcacgctgattttagttgcttttccaaaggcgccttctaaagccaggcctttatcgggccctgctggtggcttctccacggtgccctcatgtggacctcagactgggctttggagcctcctgtctcacacacccattttgtccttcccacacaactcattctttgttctcacactcccactttcccgctgcttctcacactcattttcttacactcgctattccactcacacttgttctcacttgtttca

SEQ ID NO: 3002 - protein, 53 aa, Homosapiens
MWTSDWALEPPVSHTHFVLPTQLILCSHTPTFPLLLTLIFLHSLFHSHLFSLV

SEQ ID NO: 3003 - DNA, 401 bp, Homosapiens
gtaggaaattgtgagattgatttggagatcaaacgatatttttgtagagctggtgtgaaaagtatccagattcatggtaccatgcgggtgatcctggaaccgttgattggagatatgcccttagttggagctttgtctatcttcttccttaggaaaccagtaagtcaatatttatttcatttttattttcccatttggtggcaaaaatacatacccgtggaagaatatataaagtggagaaacaaaattttatcaactcaccgttgtccctttctgttgtgtgaatcctgtgggagttttttgtatttctttgtgccttaactgagagcttatctcttgataaacagctctctttcctgattataaaaatgttacaaaaatttggaaacatggacttcttc

SEQ ID NO: 3004 - protein, 79 aa, Homosapiens
MRVILEPLIGDMPLVGALSIFFLRKPVSQYLFHFYFPIWWQKYIPVEEYIKWRNKILSTHRCPFLLCESCGSFLYFFVP

SEQ ID NO: 3005 - DNA, 371 bp, Homosapiens
ggggttatacgctctgcttagcttcagccatgttggcctcactaaaagttaatccatagttatttaagtggaaattttcagaaaatccatttcggagcaaatgttatgtgagagtctaaatgagccactgccctctgtttgattgaatatcaggtgccctgatcatatttaccagtgggtcagattcctctaagatgtaacagctgtgtaaaggaacacaggctacaacctttgccagaaagactgtcgccaaagtcatctgaccatcagatctggaggtgtgagacagaagacaaatgtgaggacaaccgggaacaggaggaataagctactgaagtaagaagataccagtcctcgtcccctgacacaca

SEQ ID NO: 3006 - protein, 42 aa, Homosapiens
RNTGYNLCQKDCRQSHLTIRSGGVRQKTNVRTTGNRRNKLLK

SEQ ID NO: 3007 - DNA, 3051 bp, Homosapiens
cagtgcctgccgcccacggccgcaggagtcgggcttcggtcgcaccagagacagcggactttcctccgatggttgcagcagagggatcatgacggggaaaaagtcctcccgggagaaacggcgcaaacgtagcagtcaggaggcggccgcagcgctcgcggccccggacatcgtacccgcgttggccagcggcagcagtggaagcactagcggctgcgggagcgccgggggctgcgggagcgtcagctgctgtgggaacgccaattttagtggaagtgtcaccggcggtgggagcggcggcagctgttggggcgggagcagcgtggagcgcagcgagcgccggaagcggaggagtaccgactcttccagcgtctcgggctccttgcagcaggtgcgtgcgcgcccctctggccgcttcctggagctgctgctttttcggaagaagtcgggcttccagagggatggggcgcaggctggagctcactgctagcgcggcaatctcaaggtcgtccgtccttgaggttcatgttcctacctaagtcctggaaactaaatatattttgccaactttggaaaaagaattattcttggcagagcacagtgaccttgaagaaggtggactggacctgactgtgtcattgaaaccagttagtttctatatatcagacaaaaaagaaatgcttcagcagtgcttctgtattataggagagaaaaagttacagaagatgcttcctgatgtgttaaagaactgttcaatagaagaaattaaaaaactatgccaggaacagttagagctcctgtctgaaaaaaaaattttgaagattcttgagggtgacaatggaatggactctgatatggaagaggaagcagatgatggttctaagatgggatctgatttagtcagtcagcaagacatctgtatagattctgcttcatccgtgagagagaataagcaacctgaaggtttggaattaaaacaaggaaaaggggaagatagtgatgtactcagtataaatgcagatgcttatgacagcgacatagaaggcccatgcaacgaagaagcagctgctcccgaggcaccagaaaatacagtccaaagtgaagctggtcagatagatgacctggagaaagacattgagaaaagtgtgaatgagattctaggactggcagagtctagcccaaacgaacccaaagcagccaccctggctgttcctccaccagaagatgttcaaccttctgcacagcaactggagctgctagaacttgagatgagggcaagagcgattaaagccctaatgaaagctggtgatataaaaaagccagcctaggtatttaacttgattttgaattttaggtatgtttgaacaaagccacatcatttaattttgtatctaaaatttatttggggtcttatatgttatttctcatgtaacccttattaggactcattttagccctaaattacctgtggctgtttctttttatttttttgactacttttatattataaatgtgtgttactgtcttatgaattcatggcaatatagttggatagcctggatactttgttagatgagtatttagctgtgtctgcaaatcttaaaagccattagcaaagagtcgtggtatttttttctttatttttaaatgtttgggcaccaaacctaaaagcaaaagattgacgaagcatgtttctcttaaggctacttgtattttacaatacaatattaaattatttaatttgagaaatttagttttgcttatatgcactttttaaatatatactattttgaagattccttatgtaaatgcaaatttcctagttaaaaccgaataacagagatctgaaatgactgagaaaaacttttttattaaaggaaggaattaatttaaggcaatttttaactatgtagaactaattgcccatgtttaattatagcagacacgccattctaacaggtatttgataccattggatgcattattctaggttttttctttaataaaaatggaacaagttttcatttacattccaagctgtcaggaaatgaagaatattttattatctaggattttatctgatgtagttgcttaaagatctgatgtgctataattccatgaatcagaaataataaaatgctatcattctggatctgaagacttttgatactttttcaaaagcaaaattaatttcaggaacctttgataagttgttgttataattaatctaattttgtatagtttttgtaaataaattaccatccttccacaattagggatgcttttatccccccatcactaattgcagttgtttgataccaaaataaatttacgtagagatccttaacttaaaataaattaattttttcaaaaaacataaatctggaactgttgtttctatatttgataacaaatacagtatattttatttataagccatggtctactgatactgtatgaggactttccttatatataaaagttgcagggattgtgttttattagctgctttaattatgttaattttagagagtttttaaatggaaatagaggacatttatgaaacgctggaattgcagttacaaattctttttgttgttgttgttcctgaacatgccttggaataattctaccattttttccccctccataaatctttctaataaagcatagaaaaagcctatatgattttaaatgcttctcttaagctggtaaacagatttgagttatgagttcattgttattgcttcaagatgaaaagacagtgatataatttttctatttcaacttaaaagtaatagttaatatgctaaagtagtacagaataaactttattgctgcttactaactacaaaatactgtagatggcatctgtatgattaaacatataaagtaaaacaggtctgagggctttgtagatgattaaagtctccaccttcatgaagcattgtgtgtctgttctactctatgcagaatggtttacaggacatttgactggagtgtatatgtgtgaggtagaatgaacagaataaattagaggctacttaattc

SEQ ID NO: 3008 - protein, 216 aa, Homosapiens
MLQQCFCIIGEKKLQKMLPDVLKNCSIEEIKKLCQEQLELLSEKKILKILEGDNGMDSDMEEEADDGSKMGSDLVSQQDICIDSASSVRENKQPEGLELKQGKGEDSDVLSINADAYDSDIEGPCNEEAAAPEAPENTVQSEAGQIDDLEKDIEKSVNEILGLAESSPNEPKAATLAVPPPEDVQPSAQQLELLELEMRARAIKALMKAGDIKKPA

SEQ ID NO: 3009 - DNA, 2977 bp, Homosapiens
cagtgcctgccgcccacggccgcaggagtcgggcttcggtcgcaccagagacagcggactttcctccgatggttgcagcagagggatcatgacggggaaaaagtcctcccgggagaaacggcgcaaacgtagcagtcaggaggcggccgcagcgctcgcggccccggacatcgtacccgcgttggccagcggcagcagtggaagcactagcggctgcgggagcgccgggggctgcgggagcgtcagctgctgtgggaacgccaattttagtggaagtgtcaccggcggtgggagcggcggcagctgttggggcgggagcagcgtggagcgcagcgagcgccggaagcggaggagtaccgactcttccagcgtctcgggctccttgcagcaggtgcgtgcgcgcccctctggccgcttcctggagctgctgctttttcggaagaagtcgggcttccagagggatggggcgcaggctggagctcactgctagcgcggcaatctcaaggtcgtccgtccttgaggttcatgttcctacctaagtcctggaaactaaatatattttgccaactttggaaaaagaattattcttggcagagcacagtgaccttgaagaaggtggactggacctgactgtgtcattgaaaccagttagtttctatatatcagacaaaaaagaaatgcttcagcagtgcttctgtattataggagagaaaaagttacagaagatgcttcctgatgtgttaaagaactgttcaatagaagaaattaaaaaactatgccaggaacagttagagctcctgtctgaaaaaaaaattttgaagattcttgagggtgacaatggaatggactctgatatggaagaggaagcagatgatggttctaagatgggatctgatttagtcagtcagaaaaggggaagatagtgatgtactcagtataaatgcagatgcttatgacagcgacatagaaggcccatgcaacgaagaagcagctgctcccgaggcaccagaaaatacagtccaaagtgaagctggtcagatagatgacctggagaaagacattgagaaaagtgtgaatgagattctaggactggcagagtctagcccaaacgaacccaaagcagccaccctggctgttcctccaccagaagatgttcaaccttctgcacagcaactggagctgctagaacttgagatgagggcaagagcgattaaagccctaatgaaagctggtgatataaaaaagccagcctaggtatttaacttgattttgaattttaggtatgtttgaacaaagccacatcatttaattttgtatctaaaatttatttggggtcttatatgttatttctcatgtaacccttattaggactcattttagccctaaattacctgtggctgtttctttttatttttttgactacttttatattataaatgtgtgttactgtcttatgaattcatggcaatatagttggatagcctggatactttgttagatgagtatttagctgtgtctgcaaatcttaaaagccattagcaaagagtcgtggtatttttttctttatttttaaatgtttgggcaccaaacctaaaagcaaaagattgacgaagcatgtttctcttaaggctacttgtattttacaatacaatattaaattatttaatttgagaaatttagttttgcttatatgcactttttaaatatatactattttgaagattccttatgtaaatgcaaatttcctagttaaaaccgaataacagagatctgaaatgactgagaaaaacttttttattaaaggaaggaattaatttaaggcaatttttaactatgtagaactaattgcccatgtttaattatagcagacacgccattctaacaggtatttgataccattggatgcattattctaggttttttctttaataaaaatggaacaagttttcatttacattccaagctgtcaggaaatgaagaatattttattatctaggattttatctgatgtagttgcttaaagatctgatgtgctataattccatgaatcagaaataataaaatgctatcattctggatctgaagacttttgatactttttcaaaagcaaaattaatttcaggaacctttgataagttgttgttataattaatctaattttgtatagtttttgtaaataaattaccatccttccacaattagggatgcttttatccccccatcactaattgcagttgtttgataccaaaataaatttacgtagagatccttaacttaaaataaattaattttttcaaaaaacataaatctggaactgttgtttctatatttgataacaaatacagtatattttatttataagccatggtctactgatactgtatgaggactttccttatatataaaagttgcagggattgtgttttattagctgctttaattatgttaattttagagagtttttaaatggaaatagaggacatttatgaaacgctggaattgcagttacaaattctttttgttgttgttgttcctgaacatgccttggaataattctaccattttttccccctccataaatctttctaataaagcatagaaaaagcctatatgattttaaatgcttctcttaagctggtaaacagatttgagttatgagttcattgttattgcttcaagatgaaaagacagtgatataatttttctatttcaacttaaaagtaatagttaatatgctaaagtagtacagaataaactttattgctgcttactaactacaaaatactgtagatggcatctgtatgattaaacatataaagtaaaacaggtctgagggctttgtagatgattaaagtctccaccttcatgaagcattgtgtgtctgttctactctatgcagaatggtttacaggacatttgactggagtgtatatgtgtgaggtagaatgaacagaataaattagaggctacttaattc

SEQ ID NO: 3010 - protein, 81 aa, Homosapiens
MLQQCFCIIGEKKLQKMLPDVLKNCSIEEIKKLCQEQLELLSEKKILKILEGDNGMDSDMEEEADDGSKMGSDLVSQKRGR

SEQ ID NO: 3011 - DNA, 2942 bp, Homosapiens
cagtgcctgccgcccacggccgcaggagtcgggcttcggtcgcaccagagacagcggactttcctccgatggttgcagcagagggatcatgacggggaaaaagtcctcccgggagaaacggcgcaaacgtagcagtcaggaggcggccgcagcgctcgcggccccggacatcgtacccgcgttggccagcggcagcagtggaagcactagcggctgcgggagcgccgggggctgcgggagcgtcagctgctgtgggaacgccaattttagtggaagtgtcaccggcggtgggagcggcggcagctgttggggcgggagcagcgtggagcgcagcgagcgccggaagcggaggagtaccgactcttccagcgtctcgggctccttgcagcaggtgcgtgcgcgcccctctggccgcttcctggagctgctgctttttcggaagaagtcgggcttccagagggatggggcgcaggctggagctcactgctagcgcggcaatctcaaggtcgtccgtccttgaggttcatgttcctacctaagtcctggaaactaaatatattttgccaactttggaaaaagaattattcttggcagagcacagtgaccttgaagaaggtggactggacctgactgtgtcattgaaaccagttagtttctatatatcagacaaaaaagaaatgcttcagcagtgcttctgtattataggagagaaaaagttacagaagatgcttcctgatgtgttaaagaactgttcaatagaagaaattaaaaaactatgccaggaacagttagagctcctgtctgaaaaaaaaattttgaagattcttgagggtgacaatggaatggactctgatatggaagaggaagcagatgatggttctaagatgggatctgatttagtcagtcagcaagacatctgtatagattctgcttcatccgtgagagagaataagcaacctgaaggtttggaattaaaacaaggaaaaggggaagatagtgatgtactcagtataaatgcagatgcttatgacagcgacatagaaggcccatgcaacgaagaagcagctgctcccgaggcaccagaaaatacagtccaaagtgaagctggtcagatagatgacctggagaaagacattgagaaaagtgtgaatgagattctaggactggcagagtctagcccaaacgaacccaaagcagccaccctggctgttcctccaccagaagatgttcaaccttctgcacagcaactggagctgctagaacttgagatgagggcaagagcgattaaagccctaatgaaagctggtgatataaaaaagccagcctaggtatttaacttgattttgaattttaggtatgtttgaacaaagccacatcatttaattttgtatctaaaatttatttggggtcttatatgttatttctcatgtaacccttattaggactcattttagccctaaattacctgtggctgtttctttttatttttttgactacttttatattataaatgtgtgttactgtcttatgaattcatggcaatatagttggatagcctggatactttgttagatgagtatttagctgtgtctgcaaatcttaaaagccattagcaaagagtcgtggtatttttttctttatttttaaatgtttgggcaccaaacctaaaagcaaaagattgacgaagcatgtttctcttaaggctacttgtattttacaatacaatattaaattatttaatttgagaaatttagttttgcttatatgcactttttaaatatatactattttgaagattccttatgtaaatgcaaatttcctagttaaaaccgaataacagagatctgaaatgactgagaaaaacttttttattaaaggaaggaattaatttaaggcaatttttaactatgtagaactaattgcccatgtttaattatagcagacacgccattctaacaggtatttgataccattggatgcattattctaggttttttctttaataaaaatggaacaagttttcatttacattccaagctgtcaggaaatgaagaatattttattatctaggattttatctgatgtagttgcttaaagatctgatgtgctataattccatgaatcagaaataataaaatgctatcattctggatctgaagacttttgatactttttcaaaagcaaaattaatttcaggaacctttgataagttgttgttataattaatctaattttgtatagtttttgtaaataaattaccatccttccacaattagggatgcttttatccccccatcactaattgcagttgtttgataccaaaataaatttacgtagagatccttaacttaaaataaattaattttttcaaaaaacataaatctggaactgttgtttctatatttgataacaaatacagtatattttatttataagccatggtctactgatactgtatgaggactttccttatatataaaagttgcagggattgtgttttattagctgctttaattatgttaattttagagagtttttaaatggaaatagaggacatttatgaaacgctggaattgcagttacaaattctttttgttgttgttgttcctgaacatgccttggaataattctaccattttttccccctccataaatctttctaataaagcatagaaaaagcctatatgattttaaatgcttctcttaagctggtaaacagatttgagttatgagttcattgttattgcttcaagatgaaaagacagtgatataatttttctatttcaacttaaaagtaatagttaatatgctaaagtagtacagaataaactttattgctgcttactaactacaaaatactgtagatggcatctgtatgattaaacatataaagtaaaacaggtctgagggctttgtagatgattaaagtctccaccttcatg

SEQ ID NO: 3012 - protein, 216 aa, Homosapiens; identical to SEQ ID NO: 3008

SEQ ID NO: 3013 - DNA, 2868 bp, Homosapiens
cagtgcctgccgcccacggccgcaggagtcgggcttcggtcgcaccagagacagcggactttcctccgatggttgcagcagagggatcatgacggggaaaaagtcctcccgggagaaacggcgcaaacgtagcagtcaggaggcggccgcagcgctcgcggccccggacatcgtacccgcgttggccagcggcagcagtggaagcactagcggctgcgggagcgccgggggctgcgggagcgtcagctgctgtgggaacgccaattttagtggaagtgtcaccggcggtgggagcggcggcagctgttggggcgggagcagcgtggagcgcagcgagcgccggaagcggaggagtaccgactcttccagcgtctcgggctccttgcagcaggtgcgtgcgcgcccctctggccgcttcctggagctgctgctttttcggaagaagtcgggcttccagagggatggggcgcaggctggagctcactgctagcgcggcaatctcaaggtcgtccgtccttgaggttcatgttcctacctaagtcctggaaactaaatatattttgccaactttggaaaaagaattattcttggcagagcacagtgaccttgaagaaggtggactggacctgactgtgtcattgaaaccagttagtttctatatatcagacaaaaaagaaatgcttcagcagtgcttctgtattataggagagaaaaagttacagaagatgcttcctgatgtgttaaagaactgttcaatagaagaaattaaaaaactatgccaggaacagttagagctcctgtctgaaaaaaaaattttgaagattcttgagggtgacaatggaatggactctgatatggaagaggaagcagatgatggttctaagatgggatctgatttagtcagtcagaaaaggggaagatagtgatgtactcagtataaatgcagatgcttatgacagcgacatagaaggcccatgcaacgaagaagcagctgctcccgaggcaccagaaaatacagtccaaagtgaagctggtcagatagatgacctggagaaagacattgagaaaagtgtgaatgagattctaggactggcagagtctagcccaaacgaacccaaagcagccaccctggctgttcctccaccagaagatgttcaaccttctgcacagcaactggagctgctagaacttgagatgagggcaagagcgattaaagccctaatgaaagctggtgatataaaaaagccagcctaggtatttaacttgattttgaattttaggtatgtttgaacaaagccacatcatttaattttgtatctaaaatttatttggggtcttatatgttatttctcatgtaacccttattaggactcattttagccctaaattacctgtggctgtttctttttatttttttgactacttttatattataaatgtgtgttactgtcttatgaattcatggcaatatagttggatagcctggatactttgttagatgagtatttagctgtgtctgcaaatcttaaaagccattagcaaagagtcgtggtatttttttctttatttttaaatgtttgggcaccaaacctaaaagcaaaagattgacgaagcatgtttctcttaaggctacttgtattttacaatacaatattaaattatttaatttgagaaatttagttttgcttatatgcactttttaaatatatactattttgaagattccttatgtaaatgcaaatttcctagttaaaaccgaataacagagatctgaaatgactgagaaaaacttttttattaaaggaaggaattaatttaaggcaatttttaactatgtagaactaattgcccatgtttaattatagcagacacgccattctaacaggtatttgataccattggatgcattattctaggttttttctttaataaaaatggaacaagttttcatttacattccaagctgtcaggaaatgaagaatattttattatctaggattttatctgatgtagttgcttaaagatctgatgtgctataattccatgaatcagaaataataaaatgctatcattctggatctgaagacttttgatactttttcaaaagcaaaattaatttcaggaacctttgataagttgttgttataattaatctaattttgtatagtttttgtaaataaattaccatccttccacaattagggatgcttttatccccccatcactaattgcagttgtttgataccaaaataaatttacgtagagatccttaacttaaaataaattaattttttcaaaaaacataaatctggaactgttgtttctatatttgataacaaatacagtatattttatttataagccatggtctactgatactgtatgaggactttccttatatataaaagttgcagggattgtgttttattagctgctttaattatgttaattttagagagtttttaaatggaaatagaggacatttatgaaacgctggaattgcagttacaaattctttttgttgttgttgttcctgaacatgccttggaataattctaccattttttccccctccataaatctttctaataaagcatagaaaaagcctatatgattttaaatgcttctcttaagctggtaaacagatttgagttatgagttcattgttattgcttcaagatgaaaagacagtgatataatttttctatttcaacttaaaagtaatagttaatatgctaaagtagtacagaataaactttattgctgcttactaactacaaaatactgtagatggcatctgtatgattaaacatataaagtaaaacaggtctgagggctttgtagatgattaaagtctccaccttcatg

SEQ ID NO: 3014 - protein, 81 aa, Homosapiens; identical to SEQ ID NO: 3010

SEQ ID NO: 3015 - DNA, 2369 bp, Homosapiens
cagtgcctgccgcccacggccgcaggagtcgggcttcggtcgcaccagagacagcggactttcctccgatggttgcagcagagggatcatgacggggaaaaagtcctcccgggagaaacggcgcaaacgtagcagtcaggaggcggccgcagcgctcgcggccccggacatcgtacccgcgttggccagcggcagcagtggaagcactagcggctgcgggagcgccgggggctgcgggagcgtcagctgctgtgggaacgccaattttagtggaagtgtcaccggcggtgggagcggcggcagctgttggggcgggagcagcgtggagcgcagcgagcgccggaagcggaggagtaccgactcttccagcgtctcgggctccttgcagcaggtgcgtgcgcgcccctctggccgcttcctggagctgctgctttttcggaagaagtcgggcttccagagggatggggcgcaggctggagctcactgctagcgcggcaatctcaaggtcgtccgtccttgaggttcatgttcctacctaagtcctggaaactaaatatattttgccaactttggaaaaagaattattcttggcagagcacagtgaccttgaagaaggtggactggacctgactgtgtcattgaaaccagttagtttctatatatcagacaaaaaagaaatgcttcagcagtgcttctgtattataggagagaaaaagttacagaagatgcttcctgatgtgttaaagaactgttcaatagaagaaattaaaaaactatgccaggaacagttagagctcctgtctgaaaaaaaaattttgaagattcttgagggtgacaatggaatggactctgatatggaagaggaagcagatgatggttctaagatgggatctgatttagtcagtcagcaagacatctgtatagattctgcttcatccgtgagagagaataagcaacctgaaggtttggaattaaaacaaggaaaaggggaagatagtgatgtactcagtataaatgcagatgcttatgacagcgacatagaaggcccatgcaacgaagaagcagctgctcccgaggcaccagaaaatacagtccaaagtgaagctggtcagatagatgacctggagaaagacattgagaaaagtgtgaatgagattctaggactggcagagtctagcccaaacgaacccaaagcagccaccctggctgttcctccaccagaagatgttcaaccttctgcacagcaactggagctgctagaacttgagatgagggcaagagcgattaaagccctaatgaaagctggtgatataaaaaagccagcctaggtatttaacttgattttgaattttaggtatgtttgaacaaagccacatcatttaattttgtatctaaaatttatttggggtcttatatgttatttctcatgtaacccttattaggactcattttagccctaaattacctgtggctgtttctttttatttttttgactacttttatattataaatgtgtgttactgtcttatgaattcatggcaatatagttggatagcctggatactttgttagatgagtatttagctgtgtctgcaaatcttaaaagccattagcaaagagtcgtggtatttttttctttatttttaaatgtttgggcaccaaacctaaaagcaaaagattgacgaagcatgtttctcttaaggctacttgtattttacaatacaatattaaattatttaatttgagaaatttagttttgcttatatgcactttttaaatatatactattttgaagattccttatgtaaatgcaaatttcctagttaaaaccgaataacagagatctgaaatgactgagaaaaacttttttattaaaggaaggaattaatttaaggcaatttttaactatgtagaactaattgcccatgtttaattatagcagacacgccattctaacaggtatttgataccattggatgcattattctaggttttttctttaataaaaatggaacaagttttcatttacattccaagctgtcaggaaatgaagaatattttattatctaggattttatctgatgtagttgcttaaagatctgatgtgctataattccatgaatcagaaataataaaatgctatcattctggatctgaagacttttgatactttttcaaaagcaaaattaatttcaggaacctttgataagttgttgttataattaatctaattttgtatagtttttgtaaataaattaccatccttccacaattagggatgcttttatccccccatcactaattgcagttgtttgataccaaaataaatttacgtagagatccttaacttaaaataaattaattttttc

SEQ ID NO: 3016 - protein, 216 aa, Homosapiens; identical to SEQ ID NO: 3008

SEQ ID NO: 3017 - DNA, 2295 bp, Homosapiens
cagtgcctgccgcccacggccgcaggagtcgggcttcggtcgcaccagagacagcggactttcctccgatggttgcagcagagggatcatgacggggaaaaagtcctcccgggagaaacggcgcaaacgtagcagtcaggaggcggccgcagcgctcgcggccccggacatcgtacccgcgttggccagcggcagcagtggaagcactagcggctgcgggagcgccgggggctgcgggagcgtcagctgctgtgggaacgccaattttagtggaagtgtcaccggcggtgggagcggcggcagctgttggggcgggagcagcgtggagcgcagcgagcgccggaagcggaggagtaccgactcttccagcgtctcgggctccttgcagcaggtgcgtgcgcgcccctctggccgcttcctggagctgctgctttttcggaagaagtcgggcttccagagggatggggcgcaggctggagctcactgctagcgcggcaatctcaaggtcgtccgtccttgaggttcatgttcctacctaagtcctggaaactaaatatattttgccaactttggaaaaagaattattcttggcagagcacagtgaccttgaagaaggtggactggacctgactgtgtcattgaaaccagttagtttctatatatcagacaaaaaagaaatgcttcagcagtgcttctgtattataggagagaaaaagttacagaagatgcttcctgatgtgttaaagaactgttcaatagaagaaattaaaaaactatgccaggaacagttagagctcctgtctgaaaaaaaaattttgaagattcttgagggtgacaatggaatggactctgatatggaagaggaagcagatgatggttctaagatgggatctgatttagtcagtcagaaaaggggaagatagtgatgtactcagtataaatgcagatgcttatgacagcgacatagaaggcccatgcaacgaagaagcagctgctcccgaggcaccagaaaatacagtccaaagtgaagctggtcagatagatgacctggagaaagacattgagaaaagtgtgaatgagattctaggactggcagagtctagcccaaacgaacccaaagcagccaccctggctgttcctccaccagaagatgttcaaccttctgcacagcaactggagctgctagaacttgagatgagggcaagagcgattaaagccctaatgaaagctggtgatataaaaaagccagcctaggtatttaacttgattttgaattttaggtatgtttgaacaaagccacatcatttaattttgtatctaaaatttatttggggtcttatatgttatttctcatgtaacccttattaggactcattttagccctaaattacctgtggctgtttctttttatttttttgactacttttatattataaatgtgtgttactgtcttatgaattcatggcaatatagttggatagcctggatactttgttagatgagtatttagctgtgtctgcaaatcttaaaagccattagcaaagagtcgtggtatttttttctttatttttaaatgtttgggcaccaaacctaaaagcaaaagattgacgaagcatgtttctcttaaggctacttgtattttacaatacaatattaaattatttaatttgagaaatttagttttgcttatatgcactttttaaatatatactattttgaagattccttatgtaaatgcaaatttcctagttaaaaccgaataacagagatctgaaatgactgagaaaaacttttttattaaaggaaggaattaatttaaggcaatttttaactatgtagaactaattgcccatgtttaattatagcagacacgccattctaacaggtatttgataccattggatgcattattctaggttttttctttaataaaaatggaacaagttttcatttacattccaagctgtcaggaaatgaagaatattttattatctaggattttatctgatgtagttgcttaaagatctgatgtgctataattccatgaatcagaaataataaaatgctatcattctggatctgaagacttttgatactttttcaaaagcaaaattaatttcaggaacctttgataagttgttgttataattaatctaattttgtatagtttttgtaaataaattaccatccttccacaattagggatgcttttatccccccatcactaattgcagttgtttgataccaaaataaatttacgtagagatccttaacttaaaataaattaattttttc

SEQ ID NO: 3018 - protein, 81 aa, Homosapiens; identical to SEQ ID NO: 3010

SEQ ID NO: 3019 - DNA, 2569 bp, Homosapiens
aacttttccctattctctttattgtcatagcgttgttaatatcttaagatttggaggtaaacggaaatggagaatcagcaactatacttcaaccttattgtaaacagacaaaacactaacaataaaaagttttgaagttaaaaggacgtaagttccaccttctatcctttgtagagatataaaaacaaaacaaaacaaactctgactagacaggctacccgctacacactcaaatcgacctccgcgaccggagggggaagcgcaactggttatggcaacccccctgccaccccggcccataacgcttcaccacgttctgtgccacggccggaagtgacgcataacctgcgacgccagtgcctgccgcccacggccgcaggagtcgggcttcggtcgcaccagagacagcggactttcctccgatggttgcagcagagggatcatgacggggaaaaagtcctcccgggagaaacggcgcaaacgtagcagtcaggaggcggccgcagcgctcgcggccccggacatcgtacccgcgttggccagcggcagcagtggaagcactagcggctgcgggagcgccgggggctgcgggagcgtcagctgctgtgggaacgccaattttagtggaagtgtcaccggcggtgggagcggcggcagctgttggggcgggagcagcgtggagcgcagcgagcgccggaagcggaggagtaccgactcttccagcgtctcgggctccttgcagcaggaaactaaatatattttgccaactttggaaaaagaattattcttggcagagcacagtgaccttgaagaaggtggactggacctgactgtgtcattgaaaccagttagtttctatatatcagacaaaaaagaaatgcttcagcagtgcttctgtattataggagagaaaaagttacagaagatgcttcctgatgtgttaaagaactgttcaatagaagaaattaaaaaactatgccaggaacagttagagctcctgtctgaaaaaaaaattttgaagattcttgagggtgacaatggaatggactctgatatggaagaggaagcagatgatggttctaagatgggatctgatttagtcagtcagcaagacatctgtatagattctgcttcatccgtgagagagaataagcaacctgaaggtttggaattaaaacaaggaaaaggggaagatagtgatgtactcagtataaatgcagatgcttatgacagcgacatagaaggcccatgcaacgaagaagcagctgctcccgaggcaccagaaaatacagtccaaagtgaagctggtcagatagatgacctggagaaagacattgagaaaagtgtgaatgagattctaggactggcagagtctagcccaaacgaacccaaagcagccaccctggctgttcctccaccagaagatgttcaaccttctgcacagcaactggagctgctagaacttgagatgagggcaagagcgattaaagccctaatgaaagctggtgatataaaaaagccagcctaggtatttaacttgattttgaattttaggtatgtttgaacaaagccacatcatttaattttgtatctaaaatttatttggggtcttatatgttatttctcatgtaacccttattaggactcattttagccctaaattacctgtggctgtttctttttatttttttgactacttttatattataaatgtgtgttactgtcttatgaattcatggcaatatagttggatagcctggatactttgttagatgagtatttagctgtgtctgcaaatcttaaaagccattagcaaagagtcgtggtatttttttctttatttttaaatgtttgggcaccaaacctaaaagcaaaagattgacgaagcatgtttctcttaaggctacttgtattttacaatacaatattaaattatttaatttgagaaatttagttttgcttatatgcactttttaaatatatactattttgaagattccttatgtaaatgcaaatttcctagttaaaaccgaataacagagatctgaaatgactgagaaaaacttttttattaaaggaaggaattaatttaaggcaatttttaactatgtagaactaattgcccatgtttaattatagcagacacgccattctaacaggtatttgataccattggatgcattattctaggttttttctttaataaaaatggaacaagttttcatttacattccaagctgtcaggaaatgaagaatattttattatctaggattttatctgatgtagttgcttaaagatctgatgtgctataattccatgaatcagaaataataaaatgctatcattctggatctgaagacttttgatactttttcaaaagcaaaattaatttcaggaacctttgataagttgttgttataattaatctaattttgtatagtttttgtaaataaattaccatccttccacaattagggatgcttttatccccccatcactaattgcagttgtttgataccaaaataaatttacgtagagatccttaacttaaaataaattaattttttc

SEQ ID NO: 3020 - protein, 361 aa, Homosapiens
MTGKKSSREKRRKRSSQEAAAALAAPDIVPALASGSSGSTSGCGSAGGCGSVSCCGNANFSGSVTGGGSGGSCWGGSSVERSERRKRRSTDSSSVSGSLQQETKYILPTLEKELFLAEHSDLEEGGLDLTVSLKPVSFYISDKKEMLQQCFCIIGEKKLQKMLPDVLKNCSIEEIKKLCQEQLELLSEKKILKILEGDNGMDSDMEEEADDGSKMGSDLVSQQDICIDSASSVRENKQPEGLELKQGKGEDSDVLSINADAYDSDIEGPCNEEAAAPEAPENTVQSEAGQIDDLEKDIEKSVNEILGLAESSPNEPKAATLAVPPPEDVQPSAQQLELLELEMRARAIKALMKAGDIKKPA

SEQ ID NO: 3021 - DNA, 4948 bp, Homosapiens
accacaaactgttgggcccggagtcggaagagacccgggtttgggaaggaccccagggtcaggcgtcctggtggaagggcgggcctctttctctcttgctcagcagggagtccagagccctggaggaaagccagctcagctccgcatcggcgtcggcggttgggacgcacacactctgcgtcatggagggctgaggccgatgatgaattccggagtgcctgtcaggcttgctgtgtcactcggcccgctcggcgcgccccttcccagccgcccttccgtaccggctctcgggctcttccggtctccggccgccccttacctgcaggctcttctcccgccgcggcccggcgctctccgagtcgcccctgcggactggtctcgcacagtgcctgggcaccgggcgccagacagacactggccatgacgagcggcgcaaccaggtaccggctgagctgctcgctccggggccacgagctggacgtacggggcctggtgtgctgcgcctatccgccgggagcctttgtgtccgtgtcccgagaccgcaccacccgcctctgggccccagacagtccaaacaggagctttacagaaatgcactgtatgagtggccattccaattttgtatcttgtgtatgcatcataccctcaagtgacatctaccctcatggcctaattgccaccggtggaaatgaccacaatatatgcattttctcactggacagtccaatgccactttatattctaaaaggccacaaaaatactgtttgtagtctatcatctggaaaatttgggacattacttagtggttcatgggacaccactgctaaagtctggctgaatgacaagtgcatgatgaccttgcagggtcatacagctgcagtgtgggcggtaaagatcttacctgaacagggcttaatgttgactggatcagcagacaagactgttaaactgtggaaggctggaagatgtgagaggactttttcagggcatgaagactgtgtaagaggtttggcaattttgagtgaaacagaatttctttcctgtgcaaatgatgctagtattagaaggtggcaaatcactggcgagtgtcttgaagtatattatggacatacaaattatatttatagcatatccgtttttccaaattgtagagactttgtgacaacagcagaggacagatctctgagaatctggaaacatggggaatgtgctcaaactatccgacttccagctcagtctatatggtgctgctgtgtgctcgacaatggtgacattgtggttggtgcgagtgatggcattattagagtgtttacagaatcagaagatcgaacagcaagtgctgaagaaatcaaggcttttgaaaaagaactgtctcacgcaaccattgattctaaaactggcgatttaggggacatcaatgctgagcagcttcctgggagggaacatcttaatgaacctggtactagagaaggacagactcgtctaatcagagatggggagaaagtcgaagcctatcagtggagtgttagtgaagggaggtggataaaaattggtgatgttgttggctcatctggtgctaatcagcaaacatctggaaaagttttatatgaagggaaagaatttgattatgttttctcaattgatgtcaatgaaggtggaccatcatataaattgccatataataccagtgatgacccttggttaactgcatacaacttcttacagaagaatgatttgaatcctatgtttctggatcaagtagctaaatttattattgataacacaaaaggtcaaatgttgggacttgggaatcccagcttttcagatccatttacaggtggtggtcggtatgttccgggctcttcgggatcttctaacacactacccacagcagatccttttacaggtgctggtcgttatgtaccaggttctgcaagtatgggaactaccatggccggagttgatccatttacagggaatagtgcctaccgatcagctgcatctaaaacaatgaatatttatttccctaaaaaagaggctgtcacatttgaccaagcaaaccctacacaaatattaggtaaactgaaggaacttaatggaactgcacctgaagagaagaagttaactgaggatgacttgatacttcttgagaagatactgtctctaatatgtaatagttcttcagaaaaacccacagtccagcaacttcagattttgtggaaagctattaactgtcctgaagatattgtctttcctgcacttgacattcttcggttgtcaattaaacaccccagtgtgaatgagaacttctgcaatgaaaaggaaggggctcagttcagcagtcatcttatcaatcttctgaaccctaaaggaaagccagcaaaccagctgcttgctctcaggactttttgcaattgttttgttggccaggcaggacaaaaactcatgatgtcccagagggaatcactgatgtcccatgcaatagaactgaaatcagggagcaataagaacattcacattgctctggctacattggccctgaactattctgtttgttttcataaagaccataacattgaagggaaagcccaatgtttgtcactaattagcacaatcttggaagtagtacaagacctagaagccacttttagacttcttgtggctcttggaacacttatcagtgatgattcaaatgctgtacaattagccaagtctttaggtgttgattctcaaataaaaaagtattcctcagtatcagaaccagctaaagtaagtgaatgctgtagatttatcctaaatttgctgtagcagtggggaagagggacggatatttttaattgattagtgtttttttcctcacatttgacatgactgataacagataattaaaaaaagagaatacggtggattaagtaaaattttacatcttgtaaagtggtggggaggggaaacagaaataaaatttttgcactgctgaactgtgagattttcctgtgtaatttgggtagattttcaagagtgtgaacacaaatttaaaataagctataatcagcaacaacacaatgacaatgacatcttccccttaccttagccactaagaagacaagggctgttactcatataacttgcttttattacttaatgtacaccaaactgttgttgtcaattatcttttatttaacttctccaccttcattgctagatccttcgaacagcactgatacatttcaaggtcttgttttaggataactactttaaaattttttaaattatattaaatttataaaataatttataaattcatatattaaaacaatataagataatttcttgatttgtcatttataaatcctaaagtatatttgtttaatggcctatttttagatgaagaaaaagccagttggtaagctgtgttagtcatgtatcagttcagacagacgaggtctcaatttaactccaggcttagatccagtttcttttgcccttcactatttgaggtaacttcatttttcattctagttttgatatttggctgtttatttttgtcattttccattatttcaaagggaatttggaacatgttgaattttatcaggtggttacataagcaagagtacatcaaactgtattatttgaaagtctagaacctgtcatgtgaaattactatttttgagccctctatgtggtccaggcagaatagtagacacactgatatttaatccttaaaacccctttaaatgagggccagtattatctctgctttcagaagtagacataataggatgaatcatataacagaaaaaaaaaagtgaagccaagagggagttaactacttaaagtacatgctatgctatactttctagagagatcacagatgtgtgtgaacatcctagcaattaacacaaagaaggaaccatcacattaattacacaatttattgtgtctgaggtaacccagtttcttgagagaagcgtaactattttcaaaagtgggaaagatcttttcataaagacgttgccagaaatagcaacattctcaatactcgtggtgtaaaaaccatgaatcccctggcttaatgccaaattatagccttagaagaataattgttccccaaatgggcaagaaaggttctaattgtcaagagtaacccaagtaagaacttttggaatatcaaaaggaaatgagcaaaatgtaaatagaggggatatgtactttgctgagtattaaattggaactacctggtgtgtacctggactaaatattctgttcactggctcagttgagtacctatacttttcgttttttgattgggtttaggtggttatgtcaaagttaaatggcaaaattaggaatttaacccaggtctggctggttcctttacaatacactgctttcttaagtacaaataatttaattgcaatatttaggaaaagtaggtacctttgaataatgataagaaacagtcttggttaagaatatgagttccctcttcaaaatgtaaggggtggcaaaatgtaaacactgcttcctattactgtgcaagtttttttatgtcaactttactatttcatgtttgttgtggagattacaaaatatagcttagcaaaaggaaacaatctcacttgaaggatatgttaaataatttaatgatattttaaagattttcttttttagttaaactttcctatgattctcttaatgttttttctgaatacaaaagtaataaatatttattgagtaaaacacacacaccccaaataaaaattgcctgtaaggccactatctagagaaaactattcttaacatcttgtggcatagtgactatgtatgtaaatgtattttattttattaaaaaagcgttgtatcatacatactctttgataacctgatttttaaacttatatttggtacaaagagctccacattaataaatacaatattctatcat

SEQ ID NO: 3022 - protein, 795 aa, Homosapiens; identical to SEQ ID NO: 378

SEQ ID NO: 3023 - DNA, 2976 bp, Homosapiens
accacaaactgttgggcccggagtcggaagagacccgggtttgggaaggaccccagggtcaggcgtcctggtggaagggcgggcctctttctctcttgctcagcagggagtccagagccctggaggaaagccagctcagctccgcatcggcgtcggcggttgggacgcacacactctgcgtcatggagggctgaggccgatgatgaattccggagtgcctgtcaggcttgctgtgtcactcggcccgctcggcgcgccccttcccagccgcccttccgtaccggctctcgggctcttccggtctccggccgccccttacctgcaggctcttctcccgccgcggcccggcgctctccgagtcgcccctgcggactggtctcgcacagtgcctgggcaccgggcgccagacagacactggccatgacgagcggcgcaaccaggtaccggctgagctgctcgctccggggccacgagctggacgtacggggcctggtgtgctgcgcctatccgccgggagcctttgtgtccgtgtcccgagaccgcaccacccgcctctgggccccagacagtccaaacaggagctttacagaaatgcactgtatgagtggccattccaattttgtatcttgtgtatgcatcataccctcaagtgacatctaccctcatggcctaattgccaccggtggaaatgaccacaatatatgcattttctcactggacagtccaatgccactttatattctaaaaggccacaaaaatactgtttgtagtctatcatctggaaaatttgggacattacttagtggttcatgggacaccactgctaaagtctggctgaatgacaagtgcatgatgaccttgcagggtcatacagctgcagtgtgggcggtaaagatcttacctgaacagggcttaatgttgactggatcagcagacaagactgttaaactgtggaaggctggaagatgtgagaggactttttcagggcatgaagactgtgtaagaggtttggcaattttgagtgaaacagaatttctttcctgtgcaaatgatgctagtattagaaggtggcaaatcactggcgagtgtcttgaagtatattatggacatacaaattatatttatagcatatccgtttttccaaattgtagagactttgtgacaacagcagaggacagatctctgagaatctggaaacatggggaatgtgctcaaactatccgacttccagctcagtctatatggtgctgctgtgtgctcgacaatggtgacattgtggttggtgcgagtgatggcattattagagtgtttacagaatcagaagatcgaacagcaagtgctgaagaaatcaaggcttttgaaaaagaactgtctcacgcaaccattgattctaaaactggcgatttaggggacatcaatgctgagcagcttcctgggagggaacatcttaatgaacctggtactagagaaggacagactcgtctaatcagagatggggagaaagtcgaagcctatcagtggagtgttagtgaagggaggtggataaaaattggtgatgttgttggctcatctggtgctaatcagcaaacatctggaaaagttttatatgaagggaaagaatttgattatgttttctcaattgatgtcaatgaaggtggaccatcatataaattgccatataataccagtgatgacccttggttaactgcatacaacttcttacagaagaatgatttgaatcctatgtttctggatcaagtagctaaatttattattgataacacaaaaggtcaaatgttgggacttgggaatcccagcttttcagatccatttacaggtggtggtcggtatgttccgggctcttcgggatcttctaacacactacccacagcagatccttttacaggtgctggtcgttatgtaccaggttctgcaagtatgggaactaccatggccggagttgatccatttacagggaatagtgcctaccgatcagctgcatctaaaacaatgaatatttatttccctaaaaaagaggctgtcacatttgaccaagcaaaccctacacaaatattaggtaaactgaaggaacttaatggaactgcacctgaagagaagaagttaactgaggatgacttgatacttcttgagaagatactgtctctaatatgtaatagttcttcagaaaaacccacagtccagcaacttcagattttgtggaaagctattaactgtcctgaagatattgtctttcctgcacttgacattcttcggttgtcaattaaacaccccagtgtgaatgagaacttctgcaatgaaaaggaaggggctcagttcagcagtcatcttatcaatcttctgaaccctaaaggaaagccagcaaaccagctgcttgctctcaggactttttgcaattgttttgttggccaggcaggacaaaaactcatgatgtcccagagggaatcactgatgtcccatgcaatagaactgaaatcagggagcaataagaacattcacattgctctggctacattggccctgaactattctgtttgttttcataaagaccataacattgaagggaaagcccaatgtttgtcactaattagcacaatcttggaagtagtacaagacctagaagccacttttagacttcttgtggctcttggaacacttatcagtgatgattcaaatgctgtacaattagccaagtctttaggtgttgattctcaaataaaaaagtattcctcagtatcagaaccagctaaagtaagtgaatgctgtagatttatcctaaatttgctgtagcagtggggaagagggacggatatttttaattgattagtgtttttttcctcacatttgacatgactgataacagataattaaaaaaagagaatacggtggattaagtaaaattttacatcttgtaaagtggtggggaggggaaacagaaataaaatttttgcactgctg

SEQ ID NO: 3024 - protein, 795 aa, Homosapiens; identical to SEQ ID NO: 378

SEQ ID NO: 3025 - DNA, 2511 bp, Homosapiens
accacaaactgttgggcccggagtcggaagagacccgggtttgggaaggaccccagggtcaggcgtcctggtggaagggcgggcctctttctctcttgctcagcagggagtccagagccctggaggaaagccagctcagctccgcatcggcgtcggcggttgggacgcacacactctgcgtcatggagggctgaggccgatgatgaattccggagtgcctgtcaggcttgctgtgtcactcggcccgctcggcgcgccccttcccagccgcccttccgtaccggctctcgggctcttccggtctccggccgccccttacctgcaggctcttctcccgccgcggcccggcgctctccgagtcgcccctgcggactggtctcgcacagtgcctgggcaccgggcgccagacagacactggccatgacgagcggcgcaaccaggtaccggctgagctgctcgctccggggccacgagctggacgtacggggcctggtgtgctgcgcctatccgccgggagcctttgtgtccgtgtcccgagaccgcaccacccgcctctgggccccagacagtccaaacaggagctttacagaaatgcactgtatgagtggccattccaattttgtatcttgtgtatgcatcataccctcaagtgacatctaccctcatggcctaattgccaccggtggaaatgaccacaatatatgcattttctcactggacagtccaatgccactttatattctaaaaggccacaaaaatactgtttgtagtctatcatctggaaaatttgggacattacttagtggttcatgggacaccactgctaaagtctggctgaatgacaagtgcatgatgaccttgcagggtcatacagctgcagtgtgggcggtaaagatcttacctgaacagggcttaatgttgactggatcagcagacaagactgttaaactgtggaaggctggaagatgtgagaggactttttcagggcatgaagactgtgtaagaggtttggcaattttgagtgaaacagaatttctttcctgtgcaaatgatgctagtattagaaggtggcaaatcactggcgagtgtcttgaagtatattatggacatacaaattatatttatagcatatccgtttttccaaattgtagagactttgtgacaacagcagaggacagatctctgagaatctggaaacatggggaatgtgctcaaactatccgacttccagctcagtctatatggtgctgctgtgtgctcgacaatggtgacattgtggttggtgcgagtgatggcattattagagtgtttacagaatcagaagatcgaacagcaagtgctgaagaaatcaaggcttttgaaaaagaactgtctcacgcaaccattgattctaaaactggcgatttaggggacatcaatgctgagcagcttcctgggagggaacatcttaatgaacctggtactagagaaggacagactcgtctaatcagagatggggagaaagtcgaagcctatcagtggagtgttagtgaagggaggtggataaaaattggtgatgttgttggctcatctggtgctaatcagcaaacatctggaaaagttttatatgaagggaaagaatttgattatgttttctcaattgatgtcaatgaaggtggaccatcatataaattgccatataataccagtgatgacccttggttaactgcatacaacttcttacagaagaatgatttgaatcctatgtttctggatcaagtagctaaatttattattgataacacaaaaggtcaaatgttgggacttgggaatcccagcttttcagatccatttacaggtggtggtcggtatgttccgggctcttcgggatcttctaacacactacccacagcagatccttttacaggtgctggtcgttatgtaccaggttctgcaagtatgggaactaccatggccggagttgatccatttacagggaatagtgcctaccgatcagctgcatctaaaacaatgaatatttatttccctaaaaaagaggctgtcacatttgaccaagcaaaccctacacaaatattaggtaaactgaaggaacttaatggaactgcacctgaagagaagaagttaactgaggatgacttgatacttcttgagaagatactgtctctaatatgtaatagttcttcagaaaaacccacagtccagcaacttcagattttgtggaaagctattaactgtcctgaaggtaaataaacactcttcaaaaatgtaaccagaaagcaagaagttttatcttcatttctatcaatattactggtatttgtggattaaatgaaagttaacttcggtagttctaaatcactatggaaaatcttcacgaaaagggttcactacactactggaattgatgatcttgtttccgttacatgccttttgagaatctgaaggtaatatatgatccccatatatgcaccagtttgtttttttgttgttgttgtttgttttctttgtttt

SEQ ID NO: 3026 - protein, 609 aa, Homosapiens
MTSGATRYRLSCSLRGHELDVRGLVCCAYPPGAFVSVSRDRTTRLWAPDSPNRSFTEMHCMSGHSNFVSCVCIIPSSDIYPHGLIATGGNDHNICIFSLDSPMPLYILKGHKNTVCSLSSGKFGTLLSGSWDTTAKVWLNDKCMMTLQGHTAAVWAVKILPEQGLMLTGSADKTVKLWKAGRCERTFSGHEDCVRGLAILSETEFLSCANDASIRRWQITGECLEVYYGHTNYIYSISVFPNCRDFVTTAEDRSLRIWKHGECAQTIRLPAQSIWCCCVLDNGDIVVGASDGIIRVFTESEDRTASAEEIKAFEKELSHATIDSKTGDLGDINAEQLPGREHLNEPGTREGQTRLIRDGEKVEAYQWSVSEGRWIKIGDVVGSSGANQQTSGKVLYEGKEFDYVFSIDVNEGGPSYKLPYNTSDDPWLTAYNFLQKNDLNPMFLDQVAKFIIDNTKGQMLGLGNPSFSDPFTGGGRYVPGSSGSSNTLPTADPFTGAGRYVPGSASMGTTMAGVDPFTGNSAYRSAASKTMNIYFPKKEAVTFDQANPTQILGKLKELNGTAPEEKKLTEDDLILLEKILSLICNSSSEKPTVQQLQILWKAINCPEGK

SEQ ID NO: 3027 - DNA, 417 bp, Homosapiens
cgcgagaattgaggatatgtttgtttcttcaccacgcttcagtgctttttggaaaaagtggaaaacagcggggcggctggaagacaaacattttatgtgaacgtttggttttcttgataatcagagcaacctccgtgtgccttacttgaagtaactctagcgagttttgctatgtccctaggacggcatagcgtacacaacgcatcatgaagtatggatgcgattctggcaccaactgttccgttcctgctttcaccagaagctttgcgtctttaagcttcctttcattagaatttggatccaagtttgtggggaagactgtgaattcaatggaaagtgtcctttttttttttttttttaatttaagaactacttcaccttaaatcccacttctctaataaaataacttttactgta

SEQ ID NO: 3028 - protein, 58 aa, Homosapiens
MKYGCDSGTNCSVPAFTRSFASLSFLSLEFGSKFVGKTVNSMESVLFFFFFNLRTTSP

SEQ ID NO: 3029 - DNA, 1615 bp, Homosapiens
cgcacggcagttagtgggtaggcctgagagccgaggaaaactgagcgtgggcctcagaaagaagttaaggcacccgcgagccgggcaactgccctccttccgcgccggcggagcgattaaagtgaagaaacaatggccagcaatcacaaatcttcagcagctcgccctgtttcaagaggtggagttgggttaacaggaaggcctccttctgggatacgacccctatcaggaaatattcgagtggcaactgcaatgccacctgggacagcaagaccaggttctcgtggttgtcccatagggactggtggagttctgtcttctcaaatcaaagttgcccatcgccctgtaacacaacaaggtttgactggaatgaaaactgggacgaaaggtccccagaggcaaattttagacaaatcttactatcttgggcttcttagaagtaaaataagtgaacttacaactgaagttaataaacttcagaagggaatagaaatgtacaatcaagagaattcagtatatttgtcatatgaaaagagggctgagactttagctgttgagataaaagagcttcaaggacaactagcagactacaacatgttggtagataaacttaataccaacactgaaatggaagaagtaatgaatgattacaatatgcttaaagctcaaaatgatcgagaaacacaaagtttggatgtcatatttactgaaagacaagcgaaagaaaaacaaatcagaagtgtcgaagaagaaattgaacaggaaaaacaagcaacagatgacattatcaaaaatatgtcttttgaaaaccaagtcaagtacctagagatgaaaaccacaaatgagaaactgttacaggaattagatacacttcaacaacaattggattcacagaacatgaaaaaagagagcctggaagcagaaatagctcactcccaggtgaaacaggaggcggtattgctgcatgaaaaactttatgagttggagtcccatcgagatcaaatgattgcagaagacaaaagcataggatctccaatggaagagagagagaaattacttaagcagattaaagatgataatcaggaaatagccagcatggaaagacagttaacagatacaaaagaaaagataaatcagtttattgaagaaattagacaacttgacatggatttagaggaacaccaaggtgaaatgaaccagaaatacaaggagctaaagaaaagggaggaacatatggacacttttattgagacttttgaggaaacaaagaatcaggaactgaaacgaaaggcacagatagaagccaacattgttgcactcttggagcactgcagtcgaaatataaatcgtatagaacagatatcctctatcaccaatcaagagctaaagatgatgcaggatgacctcaattttaaatctactgaagtgcagaaatcacaaagtacagctcagaatttgacttcagacattcaacgtctgcagttggatctgcagaaaatggagcttctagaaagtaagatgactgaagaacagcattctctaaaaagcaaaattaagcaaatgacaactgatctggagatatataatgatttgccagctttaaaatcatcaggtg

SEQ ID NO: 3030 - protein, 493 aa, Homosapiens
MASNHKSSAARPVSRGGVGLTGRPPSGIRPLSGNIRVATAMPPGTARPGSRGCPIGTGGVLSSQIKVAHRPVTQQGLTGMKTGTKGPQRQILDKSYYLGLLRSKISELTTEVNKLQKGIEMYNQENSVYLSYEKRAETLAVEIKELQGQLADYNMLVDKLNTNTEMEEVMNDYNMLKAQNDRETQSLDVIFTERQAKEKQIRSVEEEIEQEKQATDDIIKNMSFENQVKYLEMKTTNEKLLQELDTLQQQLDSQNMKKESLEAEIAHSQVKQEAVLLHEKLYELESHRDQMIAEDKSIGSPMEEREKLLKQIKDDNQEIASMERQLTDTKEKINQFIEEIRQLDMDLEEHQGEMNQKYKELKKREEHMDTFIETFEETKNQELKRKAQIEANIVALLEHCSRNINRIEQISSITNQELKMMQDDLNFKSTEVQKSQSTAQNLTSDIQRLQLDLQKMELLESKMTEEQHSLKSKIKQMTTDLEIYNDLPALKSS

SEQ ID NO: 3031 - DNA, 2131 bp, Homosapiens
cgcacggcagttagtgggtaggcctgagagccgaggaaaactgagcgtgggcctcagaaagaagttaaggcacccgcgagccgggcaactgccctccttccgcgccggcggagcgattaaagtgaagaaacaatggccagcaatcacaaatcttcagcagctcgccctgtttcaagaggtggagttgggttaacaggaaggcctccttctgggatacgacccctatcaggaaatattcgagtggcaactgcaatgccacctgggacagcaagaccaggttctcgtggttgtcccatagggactggtggagttctgtcttctcaaatcaaagttgcccatcgccctgtaacacaacaaggtttgactggaatgaaaactgggacgaaaggtccccagaggcaaattttagacaaatcttactatcttgggcttcttagaagtaaaataagtgaacttacaactgaagttaataaacttcagaagggaatagaaatgtacaatcaagagaattcagtatatttgtcatatgaaaagagggctgagactttagctgttgagataaaagagcttcaaggacaactagcagactacaacatgttggtagataaacttaataccaacactgaaatggaagaagtaatgaatgattacaatatgcttaaagctcaaaatgatcgagaaacacaaagtttggatgtcatatttactgaaagacaagcgaaagaaaaacaaatcagaagtgtcgaagaagaaattgaacaggaaaaacaagcaacagatgacattatcaaaaatatgtcttttgaaaaccaagtcaagtacctagagatgaaaaccacaaatgagaaactgttacaggaattagatacacttcaacaacaattggattcacagaacatgaaaaaagagagcctggaagcagaaatagctcactcccaggtgaaacaggaggcggtattgctgcatgaaaaactttatgagttggagtcccatcgagatcaaatgattgcagaagacaaaagcataggatctccaatggaagagagagagaaattacttaagcagattaaagatgataatcaggaaatagccagcatggaaagacagttaacagatacaaaagaaaagataaatcagtttattgaagaaattagacaacttgacatggatttagaggaacaccaaggtgaaatgaaccagaaatacaaggagctaaagaaaagggaggaacatatggacacttttattgagacttttgaggaaacaaagaatcaggaactgaaacgaaaggcacagatagaagccaacattgttgcactcttggagcactgcagtcgaaatataaatcgtatagaacagatatcctctatcaccaatcaagagctaaagatgatgcaggatgacctcaattttaaatctactgaagtgcagaaatcacaaagtacagctcagaatttgacttcagacattcaacgtctgcagttggatctgcagaaaatggagcttctagaaagtaagatgactgaagaacagcattctctaaaaagcaaaattaagcaaatgacaactgatctggagatatataatgatttgccagctttaaaatcatcaggtgaagaaaagataaagaaattacatcaggagagaatgatattatcaacccacagaaatgcctttaagaaaataatggagaagcaaaacatagagtatgaggcactaaaaacacaattgcaagaaaatgagacacattctcagcttacaaatttggagagaaagtggcaacaccttgagcaaaataattttgcgatgaaagaattcatagcaaccaagagtcaagagagtgattaccagccaattaagaaaaatgtgaccaagcagattgcagagtacaataaaaccatcgtggatgctttacatagcaccagcggaaactgagtttaagtccactgaaagtctctaaggaagtatcctcttgctgctaaacttggtacaagttgactaccaaaaaaaaaaaaagcttacttttggagtttacctaaaatttctgaatgttataatttttgtggcctcttttaagaatgatattttaaaatagtaaatagttcaataaatggtttgcatattaaaaagt

SEQ ID NO: 3032 - protein, 600 aa, Homosapiens
MASNHKSSAARPVSRGGVGLTGRPPSGIRPLSGNIRVATAMPPGTARPGSRGCPIGTGGVLSSQIKVAHRPVTQQGLTGMKTGTKGPQRQILDKSYYLGLLRSKISELTTEVNKLQKGIEMYNQENSVYLSYEKRAETLAVEIKELQGQLADYNMLVDKLNTNTEMEEVMNDYNMLKAQNDRETQSLDVIFTERQAKEKQIRSVEEEIEQEKQATDDIIKNMSFENQVKYLEMKTTNEKLLQELDTLQQQLDSQNMKKESLEAEIAHSQVKQEAVLLHEKLYELESHRDQMIAEDKSIGSPMEEREKLLKQIKDDNQEIASMERQLTDTKEKINQFIEEIRQLDMDLEEHQGEMNQKYKELKKREEHMDTFIETFEETKNQELKRKAQIEANIVALLEHCSRNINRIEQISSITNQELKMMQDDLNFKSTEVQKSQSTAQNLTSDIQRLQLDLQKMELLESKMTEEQHSLKSKIKQMTTDLEIYNDLPALKSSGEEKIKKLHQERMILSTHRNAFKKIMEKQNIEYEALKTQLQENETHSQLTNLERKWQHLEQNNFAMKEFIATKSQESDYQPIKKNVTKQIAEYNKTIVDALHSTSGN

SEQ ID NO: 3033 - DNA, 3155 bp, Homosapiens
aaaacaaagtgaaatgtaatcatacgatgtactttttttaatgccgttgaaacagagttaatttcctttagcacacaagtcttagagacaaaagaaaaaaaggtctgcaacatgaaagtcacaggcatcacaatcctcttttggcccctctccatgatattattatcagacaaaatccagtcttctaaaagagaagtccaatgtaattttactgaaaaaaattataccttgattccagcagatatcaagaaagatgttactatacttgatctcagttataaccaaattactcttaatggtacagacacaagagttctacagacatactttttactcacagagctctatttgattgagaacaaggttactatcttacataataacggttttggtaacctctccagtctagaaattttaaatatctgtagaaactccatctatgtaattcaacagggtgcatttttaggcttaaataaactaaaacagttatatctctgccaaaacaaaatagaacaactgaatgctgatgtatttgtgcctctaagaagcctaaaacttctgaatctgcaaggcaatttgattagctatttggatgtaccaccactatttcatctggaattaataactttatatggaaacctatggaactgctcttgcagtctatttaatttgcagaactggttgaacacatcaaatgtgacattagaaaatgagaacatcaccatgtgtagctaccccaacagcctgcagagctacaatatcaaaacagtacctcataaggctgaatgccactcaaaatttccttcatcagtaactgaagatctttatattcattttcagcccatcagcaattcaatatttaatagctcttcgaacaacttaacaagaaattcagaacatgaacctcttggaaaaagttgggcttttcttgttggtgttgttgtcactgtactgacgacttcacttctcatttttattgctatcaaatgcccaatatggtacaatattctgcttagttataatcatcatcgcctggaagagcatgaagcagaaacctatgaagatggttttactggaaatccaagctctctttcacagataccagaaacaaactctgaagaaactacagtaatatttgaacaattacattcatttgtggtagatgatgatggatttattgaagacaaatatatagatatccatgaattatgtgaagaaaattaatttctttcaaagtttgctttttaaagcaaagttatcagctcactcagtttagatatggagattttgctatgtgacataacaaaatacagctggcaggcattcatattaatgacaacatacatgaatatcataaaattatgttctttgcattatattgagcaagcaggttcaaatacagtaactgacactcctcggtagttgacagttacatagtctacaatactagcactactattcttagcagtgcttgggtgaccatacgaactagtaaaaaggtctaaattattcatgaattaaaatgaatggattctcatattaacacaggtatttgacataatatgtattaagttatactaatgtttcaatcagtaaagaaataaaagtttaggatttattaatatatggaagtcaaagtgaggaacagagatagcttaaataatacactaagattgattttatgctcccagaataaaatcatagagttggaaaatatttttttgaaatgcttcctgaaatagcacaataaatttccttaaaatttcatagcaatttaaagcacaagcacaatgttcaggcataatccctaataagtcactattgattctggttataaagaaaggctgtcaccataatgcaggatcactacagtttaatgtcatactggcttccaaagtgggcatcacaattatctataaatcttgttttaaaaatacatatttccacctctctctgggagatttttattcaaattggtctgtgctgacactaaggaatcttcatgtggtccatggacagctatttctatctattcagtagatagagcaatgtttcccaaattgtttttctagaatactaatttccagagagacattcacaagtatttacagaagaagaaggaggtacatggtcaaattactacaggaaaaactagtagtttaaacaaggtgaaacaagattctttttcttttttttttttttttttttgagacaaagtctcgcactgtctcccaggctggactgcagcagcgcagtctcagatcactgcaacctccgcctcctgggttcaagcaattcttctgactcagcctcccgagtagctgggagtacaggtgcacaccaccatgcctggctaatttctgtatttttagtagagacagggtttcaccatgttggccaggctggtctcgaacgcctgacctcatgatctacccgcctcggcctcccaaagtgctgggattacaggcatggagcaccgtgcctggccaagattctttacaataggatttatgtaaaactttactaagctaaactgctctctgattattcaagagcaaagtattaaaaatttctcaaacttacttgacaacaaaacccattctttcagttacatctactaagagctcgtagttcaataacattccaaagaacgtagtttggaaaacactggcctatcggctgtaataggaagggtctaaagaaaattatttgctgagtcctcataatcaattggctataatcacaatttaataatttatcaatgcaaacagtacattaaaaactgtagcacaatctataatttttaccttcatatgcagagaaattaagaatttacatcttttacaaatatgtatatctctgaaataatgaaatatattgatgggtgaaataatatttctggtattttcttcattataacacgtggaatggaacagtggctagaggtatggatggagcaaggtcaaatatgagctgatggagctgggagctaaataagggtataatatgctacttctgtgtatgttgtgtatggtatagtatgctatttctgtgtatgttcaaattgtttatgtatataataaagttttaaaaatttgtatgtacttgacaattccttagaaaaaagaggctaaaataaaatagatctatgtcat

SEQ ID NO: 3034 - protein, 370 aa, Homosapiens; identical to SEQ ID NO: 384

SEQ ID NO: 3035 - DNA, 406 bp, Homosapiens
ttaatttgcagaactggttgaacacatcaaatgtgacattagcccatcagcaattcaatatttaatagctcttcgaacaacttaacaagaaattcagaacatgaacctcttggaaaaagttgggcttttcttgttggtgttgttgtcactgtactgacgacttcacttctcatttttattgctatcaaatgcccaatatggtacaatattctgcttagttataatcatcatcgcctggaagagcatgaagcagaaacctatgaagatggttttactggaaatccaagctctctttcacagataccagaaacaaactctgaagaaactacagtaatatttgaacaattacattcatttgtggtagatgatgatggatttattgaagacaaatatatagatatccatg

SEQ ID NO: 3036 - protein, 120 aa, Homosapiens
PISNSIFNSSSNNLTRNSEHEPLGKSWAFLVGVVVTVLTTSLLIFIAIKCPIWYNILLSYNHHRLEEHEAETYEDGFTGNPSSLSQIPETNSEETTVIFEQLHSFVVDDDGFIEDKYIDI

SEQ ID NO: 3037 - DNA, 1201 bp, Homosapiens
aaaacaaagtgaaatgtaatcatacgatgtactttttttaatgccgttgaaacagagttaatttcctttagcacacaagtcttagagacaaaagaaaaaaaggtctgcaacatgaaagtcacaggcatcacaatcctcttttggcccctctccatgatattattatcagacaaaatccagtcttctaaaagagaagtccaatgtaattttactgaaaaaaattataccttgattccagcagatatcaagaaagatgttactatacttgatctcagttataaccaaattactcttaatggtacagacacaagagttctacagacatactttttactcacagagctctatttgattgagaacaaggttactatcttacataataacggttttggtaacctctccagtctagaaattttaaatatctgtagaaactccatctatgtaattcaacagggtgcatttttaggcttaaataaactaaaacagttatatctctgccaaaacaaaatagaacaactgaatgctgatgtatttgtgcctctaagaagcctaaaacttctgaatctgcaaggcaatttgattagctatttggatgtaccaccactatttcatctggaattaataactttatatggaaacctatggaactgctcttgcagtctatttaatttgcagaactggttgaacacatcaaatgtgacattagaaaatgagaacatcaccatgtgtagctaccccaacagcctgcagagctacaatatcaaaacagtacctcataaggctgaatgccactcaaaatttccttcatcagtaactgaagatctttatattcattttcagcccatcagcaattcaatatttaatagctcttcgaacaacttaacaagaaattcagaacatgaacctcttggaaaaagttgggcttttcttgttggtgttgttgtcactgtactgacgacttcacttctcatttttattgctatcaaatgcccaatatggtacaatattctgcttagttataatcatcatcgcctggaagagcatgaagcagaaacctatgaagatggttttactggaaatccaagctctctttcacagataccagaaacaaactctgaagaaactacagtaatatttgaacaattacattcatttgtggtagatgatgatggatttattgaagacaaatatatagatatcc

SEQ ID NO: 3038 - protein, 362 aa, Homosapiens
MKVTGITILFWPLSMILLSDKIQSSKREVQCNFTEKNYTLIPADIKKDVTILDLSYNQITLNGTDTRVLQTYFLLTELYLIENKVTILHNNGFGNLSSLEILNICRNSIYVIQQGAFLGLNKLKQLYLCQNKIEQLNADVFVPLRSLKLLNLQGNLISYLDVPPLFHLELITLYGNLWNCSCSLFNLQNWLNTSNVTLENENITMCSYPNSLQSYNIKTVPHKAECHSKFPSSVTEDLYIHFQPISNSIFNSSSNNLTRNSEHEPLGKSWAFLVGVVVTVLTTSLLIFIAIKCPIWYNILLSYNHHRLEEHEAETYEDGFTGNPSSLSQIPETNSEETTVIFEQLHSFVVDDDGFIEDKYID

SEQ ID NO: 3039 - DNA, 1310 bp, Homosapiens
gggaaaggaaaatcataaattgtctttcagttggcatgttcattggtataataaacatttaaaatataattaaaataaatatatagagtaaaacatgttataggattcatcactgtattaatatatttactattatttaatctttttttttctaccgtggctttatctcaataaaatgtaagttgataagatttaaagttggagagattttttttgtcttatcctcttagaaaggcatttaattgttttaaatatgggtcctaattaatatttttcttttatgtttttagcttacaaatttggagagaaagtggcaacaccttgagcaaaataattttgcgatgaaagaattcccttctttgacccattcaaggatgtctctgcctggagaactagatcctgactcagtggcagcataggttctcccccagggtggtgctgaacttcagctcagaagcagcctggaccccatcttacctccagataaggtgttttaggtactctgttgccagtgttagtgcaacttagtttaaaaatagaggacttgttcacagtatgctctaagtctcacactggagttttgtgcaacataaagtaggtgattttggagcagagcgaagtctagaaatttgccttaaattatttgtggtactctagagaacgtggtatgtgtatgtgtgtatgtgtgtttgaatataggaactagttcattgaacgttagattgttctaagaccagaattagattaaaaatgcataacatattaagtattaaaaagtgtttatattgtatatgaattttttgcggtaagtttagcttggcattttaggttttaattgatgcttaatctgttaaaatgatgtactgtattttaaagtattctaattgtgcttttttgtaccatcttcagtatgaaaaatgtcagtatttagttcctttctcaggcacaattagatttttattgacattgttttcccccttaactcatgtaattagtcatagcaaccaagagtcaagagagtgattaccagccaattaagaaaaatgtgaccaagcagattgcagagtacaataaaaccatcgtggatgctttacatagcaccagcggaaactgagtttaagtccactgaaagtctctaaggaagtatcctcttgctgctaaacttggtacaagttgactaccaaaaaaaaaaaaagcttacttttggagtttacctaaaatttctgaatgttataatttttgtggcctcttttaagaatgatattttaaaatagtaaatagttcaataaatggtttgcatattaaaaagt

SEQ ID NO: 3040 - protein, 55 aa, Homosapiens
MMYCILKYSNCAFLYHLQYEKCQYLVPFSGTIRFLLTLFSPLTHVISHSNQESRE

SEQ ID NO: 3041 - DNA, 560 bp, Homosapiens
caacaaaccccgaaaacagcaagtggatatggagaaattggatccctggtgcactgttggtgggaacacagaatggagcagctgctatggaaaacagtatggagattcctaaaaaattaaaaatataattaccgtataatctcataaccccacttctgggtagatatccaaaagaattaaaagcaggatctcgaagacatctttgcatactcatgttctttgcagcattacttataacaaccaagaggtggaagcaacctgaatgtccacggactgatgaatggatgcagaaaatgtggtatatacatatgatggactattattcagccttagaaagaaagaagtcttgtcacatgctacaacttagatgaaccttgaggacattatacaaagtgaaataagctagtcataaaaaagacaaatattgcaggattctacttgtatgagtgccaccacgctgggattttgtaattatgagcttcaaaagcagagacaacatcttctatttctgtgtctcttcctacggtgaataatatagtccttgccgtttcaatgttaac

SEQ ID NO: 3042 - protein, 52 aa, Homosapiens
MFFAALLITTKRWKQPECPRTDEWMQKMWYIHMMDYYSALERKKSCHMLQLR

SEQ ID NO: 3043 - DNA, 4338 bp, Homosapiens
gcagcagcaaaagcagcagcagaagcaacagcaacagataagtgttttgatgaattgcgagatggatagggcttgagtgcccccagccctgctgataccaaatgcctttaagatacagcctttcccatcctaatctacaaaggaaacaggaaaaaggaacttaaaactccctgtgctcagacagaaatgagactgttacagcctgcttctgtgctgttccttcttgcctctaacttgtaaacaagacgtagtaggacgatgctaatggaaagtcacaaaccgctgggtttttgaaaggatccttgggacctcatgcacatttgtggaaactggatggagagatttggggaagcatggactctttagccagcttagttctctgtggagtcagcttgctcctttctggaactgtggaaggtgccatggacttgatcttgatcaattccctacctcttgtatctgatgctgaaacatctctcacctgcattgcctctgggtggcgcccccatgagcccatcaccataggaagggactttgaagccttaatgaaccagcaccaggatccgctggaagttactcaagatgtgaccagagaatgggctaaaaaagttgtttggaagagagaaaaggctagtaagatcaatggtgcttatttctgtgaagggcgagttcgaggagaggcaatcaggatacgaaccatgaagatgcgtcaacaagcttccttcctaccagctactttaactatgactgtggacaagggagataacgtgaacatatctttcaaaaaggtattgattaaagaagaagatgcagtgatttacaaaaatggttccttcatccattcagtgccccggcatgaagtacctgatattctagaagtacacctgcctcatgctcagccccaggatgctggagtgtactcggccaggtatataggaggaaacctcttcacctcggccttcaccaggctgatagtccggagatgtgaagcccagaagtggggacctgaatgcaaccatctctgtactgcttgtatgaacaatggtgtctgccatgaagatactggagaatgcatttgccctcctgggtttatgggaaggacgtgtgagaaggcttgtgaactgcacacgtttggcagaacttgtaaagaaaggtgcagtggacaagagggatgcaagtcttatgtgttctgtctccctgacccctatgggtgttcctgtgccacaggctggaagggtctgcagtgcaatgaagcatgccaccctggtttttacgggccagattgtaagcttaggtgcagctgcaacaatggggagatgtgtgatcgcttccaaggatgtctctgctctccaggatggcaggggctccagtgtgagagagaaggcatacagaggatgaccccaaagatagtggatttgccagatcatatagaagtaaacagtggtaaatttaatcccatttgcaaagcttctggctggccgctacctactaatgaagaaatgaccctggtgaagccggatgggacagtgctccatccaaaagactttaaccatacggatcatttctcagtagccatattcaccatccaccggatcctcccccctgactcaggagtttgggtctgcagtgtgaacacagtggctgggatggtggaaaagcccttcaacatttctgttaaagttcttccaaagcccctgaatgccccaaacgtgattgacactggacataactttgctgtcatcaacatcagctctgagccttactttggggatggaccaatcaaatccaagaagcttctatacaaacccgttaatcactatgaggcttggcaacatattcaagtgacaaatgagattgttacactcaactatttggaacctcggacagaatatgaactctgtgtgcaactggtccgtcgtggagagggtggggaagggcatcctggacctgtgagacgcttcacaacagcttctatcggactccctcctccaagaggtctaaatctcctgcctaaaagtcagaccactctaaatttgacctggcaaccaatatttccaagctcggaagatgacttttatgttgaagtggagagaaggtctgtgcaaaaaagtgatcagcagaatattaaagttccaggcaacttgacttcggtgctacttaacaacttacatcccagggagcagtacgtggtccgagctagagtcaacaccaaggcccagggggaatggagtgaagatctcactgcttggacccttagtgacattcttcctcctcaaccagaaaacatcaagatttccaacattacacactcctcagctgtgatttcttggacaatattggatggctattctatttcttctattactatccgttacaaggttcaaggcaagaatgaagaccagcacgttgatgtgaagataaagaatgccaccatcactcagtatcagctcaagggcctagagcctgaaacagcataccaggtggacatttttgcagagaacaacatagggtcaagcaacccagccttttctcatgaactggtgaccctcccagaatctcaagcaccagcggacctcggaggggggaagatgctgcttatagccatccttggctctgctggaatgacctgcctgactgtgctgttggcctttctgatcatattgcaattgaagagggcaaatgtgcaaaggagaatggcccaagccttccaaaacgtgagggaagaaccagctgtgcagttcaactcagggactctggccctaaacaggaaggtcaaaaacaacccagatcctacaatttatccagtgcttgactggaatgacatcaaatttcaagatgtgattggggagggcaattttggccaagttcttaaggcgcgcatcaagaaggatgggttacggatggatgctgccatcaaaagaatgaaagaatatgcctccaaagatgatcacagggactttgcaggagaactggaagttctttgtaaacttggacaccatccaaacatcatcaatctcttaggagcatgtgaacatcgaggctacttgtacctggccattgagtacgcgccccatggaaaccttctggacttccttcgcaagagccgtgtgctggagacggacccagcatttgccattgccaatagcaccgcgtccacactgtcctcccagcagctccttcacttcgctgccgacgtggcccggggcatggactacttgagccaaaaacagtttatccacagggatctggctgccagaaacattttagttggtgaaaactatgtggcaaaaatagcagattttggattgtcccgaggtcaagaggtgtatgtgaaaaagacaatgggaaggctcccagtgcgctggatggccatcgagtcactgaattacagtgtgtacacaaccaacagtgatgtatggtcctatggtgtgttactatgggagattgttagcttaggaggcacaccctactgcgggatgacttgtgcagaactctacgagaagctgccccagggctacagactggagaagcccctgaactgtgatgatgaggtgtatgatctaatgagacaatgctggcgggagaagccttatgagaggccatcatttgcccagatattggtgtccttaaacagaatgttagaggagcgaaagacctacgtgaataccacgctttatgagaagtttacttatgcaggaattgactgttctgctgaagaagcggcctaggacagaacatctgtataccctctgtttccctttcactggcatgggagacccttgacacctgctgagaaaacatgcctctgccaaaggatgtgatatataagtgtacatatgtgctatgaattctaacaagtcataggttaatatttaagacactgaaaaatctaagtgatataaatcagattcttctctctcaattttatccctcacctgtagcagccagtcccgtttcatttagtcatgtgaccactctgtcttgtgtttccacagcctgcaagtcagtccaggatgctaacatctaaaaatagacttaaatctcattgcttacaagcctaagaatctttagagaagtatacataagtttaggataaaataatgggattttcttttcttttctctggtaatattgacttgtatattttaagaaataacagaaagcctgggtgacatttgggagacatgtgacatttatatattgaattaatatccctacatgtattgcacattgtaaaaagttttagttttgatgagttgtgagtttaccttgtatactgtaggcacactttgcactgatatatcatgagtgaataaatgtcttgcctactcacgtctc

SEQ ID NO: 3044 - protein, 1124 aa, Homosapiens
MDSLASLVLCGVSLLLSGTVEGAMDLILINSLPLVSDAETSLTCIASGWRPHEPITIGRDFEALMNQHQDPLEVTQDVTREWAKKVVWKREKASKINGAYFCEGRVRGEAIRIRTMKMRQQASFLPATLTMTVDKGDNVNISFKKVLIKEEDAVIYKNGSFIHSVPRHEVPDILEVHLPHAQPQDAGVYSARYIGGNLFTSAFTRLIVRRCEAQKWGPECNHLCTACMNNGVCHEDTGECICPPGFMGRTCEKACELHTFGRTCKERCSGQEGCKSYVFCLPDPYGCSCATGWKGLQCNEACHPGFYGPDCKLRCSCNNGEMCDRFQGCLCSPGWQGLQCEREGIQRMTPKIVDLPDHIEVNSGKFNPICKASGWPLPTNEEMTLVKPDGTVLHPKDFNHTDHFSVAIFTIHRILPPDSGVWVCSVNTVAGMVEKPFNISVKVLPKPLNAPNVIDTGHNFAVINISSEPYFGDGPIKSKKLLYKPVNHYEAWQHIQVTNEIVTLNYLEPRTEYELCVQLVRRGEGGEGHPGPVRRFTTASIGLPPPRGLNLLPKSQTTLNLTWQPIFPSSEDDFYVEVERRSVQKSDQQNIKVPGNLTSVLLNNLHPREQYVVRARVNTKAQGEWSEDLTAWTLSDILPPQPENIKISNITHSSAVISWTILDGYSISSITIRYKVQGKNEDQHVDVKIKNATITQYQLKGLEPETAYQVDIFAENNIGSSNPAFSHELVTLPESQAPADLGGGKMLLIAILGSAGMTCLTVLLAFLIILQLKRANVQRRMAQAFQNVREEPAVQFNSGTLALNRKVKNNPDPTIYPVLDWNDIKFQDVIGEGNFGQVLKARIKKDGLRMDAAIKRMKEYASKDDHRDFAGELEVLCKLGHHPNIINLLGACEHRGYLYLAIEYAPHGNLLDFLRKSRVLETDPAFAIANSTASTLSSQQLLHFAADVARGMDYLSQKQFIHRDLAARNILVGENYVAKIADFGLSRGQEVYVKKTMGRLPVRWMAIESLNYSVYTTNSDVWSYGVLLWEIVSLGGTPYCGMTCAELYEKLPQGYRLEKPLNCDDEVYDLMRQCWREKPYERPSFAQILVSLNRMLEERKTYVNTTLYEKFTYAGIDCSAEEAA

SEQ ID NO: 3045 - DNA, 4673 bp, Homosapiens
gcagcagcaaaagcagcagcagaagcaacagcaacagataagtgttttgatgaattgcgagatggatagggcttgagtgcccccagccctgctgataccaaatgcctttaagatacagcctttcccatcctaatctacaaaggaaacaggaaaaaggaacttaaaactccctgtgctcagacagaaatgagactgttacagcctgcttctgtgctgttccttcttgcctctaacttgtaaacaagacgtagtaggacgatgctaatggaaagtcacaaaccgctgggtttttgaaaggatccttgggacctcatgcacatttgtggaaactggatggagagatttggggaagcatggactctttagccagcttagttctctgtggagtcagcttgctcctttctggaactgtggaaggtgccatggacttgatcttgatcaattccctacctcttgtatctgatgctgaaacatctctcacctgcattgcctctgggtggcgcccccatgagcccatcaccataggaagggactttgaagccttaatgaaccagcaccaggatccgctggaagttactcaagatgtgaccagagaatgggctaaaaaagttgtttggaagagagaaaaggctagtaagatcaatggtgcttatttctgtgaagggcgagttcgaggagaggcaatcaggatacgaaccatgaagatgcgtcaacaagcttccttcctaccagctactttaactatgactgtggacaagggagataacgtgaacatatctttcaaaaaggtattgattaaagaagaagatgcagtgatttacaaaaatggttccttcatccattcagtgccccggcatgaagtacctgatattctagaagtacacctgcctcatgctcagccccaggatgctggagtgtactcggccaggtatataggaggaaacctcttcacctcggccttcaccaggctgatagtccggagatgtgaagcccagaagtggggacctgaatgcaaccatctctgtactgcttgtatgaacaatggtgtctgccatgaagatactggagaatgcatttgccctcctgggtttatgggaaggacgtgtgagaaggcttgtgaactgcacacgtttggcagaacttgtaaagaaaggtgcagtggacaagagggatgcaagtcttatgtgttctgtctccctgacccctatgggtgttcctgtgccacaggctggaagggtctgcagtgcaatgaagcatgccaccctggtttttacgggccagattgtaagcttaggtgcagctgcaacaatggggagatgtgtgatcgcttccaaggatgtctctgctctccaggatggcaggggctccagtgtgagagagaaggcatacagaggatgaccccaaagatagtggatttgccagatcatatagaagtaaacagtggtaaatttaatcccatttgcaaagcttctggctggccgctacctactaatgaagaaatgaccctggtgaagccggatgggacagtgctccatccaaaagactttaaccatacggatcatttctcagtagccatattcaccatccaccggatcctcccccctgactcaggagtttgggtctgcagtgtgaacacagtggctgggatggtggaaaagcccttcaacatttctgttaaagttcttccaaagcccctgaatgccccaaacgtgattgacactggacataactttgctgtcatcaacatcagctctgagccttactttggggatggaccaatcaaatccaagaagcttctatacaaacccgttaatcactatgaggcttggcaacatattcaagtgacaaatgagattgttacactcaactatttggaacctcggacagaatatgaactctgtgtgcaactggtccgtcgtggagagggtggggaagggcatcctggacctgtgagacgcttcacaacagcttctatcggactccctcctccaagaggtctaaatctcctgcctaaaagtcagaccactctaaatttgacctggcaaccaatatttccaagctcggaagatgacttttatgttgaagtggagagaaggtctgtgcaaaaaagtgatcagcagaatattaaagttccaggcaacttgacttcggtgctacttaacaacttacatcccagggagcagtacgtggtccgagctagagtcaacaccaaggcccagggggaatggagtgaagatctcactgcttggacccttagtgacattcttcctcctcaaccagaaaacatcaagatttccaacattacacactcctcagctgtgatttcttggacaatattggatggctattctatttcttctattactatccgttacaaggttcaaggcaagaatgaagaccagcacgttgatgtgaagataaagaatgccaccatcactcagtatcagctcaagggcctagagcctgaaacagcataccaggtggacatttttgcagagaacaacatagggtcaagcaacccagccttttctcatgaactggtgaccctcccagaatctcaagcaccagcggacctcggaggggggaagatgctgcttatagccatccttggctctgctggaatgacctgcctgactgtgctgttggcctttctgatcatattgcaattgaagagggcaaatgtgcaaaggagaatggcccaagccttccaaaacgtgagggaagaaccagctgtgcagttcaactcagggactctggccctaaacaggaaggtcaaaaacaacccagatcctacaatttatccagtgcttgactggaatgacatcaaatttcaagatgtgattggggagggcaattttggccaagttcttaaggcgcgcatcaagaaggatgggttacggatggatgctgccatcaaaagaatgaaagaatatgcctccaaagatgatcacagggactttgcaggagaactggaagttctttgtaaacttggacaccatccaaacatcatcaatctcttaggagcatgtgaacatcgaggctacttgtacctggccattgagtacgcgccccatggaaaccttctggacttccttcgcaagagccgtgtgctggagacggacccagcatttgccattgccaatagcaccgcgtccacactgtcctcccagcagctccttcacttcgctgccgacgtggcccggggcatggactacttgagccaaaaacagtttatccacagggatctggctgccagaaacattttagttggtgaaaactatgtggcaaaaatagcagattttggattgtcccgaggtcaagaggtgtatgtgaaaaagacaatgggaaggctcccagtgcgctggatggccatcgagtcactgaattacagtgtgtacacaaccaacagtgatgtatggtcctatggtgtgttactatgggagattgttagcttaggaggcacaccctactgcgggatgacttgtgcagaactctacgagaagctgccccagggctacagactggagaagcccctgaactgtgatgatgaggtgtatgatctaatgagacaatgctggcgggagaagccttatgagaggccatcatttgcccagatattggtgtccttaaacagaatgttagaggagcgaaagacctacgtgaataccacgctttatgagaagtttacttatgcaggaattgactgttctgctgaagaagcggcctaggacagaacatctgtataccctctgtttccctttcactggcatgggagacccttgacacctgctgagaaaacatgcctctgccaaaggatgtgatatataagtgtacatatgtgctgtacacctgggaccttcaccactgtagatcccatgcatggatctatgtagtatgctctgactctaataggactgtatatactgttttaagaatgggctgaaatcagaatgcctgtttgtggtttcatatgcaataatatatttttttaaaaatgtggacttcataggaaggcgtgagtacaattagtataatgcataactcattgttgtcctagatattttgatatttacctttatgttgaatgctattaaatgttttcctgtgtcaaagtaaaatattgttaataaacctaacaatgaccctgatagtacaggttaagtgagagaactatatgaattctaacaagtcataggttaatatttaagacactgaaaaatctaagtgatataaatcagattcttctctctcaattttatccctcacctgtagcagccagtcccgtttcatttagtcatgtgaccactctgtcttgtgtttccacagcctgcaagtcagtccaggatgctaacatctaaaaatagacttaaatctcattgcttacaagcctaagaatctttagagaagtatacataagtttaggataaaataatgggattttcttttcttttctctggtaatattgacttgtatattttaagaaataacagaaagcctgggtgacatttgggagacatgtgacatttatatattgaattaatatccctacatgtattgcacattgtaaaaagttttagttttgatgagttgtgagtttaccttgtatactgtaggcacactttgcactgatatatcatgagtgaataaatgtcttgcctactcacgtctcatcc

SEQ ID NO: 3046 - protein, 1124 aa, Homosapiens; identical to SEQ ID NO: 3044

SEQ ID NO: 3047 - DNA, 2913 bp, Homosapiens
attcttcttcctcacgagaataaacacacattttactctcacctgccacttcccctactatccattgttagagtccttcactcccaaatttcgccgcagactcccgcccagtctcactcaccattggttgggaaagctacgaagctccgcctttgaatagtgatgggctataaaagacggcacctttgagggaaaaggcagtaggtcaggcgctcacctttgcctgctctctggcaacagtgctcacagtttctgagccagtggaggtggcctggagcagcagcccatgctactctctgccggttattttgccatttctctgtgcccttttgacagctccagggatcggtgccagcatttgtactgccagttcaggcacctgcagatctggtggaaaagtgagggaggtgattgcagttgcttggagatgctccaggtgcaaaggagttgtgttgagtccacagcaggagccttactggtgctggaaaagcaagtcctcctgatctacctccctactgccaaaggaacctaggatcagttcctacggactggctgtgacgggaaagaagcaccagcactcgccttagaactagcagccaagtccatctaaagtgaccaggagccttttgggtggtccctcagttcctgaaacactgggttgtagagggaagctgtcccagagatgtttggaaaggtggttggcttgggcaggcgtcaagagcatctcttccatccctcaggaggagcgggcaccagctccccagtaaccgaaagaactgctgggcctgcggggctccacggtgccccagtcctagacataactatggaaaaattagaacagaaaaaatgagttagtcaaggctgaggttgaagaagagcagaagaggatctccaaatgaactttagcacttgaagaactgactcaaagccctgtggcctccttgaatgacacaaatgtgaggcaagattttcctgaaaatagcctgctcccagaggaaaagtgaattgcaccatcaaagaacaaagacagactggaaagtatgtgatggacctcagatgtccagagactgatcttgaatatgatcctttcctcaattattctgcggaggtacttggggcatctaaagcaaagcaggatgaggctgatcaacagcacttctgccacttgaaaacacctatgaccttgcaaaagacaatgtgccaagaatgcaaggtaataatcaagacctcattacttttgaagaagcaaattagccaaatttggttctgatccaatcaaatctgataatggttgtactgaagatgacacctcctctcattctgatgacactatgaaagaatgtctttaagtttctaatgagctcgttgaaagtgaatctcataaggaaaagactgctaaacagtaggacgaggtttcaccctgttggccaggctggtctcgaactcctgacctgaagtgatgcacctgccttggcttcccaaggtgctggaattacaggcgtgagccaccgcgcccggcctagaggattcttttataggaatctacacaggagcagtggattcagtgttcactaaatctgagtttgtggtgacttacagagtataactacctgaaataacaagaatcgactttagttttcaaaataattataaacttttgtaatttataagtgctgaagttcttttatgacataaaaaagaaattgaagaagcagttcagcctcaaccaataaagaggtcattagaccattcagggtaccagtcccactgctaacaagccccactggaatcattcgggcccagcaaagcagtacagataaaggctgccataaagaatgggaaggcttttattgatgccacttcagaacagaagaaaaatgcatctacatgtccagcctctcagagccaaaggaaagaggccaaaagatacatttaacaagatggctcatcggaaaagacattcagtaacatcagaattcttatccaaagtacctgatgaagtaagacaacgctacatcaacctctttgttgagaagtatttgaaagtttgtaaaacagaggatgaggctgtttacaaggctaaaatagaaaaaaaggcaatatatgaaaggtgtagcaggagaaatatgtatgtgaacatagcagtaaattatcttaagaagctaagagatcaaggtgcttaattttatctaagtgatctactttattaagtcctcaaaacaaccatttcaggacttctcccttgggattatcttcactattagcttttctcgttttgttttattttttcacatcccctcaatggaaggcaatacacttagcaggatcaagcatgcaaaggcaagtctccacattggctcatttaccttttctctcccatctcatctggaataatcctacttcatgttttgtttcggcacctaagaagctctgttgtcgatgtggaaaaatatatggtgtgactccctcaggttgacacagcagggtagaagaatgtaactaccaatttggcggagtgttgagtcataaagtcctcagtggctttgaatctcaatacggctgttgtggaggtttccttggatcgccccggtgtcaggtcgccaagcttcatgttcatgaccacaaagaaaacctaaagggctttgtgaagacttttgtcaagttcccacctgctgatggtaatcaccgtgtgtttgcagtaagttgtgagatgttaattcacacttcagttgtggacatatcggttatgtttcctcatcagcttggcttgcctcccaaaagaccccttaggagtctaatggctgattgcctgcagagaatcgttcaggatgatggtcacaatgctagtgaaaatgcaaaagcctgcatggatctggtcatttggaaggtaaaagaagacgtgaaaggaaagaa

SEQ ID NO: 3048 - protein, 115 aa, Homosapiens
MGRLLLMPLQNRRKMHLHVQPLRAKGKRPKDTFNKMAHRKRHSVTSEFLSKVPDEVRQRYINLFVEKYLKVCKTEDEAVYKAKIEKKAIYERCSRRNMYVNIAVNYLKKLRDQGA

SEQ ID NO: 3049 - DNA, 1034 bp, Homosapiens
gttagacacaggacctgctgggccacagaaaggaggctctgggtagacgcactagattactggataaatcacttcaatttcccaatgaattttatattgtttatttttatacctggagttttttccttaaaaagtagcactttgaagcctactattgaagcattgcctaatgtgctacctttaaatgaagatgttaataagcaggaagaaaagaatgaagatcatactcccaattatgctcctgctaatgagaaaaatggcaattattataaagatataaaacaatatgtgttcacaacacaaaatccaaatggcactgagtctgaaatatctgtgagagccacaactgacctgaattttgctctaaaaaacgataaaactgtcaatgcaactacatatgaaaaatccaccattgaagaagaaacaactactagcgaaccctctcataaaaatattcaaagatcaaccccaaacgtgcctgcattttggacaatgttagctaaagctataaatggaacagcagtggtcatggatgataaagatcaattatttcacccaattccagagtctgatgtgaatgctacacagggagaaaatcagccagatctagaggatctgaagatcaaaataatgctgggaatctcgttgatgaccctcctcctctttgtggtcctcttggcattctgtagtgctacactgtacaaactgaggcatctgagttataaaagttgtgagagtcagtactctgtcaacccagagctggccacgatgtcttactttcatccatcagaaggtgtttcagatacatccttttccaagagtgcagagagcagcacatttttgggtaccacttcttcagatatgagaagatcaggcacaagaacatcagaatctaagataatgacggatatcatttccataggctcagataatgagatgcatgaaaacgatgagtcggttacccggtgaagaaatcaaggaacccggtgaagaaatcttattgatgaataaataactttaattattttgtcatc

SEQ ID NO: 3050 - protein, 294 aa, Homosapiens
MNFILFIFIPGVFSLKSSTLKPTIEALPNVLPLNEDVNKQEEKNEDHTPNYAPANEKNGNYYKDIKQYVFTTQNPNGTESEISVRATTDLNFALKNDKTVNATTYEKSTIEEETTTSEPSHKNIQRSTPNVPAFWTMLAKAINGTAVVMDDKDQLFHPIPESDVNATQGENQPDLEDLKIKIMLGISLMTLLLFVVLLAFCSATLYKLRHLSYKSCESQYSVNPELATMSYFHPSEGVSDTSFSKSAESSTFLGTTSSDMRRSGTRTSESKIMTDIISIGSDNEMHENDESVTR

SEQ ID NO: 3051 - DNA, 791 bp, Homosapiens
agacacaggacctgctgggccacagaaaggaggctctgggtagacgcactagattactggataaatcacttcaatttcccaatgaattttatattgtttatttttatacctggagttttttccttaaaaagtagcactttgaagcctactattgaagcattgcctaatgtgctacctttaaatgaagatgttaataagcaggaagaaaagaatgaagatcatactcccaattatgctcctgctaatgagaaaaatggcaattattataaagatataaaacaatatgtgttcacaacacaaaatccaaatggcactgagtctgaaatatctgtgagagccacaactgacctgaattttgctctaaaaaacgataaaactgtcaatgcaactacatatgaaaaatccaccattgaagaagaaacaactactagcgaaccctctcataaaaatattcaaagtatttaaattactacactgtattcatacctggagaatatcattatgtgacttaaaaatttaagtttcactactctgagcattacataaagccatagcatgcttaaagaatttatactgctaccttttaaagtcactaaaatcttttaaatggtgaatgtctaacagtcagtcttcaggtatacctgacaaaggatgagaaatgagcttttgtagaaatagaactttattttaataaaaatgtgttacatttgtgtctatattaaatacgtacttacaaattagtatatatttataaatatatgtcgaatgtatttgaaatataatttattttg

SEQ ID NO: 3052 - protein, 127 aa, Homosapiens
MNFILFIFIPGVFSLKSSTLKPTIEALPNVLPLNEDVNKQEEKNEDHTPNYAPANEKNGNYYKDIKQYVFTTQNPNGTESEISVRATTDLNFALKNDKTVNATTYEKSTIEEETTTSEPSHKNIQSI

SEQ ID NO: 3053 - DNA, 715 bp, Homosapiens
agacacaggacctgctgggccacagaaaggaggctctgggtagacgcactagattactggataaatcacttcaatttcccaatgaattttatattgtttatttttatacctggagttttttccttaaaaagtagcactttgaagcctactattgaagcattgcctaatgtgctacctttaaatgaagatgttaataagcaggaagaaaagaatgaagatcatactcccaattatgctcctgctaatgagaaaaatggcaattattataaagatataaaacaatatgtgttcacaacacaaaatccaaatggcactgagtctgaaatatctgtgagagccacaactgacctgaattttgctctaaaaaacgataaaactgtcaatgcaactacatatgaaaaatccaccattgaagaagaaacaactactagcgaaccctctcataaaaatattcaaagtatttaaattactacactgtattcatacctggagaatatcattatgtgacttaaaaatttaagtttcactactctgagcattacataaagccatagcatgcttaaagaatttatactgctaccttttaaagtcactaaaatcttttaaatggtgaatgtctaacagtcagtcttcaggtatacctgacaaaggatgagaaatgagcttttgtagaaatagaactttattttaataaaaatgtgttacatttgtgtct

SEQ ID NO: 3054 - protein, 127 aa, Homosapiens; identical to SEQ ID NO: 3052

SEQ ID NO: 3055 - DNA, 417 bp, Homosapiens
ctttgaagcctactattgaagcattgcctaatgtgctacctttaaatgaagatgttaataagcaggaagaaaagaatgaagatcatactcccaattatgctcctgctaatgagaaaaatggcaattattataaagatataaaacaattgcatgttttaagaaaaaaactcagaggaagaaaaaggtaaaggaaaaaaagtgacttagctagttgctgaagactttcgcttttgtttttagatgtgttcacaacacaaaatccaaatggcactgagtctgaaatatctgtgagagccacaactgacctgaattttgctctaaaaaacgataaaactgtcaatgcaactacatatgaaaaatccaccattgaagaagaaacaactactagcgaaccctctcataaaaatattcaaagta

SEQ ID NO: 3056 - protein, 31 aa, Homosapiens
MKMLISRKKRMKIILPIMLLLMRKMAIIIKI

SEQ ID NO: 3057 - DNA, 2915 bp, Homosapiens
gcggcagttcgcgcgggagcggggcgcctgggtggatgggcgcttgggcgcctgggctgccggacggtgggaacggaagtcgctgtgggacgctgaggaagccaggatggcgactccgagcaagaagacgtcaactccaagcccccagccttccaagagagctctcccgagagacccttcgtcggaggtcccgagcaagaggaagaattcggccccgcagctgccgctgttgcagtcgtccgggcctttcgtggaaggctctatcgtccgcatctcgatggagaacttcctaacatatgatatttgtgaagtatctcctggaccccacttgaatatgatcgttggagccaatggaacagggaagtcgagcattgtgtgtgccatttgccttggtttagctggaaaacctgctttcatgggacgagcagataaggttgggttttttgtgaagagaggatgttctagaggcatggttgaaattgaattgttcagggcttctggaaatcttgtaatcacccgtgagattgatgtggcaaaaaatcagtccttttggttcatcaacaaaaaatctacaacccagaaaatagtggaagagaaagttgcagccttaaatattcaagtggggaatctttgccagtttctccctcaggacaaagttggagaatttgctaaactcagcaaaattgaactcctcgaagccactgaaaagtcaattggtcccccagaaatgcacaaatatcactgtgaactcaaaaacttaagggagaaagaaaaacagctcgagacctcatgcaaagagaaaactgagtatctacagaaaatggttcagaggaatgaaagatataaacaagatgtggagaggttctatgaacggaagcgacatttagatttaattgagatgcttgaagcaaaaaggccatgggtggaatatgaaaatgttcgtcaggaatatgaagaagtaaaactagttcgtgaccgagtgaaggaagaggtcagaaaacttaaagaagggcagattcctgtaacatgtcgaattgaagaaatggaaaacgagcgtcacaatttggaggctcgaatcaaagaaaaggcaacagatattaaggaggcatctcaaaaatgcaaacagaagcaagatgttatagaaaggaaagataaacatattgaggaacttcagcaggctttaatagtaaagcaaaatgaagagcttgaccgacagaggagaataggtaatacccgcaaaatgatagaggatttgcaaaatgaactaaagaccacggaaaactgcgagaatcttcagccccagattgatgccattacaaatgatctgagacggattcaggatgaaaaggcattatgtgaaggcgaaataattgataagcgaagagagagggaaactctagagaaggagaaaaagagtgtggacgatcatattgtacgttttgacaatcttatgaatcagaaggaagataagctaagacagagattccgtgacacgtatgatgctgttttatggctaagaaataacagagacaaatttaaacaaagagtctgtgagcccataatgctcacgatcaatatgaaagataataaaaatgccaaatatattgaaaatcatattccatcaaatgacttaagagcctttgtatttgaaagtcaagaagatatggaggttttcctcaaagaggttcgtgacaataaaaaattaagagtaaatgctgttattgctcccaagagttcatatgcagacaaagcaccttcaagatctttgaatgaacttaaacaatacggatttttctcttatttgagagaattatttgatgcacctgatcctgtaatgagttacctttgctgtcagtatcatattcatgaagttcctgtaggaactgaaaagaccagagaaagaattgaacgggtaatacaagaaacccgattaaaacagatttatacagcagaagaaaagtatgtggtgaaaacttctttttattcaaacaaagttatttctagtaacacatctctaaaagtagcgcagtttctcactgtcactgtggacctagagcagagaagacacttagaagaacagctaaaggaaattcatagaaaattgcaagcagtggattcagggttgattgccttacgtgaaacaagcaaacatctggagcacaaagacaatgaacttagacaaaagaagaaggagcttcttgagagaaaaaccaagaaaagacaactggaacaaaaaatcagttccaaactaggaagtttaaagctgatggaacaggatacttgcaatcttgaagaggaagagcgaaaagcaagtaccaaaatcaaagaaataaatgttcaaaaagcgaaacttgttaccgaattaacaaacctaataaagatttgtacttctttgcatatacaaaaagtagatttaattctccaaaatactacagtgatctctgagaagaacaaattagaatcagattatatggccgcatcttcacaactccgtcttacagagcaacatttcattgaattggatgaaaatagacagagattattgcagaaatgcaaggaacttatgaaaagagctaggcaagtatgtaacctgggtgcagagcagactcttcctcaagaataccagacacaagtacccaccattccaaatggacacaactcctcactccccatggttttccaagaccttccaaacacattggatgaaattgatgctttattaactgaagaaagatcaagagcttcctgcttcacgggactgaatcctacaattgttcaggaatatacaaaaagagaagaagaaatagaacagttaactgaggaactaaagggaaagaaagttgaactagatcaatacagggaaaacatttcacaggtaaaagaaaggtggcttaatcctttaaaagagctggtag

SEQ ID NO: 3058 - protein, 935 aa, Homosapiens
MATPSKKTSTPSPQPSKRALPRDPSSEVPSKRKNSAPQLPLLQSSGPFVEGSIVRISMENFLTYDICEVSPGPHLNMIVGANGTGKSSIVCAICLGLAGKPAFMGRADKVGFFVKRGCSRGMVEIELFRASGNLVITREIDVAKNQSFWFINKKSTTQKIVEEKVAALNIQVGNLCQFLPQDKVGEFAKLSKIELLEATEKSIGPPEMHKYHCELKNLREKEKQLETSCKEKTEYLQKMVQRNERYKQDVERFYERKRHLDLIEMLEAKRPWVEYENVRQEYEEVKLVRDRVKEEVRKLKEGQIPVTCRIEEMENERHNLEARIKEKATDIKEASQKCKQKQDVIERKDKHIEELQQALIVKQNEELDRQRRIGNTRKMIEDLQNELKTTENCENLQPQIDAITNDLRRIQDEKALCEGEIIDKRRERETLEKEKKSVDDHIVRFDNLMNQKEDKLRQRFRDTYDAVLWLRNNRDKFKQRVCEPIMLTINMKDNKNAKYIENHIPSNDLRAFVFESQEDMEVFLKEVRDNKKLRVNAVIAPKSSYADKAPSRSLNELKQYGFFSYLRELFDAPDPVMSYLCCQYHIHEVPVGTEKTRERIERVIQETRLKQIYTAEEKYVVKTSFYSNKVISSNTSLKVAQFLTVTVDLEQRRHLEEQLKEIHRKLQAVDSGLIALRETSKHLEHKDNELRQKKKELLERKTKKRQLEQKISSKLGSLKLMEQDTCNLEEEERKASTKIKEINVQKAKLVTELTNLIKICTSLHIQKVDLILQNTTVISEKNKLESDYMAASSQLRLTEQHFIELDENRQRLLQKCKELMKRARQVCNLGAEQTLPQEYQTQVPTIPNGHNSSLPMVFQDLPNTLDEIDALLTEERSRASCFTGLNPTIVQEYTKREEEIEQLTEELKGKKVELDQYRENISQVKERWLNPLKEL

SEQ ID NO: 3059 - DNA, 3503 bp, Homosapiens
gcggcagttcgcgcgggagcggggcgcctgggtggatgggcgcttgggcgcctgggctgccggacggtgggaacggaagtcgctgtgggacgctgaggaagccaggatggcgactccgagcaagaagacgtcaactccaagcccccagccttccaagagagctctcccgagagacccttcgtcggaggtcccgagcaagaggaagaattcggccccgcagctgccgctgttgcagtcgtccgggcctttcgtggaaggctctatcgtccgcatctcgatggagaacttcctaacatatgatatttgtgaagtatctcctggaccccacttgaatatgatcgttggagccaatggaacagggaagtcgagcattgtgtgtgccatttgccttggtttagctggaaaacctgctttcatgggacgagcagataaggttgggttttttgtgaagagaggatgttctagaggcatggttgaaattgaattgttcagggcttctggaaatcttgtaatcacccgtgagattgatgtggcaaaaaatcagtccttttggttcatcaacaaaaaatctacaacccagaaaatagtggaagagaaagttgcagccttaaatattcaagtggggaatctttgccagtttctccctcaggacaaagttggagaatttgctaaactcagcaaaattgaactcctcgaagccactgaaaagtcaattggtcccccagaaatgcacaaatatcactgtgaactcaaaaacttaagggagaaagaaaaacagctcgagacctcatgcaaagagaaaactgagtatctacagaaaatggttcagaggaatgaaagatataaacaagatgtggagaggttctatgaacggaagcgacatttagatttaattgagatgcttgaagcaaaaaggccatgggtggaatatgaaaatgttcgtcaggaatatgaagaagtaaaactagttcgtgaccgagtgaaggaagaggtcagaaaacttaaagaagggcagattcctgtaacatgtcgaattgaagaaatggaaaacgagcgtcacaatttggaggctcgaatcaaagaaaaggcaacagatattaaggaggcatctcaaaaatgcaaacagaagcaagatgttatagaaaggaaagataaacatattgaggaacttcagcaggctttaatagtaaagcaaaatgaagagcttgaccgacagaggagaataggtaatacccgcaaaatgatagaggatttgcaaaatgaactaaagaccacggaaaactgcgagaatcttcagccccagattgatgccattacaaatgatctgagacggattcaggatgaaaaggcattatgtgaaggcgaaataattgataagcgaagagagagggaaactctagagaaggagaaaaagagtgtggacgatcatattgtacgttttgacaatcttatgaatcagaaggaagataagctaagacagagattccgtgacacgtatgatgctgttttatggctaagaaataacagagacaaatttaaacaaagagtctgtgagcccataatgctcacgatcaatatgaaagataataaaaatgccaaatatattgaaaatcatattccatcaaatgacttaagagcctttgtatttgaaagtcaagaagatatggaggttttcctcaaagaggttcgtgacaataaaaaattaagagtaaatgctgttattgctcccaagagttcatatgcagacaaagcaccttcaagatctttgaatgaacttaaacaatacggatttttctcttatttgagagaattatttgatgcacctgatcctgtaatgagttacctttgctgtcagtatcatattcatgaagttcctgtaggaactgaaaagaccagagaaagaattgaacgggtaatacaagaaacccgattaaaacagatttatacagcagaagaaaagtatgtggtgaaaacttctttttattcaaacaaagttatttctagtaacacatctctaaaagtagcgcagtttctcactgtcactgtggacctagagcagagaagacacttagaagaacagctaaaggaaattcatagaaaattgcaagcagtggattcagggttgattgccttacgtgaaacaagcaaacatctggagcacaaagacaatgaacttagacaaaagaagaaggagcttcttgagagaaaaaccaagaaaagacaactggaacaaaaaatcagttccaaactaggaagtttaaagctgatggaacaggatacttgcaatcttgaagaggaagagcgaaaagcaagtaccaaaatcaaagaaataaatgttcaaaaagcgaaacttgttaccgaattaacaaacctaataaagatttgtacttctttgcatatacaaaaagtagatttaattctccaaaatactacagtgatctctgagaagaacaaattagaatcagattatatggccgcatcttcacaactccgtcttacagagcaacatttcattgaattggatgaaaatagacagagattattgcagaaatgcaaggaacttatgaaaagagctaggcaagtatgtaacctgggtgcagagcagactcttcctcaagaataccagacacaagtacccaccattccaaatggacacaactcctcactccccatggttttccaagaccttccaaacacattggatgaaattgatgctttattaactgaagaaagatcaagagcttcctgcttcacgggactgaatcctacaattgttcaggaatatacaaaaagagaagaagaaatagaacagttaactgaggaactaaagggaaagaaagttgaactagatcaatacagggaaaacatttcacaggtaaaagaaaggtggcttaatcctttaaaagagctggtagaaaaaattaatgaaaaattcagcaatttttttagttccatgcagtgtgctggtgaagttgatctccatacagaaaatgaggaagattatgataaatatggaattcgaattagagtcaaatttcgaagtagtactcaactgcatgaattaactcctcatcatcaaagtggaggtgaaagaagtgtttctaccatgttatacttgatggcacttcaggagctaaatagatgtccattcagagtagttgatgaaatcaatcagggaatggacccaatcaatgaacggagagtgtttgaaatggttgtaaatactgcctgtaaagaaaatacatctcaatactttttcataacaccaaagctcctgcaaaatcttccttattctgaaaagatgacagttttgtttgtctacaatggccctcatatgctggaaccaaacacatggaatttaaaggctttccaaaggcggcggcgccgtattacattcactcaaccttcttaataaaagtaaagagagggaacttgggaattttttttgttaaattctgtttataagtatggctcaactgaataaaaggagattcactaaaacg

SEQ ID NO: 3060 - protein, 1101 aa, Homosapiens
MATPSKKTSTPSPQPSKRALPRDPSSEVPSKRKNSAPQLPLLQSSGPFVEGSIVRISMENFLTYDICEVSPGPHLNMIVGANGTGKSSIVCAICLGLAGKPAFMGRADKVGFFVKRGCSRGMVEIELFRASGNLVITREIDVAKNQSFWFINKKSTTQKIVEEKVAALNIQVGNLCQFLPQDKVGEFAKLSKIELLEATEKSIGPPEMHKYHCELKNLREKEKQLETSCKEKTEYLQKMVQRNERYKQDVERFYERKRHLDLIEMLEAKRPWVEYENVRQEYEEVKLVRDRVKEEVRKLKEGQIPVTCRIEEMENERHNLEARIKEKATDIKEASQKCKQKQDVIERKDKHIEELQQALIVKQNEELDRQRRIGNTRKMIEDLQNELKTTENCENLQPQIDAITNDLRRIQDEKALCEGEIIDKRRERETLEKEKKSVDDHIVRFDNLMNQKEDKLRQRFRDTYDAVLWLRNNRDKFKQRVCEPIMLTINMKDNKNAKYIENHIPSNDLRAFVFESQEDMEVFLKEVRDNKKLRVNAVIAPKSSYADKAPSRSLNELKQYGFFSYLRELFDAPDPVMSYLCCQYHIHEVPVGTEKTRERIERVIQETRLKQIYTAEEKYVVKTSFYSNKVISSNTSLKVAQFLTVTVDLEQRRHLEEQLKEIHRKLQAVDSGLIALRETSKHLEHKDNELRQKKKELLERKTKKRQLEQKISSKLGSLKLMEQDTCNLEEEERKASTKIKEINVQKAKLVTELTNLIKICTSLHIQKVDLILQNTTVISEKNKLESDYMAASSQLRLTEQHFIELDENRQRLLQKCKELMKRARQVCNLGAEQTLPQEYQTQVPTIPNGHNSSLPMVFQDLPNTLDEIDALLTEERSRASCFTGLNPTIVQEYTKREEEIEQLTEELKGKKVELDQYRENISQVKERWLNPLKELVEKINEKFSNFFSSMQCAGEVDLHTENEEDYDKYGIRIRVKFRSSTQLHELTPHHQSGGERSVSTMLYLMALQELNRCPFRVVDEINQGMDPINERRVFEMVVNTACKENTSQYFFITPKLLQNLPYSEKMTVLFVYNGPHMLEPNTWNLKAFQRRRRRITFTQPS

SEQ ID NO: 3061 - DNA, 5968 bp, Homosapiens
gcggcagttcgcgcgggagcggggcgcctgggtggatgggcgcttgggcgcctgggctgccggacggtgggaacggaagtcgctgtgggacgctgaggaagccaggatggcgactccgagcaagaagacgtcaactccaagcccccagccttccaagagagctctcccgagagacccttcgtcggaggtcccgagcaagaggaagaattcggccccgcagctgccgctgttgcagtcgtccgggcctttcgtggaaggctctatcgtccgcatctcgatggagaacttcctaacatatgatatttgtgaagtatctcctggaccccacttgaatatgatcgttggagccaatggaacagggaagtcgagcattgtgtgtgccatttgccttggtttagctggaaaacctgctttcatgggacgagcagataaggttgggttttttgtgaagagaggatgttctagaggcatggttgaaattgaattgttcagggcttctggaaatcttgtaatcacccgtgagattgatgtggcaaaaaatcagtccttttggttcatcaacaaaaaatctacaacccagaaaatagtggaagagaaagttgcagccttaaatattcaagtggggaatctttgccagtttctccctcaggacaaagttggagaatttgctaaactcagcaaaattgaactcctcgaagccactgaaaagtcaattggtcccccagaaatgcacaaatatcactgtgaactcaaaaacttaagggagaaagaaaaacagctcgagacctcatgcaaagagaaaactgagtatctacagaaaatggttcagaggaatgaaagatataaacaagatgtggagaggttctatgaacggaagcgacatttagatttaattgagatgcttgaagcaaaaaggccatgggtggaatatgaaaatgttcgtcaggaatatgaagaagtaaaactagttcgtgaccgagtgaaggaagaggtcagaaaacttaaagaagggcagattcctgtaacatgtcgaattgaagaaatggaaaacgagcgtcacaatttggaggctcgaatcaaagaaaaggcaacagatattaaggaggcatctcaaaaatgcaaacagaagcaagatgttatagaaaggaaagataaacatattgaggaacttcagcaggctttaatagtaaagcaaaatgaagagcttgaccgacagaggagaataggtaatacccgcaaaatgatagaggatttgcaaaatgaactaaagaccacggaaaactgcgagaatcttcagccccagattgatgccattacaaatgatctgagacggattcaggatgaaaaggcattatgtgaaggcgaaataattgataagcgaagagagagggaaactctagagaaggagaaaaagagtgtggacgatcatattgtacgttttgacaatcttatgaatcagaaggaagataagctaagacagagattccgtgacacgtatgatgctgttttatggctaagaaataacagagacaaatttaaacaaagagtctgtgagcccataatgctcacgatcaatatgaaagataataaaaatgccaaatatattgaaaatcatattccatcaaatgacttaagagcctttgtatttgaaagtcaagaagatatggaggttttcctcaaagaggttcgtgacaataaaaaattaagagtaaatgctgttattgctcccaagagttcatatgcagacaaagcaccttcaagatctttgaatgaacttaaacaatacggatttttctcttatttgagagaattatttgatgcacctgatcctgtaatgagttacctttgctgtcagtatcatattcatgaagttcctgtaggaactgaaaagaccagagaaagaattgaacgggtaatacaagaaacccgattaaaacagatttatacagcagaagaaaagtatgtggtgaaaacttctttttattcaaacaaagttatttctagtaacacatctctaaaagtagcgcagtttctcactgtcactgtggacctagagcagagaagacacttagaagaacagctaaaggaaattcatagaaaattgcaagcagtggattcagggttgattgccttacgtgaaacaagcaaacatctggagcacaaagacaatgaacttagacaaaagaagaaggagcttcttgagagaaaaaccaagaaaagacaactggaacaaaaaatcagttccaaactaggaagtttaaagctgatggaacaggatacttgcaatcttgaagaggaagagcgaaaagcaagtaccaaaatcaaagaaataaatgttcaaaaagcgaaacttgttaccgaattaacaaacctaataaagatttgtacttctttgcatatacaaaaagtagatttaattctccaaaatactacagtgatctctgagaagaacaaattagaatcagattatatggccgcatcttcacaactccgtcttacagagcaacatttcattgaattggatgaaaatagacagagattattgcagaaatgcaaggaacttatgaaaagagctaggcaagtatgtaacctgggtgcagagcagactcttcctcaagaataccagacacaagtacccaccattccaaatggacacaactcctcactccccatggttttccaagaccttccaaacacattggatgaaattgatgctttattaactgaagaaagatcaagagcttcctgcttcacgggactgaatcctacaattgttcaggaatatacaaaaagagaagaagaaatagaacagttaactgaggaactaaagggaaagaaagttgaactagatcaatacagggaaaacatttcacaggtaaaagaaaggtggcttaatcctttaaaagagctggtagaaaaaattaatgaaaaattcagcaatttttttagttccatgcagtgtgctggtgaagttgatctccatacagaaaatgaggaagattatgataaatatggaattcgaattagagtcaaatttcgaagtagtactcaactgcatgaattaactcctcatcatcaaagtggaggtgaaagaagtgtttctaccatgttatacttgatggcacttcaggagctaaatagatgtccattcagagtagttgatgaaatcaatcagggaatggacccaatcaatgaacggagagtgtttgaaatggttgtaaatactgcctgtaaagaaaatacatctcaatactttttcataacaccaaagctcctgcaaaatcttccttattctgaaaagatgacagttttgtttgtctacaatggccctcatatgctggaaccaaacacatggaatttaaaggctttccaaaggcggcggcgccgtattacattcactcaaccttcttaataaaagtaaagagagggaacttgggaattttttttgttaaattctgtttataagtatggctcaactgaataaaaggagattcactaaaacgaaaagcagttatttttggaaacctgcttttaaatacaaataggttgataatggaaactataatgacctttccaaaatagcagctggtagtaaaagttaagtcttcttcagtcttggttgaacttgagttcttggcactctgaccatgagtcattcagttctcatgttaaaatgtacttaatattacaaatcaaaggtacagtggaagaagggttaatcacaagaagttacttatatggtagccctgagctttaattgcagagtaactttaattacttttagagcctaaagatgactctagagcctaagtcctagtttctcccaatgttatatttaattttaaaaaattgatatgaaaatgtctaatgtatagtaataatttatgacagatctagtcatttcttcctattaaaaaagattaccttatctccagtaggaaatggaattttatgggcctttaaaagaaagttttatgaaacttgatgctataattttattggtatttcaaggggaaaaaagcactggggttcaaaaatggtagcagaactgctttgaaatgctgcaaggtggccactagatgatgcaaaatacaaccaaaagattgactgagaataaaattaggtgacaagggtttttaaagaataaccttttaaagtgtgggggcaggggttgcttttttttattttatttaaagtcaattatattttacatcttacatttctaaaagcattttataattatttttagtaagatttttcttaaaatttcatatactggtttctacaatttatatttgaaatttctcagtgttatgtaaagagtgatggaaaagcattgatttctttaaaaccgtaatgtttttagaacttaagcctatagggcctttcttacaatgttgatgtacccattatcttagaaaatctagtttaaactgttttctttcaccgcaaaagaattaaatgggaaaatcatttgtttatctctaagttatactaattagtagaaccaaacaaattatcttcttttaaaaaataaatcttataggaaaatagacagtccaaagtcatgtctttgaacagtggattggatctgtgccagtaatgacaaaattatttttttgacttgcttgcctgaataaattgaagaattgctttcagtttgggttttgtatattcttaagtagccattgaaatttatattcttaactaggtcaaaaaataatgagccataagtttatgtcctctcacttagacattttctctttaaaaaggtattttcttctttataaacattttaaaagagccttcccttcttaaactaactccagtgcatgaagtgtgaaaatattttaaaatgacatttttactaatatgagcaagtcatgtaaacattgaagaacttggtaacatattagtaaatggatattaccaaatgttttcatcgttaattactttgcgttccaccaaaatatctttactaaaatgtgcttggtgtagtttgtttattgtctaaattagtaccagtcatcttatttctgcaaaatgagtatcaatgtgaaaaagacacgtgaagattaagcatgtttgaaaataaaatggtcaattacatttcaatttacataggccaacaactgttccatactttgtttgtaaacatttaatttctctactggacaaaattaatatttggctttacattgaattttgagctgtgaagaataaattatgtatcattttagcatattaaacagtagtaagtctagcacatagtctcagccacttaaaacaaaagtttttttgtttgtttgtttgtttgtttttttgagatggagtctcactctgttgcccaggctggagtgcagtggcgtgatctcggcttactgcaacctccgcctcccgggttcaagcgattctcctgcctcagcctcccaagtaactgggacaacaggcgcgtcccaccacacccagctaattttttatacttttagtagagatggggtttcagcatattggccaggctggtctcgaactcctgaccttgtgatccacccgcctcggcctcccaaagtgctgggattataggcgtgagcccctgcacccggccaaaagttgatttttaattacataaaaatcgtaaaaacttctagtaaaaacttgatttggtgaatacagttatatttaaaaaccttaaggtgacaagcattttctatgcctaaatcttcattggtttgcctggaaagagtctctgttaaaagattttccatattcaaagtaaaaggaaagatttcttgctttctaattgtcttttggacacatgcctattttctttgaggtataaacctttagatgtgaaaaatgtaatttcattctgctattgtgtgtgcttgtgtgtgtgtaattgaaaaaactgggaaatcctgctttgttggtaataaatcaatatttttatattcttttggtgtatgtt

SEQ ID NO: 3062 - protein, 1101 aa, Homosapiens; identical to SEQ ID NO: 3060

SEQ ID NO: 3063 - DNA, 450 bp, Homosapiens
tatttaattcatccaaaagactgttgcaaaatttattttctttgcatgttcctaccccattcaagaatattcattataggcgtgagcccctgcacccggccaaaagttgatttttaattacataaaaatcgtaaaaacttctagtaaaaacttgatttggtgaatacagttatatttaaaaaccttaaggtgacaagcattttctatgcctaaatcttcattggtttgcctggaaagagtctctgttaaaagattttccatattcaaagtaaaaggaaagatttcttgctttctaattgtcttttggacacatgcctattttctttgaggtataaacctttagatgtgaaaaatgtaatttcattctgctattgtgtgtgcttgtgtgtgtgtaattgaaaaaactgggaaatcctgctttgttggtaataaatcaatatttttatattc

SEQ ID NO: 3064 - protein, 40 aa, Homosapiens
MPKSSLVCLERVSVKRFSIFKVKGKISCFLIVFWTHAYFL

SEQ ID NO: 3065 - DNA, 3174 bp, Homosapiens
tattatgacattacaacaatcaagacattgtatctgtataaaagtagatatatatggatcaatggaacagaatagagactcaagacatccacatatttatggtcagttgttgttgttttttttttttttttgacaaagatgcccagggatttcaatggggaaagagtaatctttgtaacaaacagtgctggaacaattgcatagtcatatgtaaaaaatgaactatacccttacctcgtatcatatacaaatgagtcacagacttaaatgtaagagctaaaattataaaacttcttgaagaaaatgtaagagaaaatcttagttaccttggttttggcaaggatttcttagataaaatagaaaaaacacaaattataagagaaaaagaatcattgcattcatcaaaatgaacaacttttgttttcggtagatgccattacaaaaaggcaggctacaaactgggagaatatatttgcagtacacctcagagaggacttgtatctagaccaagaggactatgcctgtgggccaaatctagcccaaggtcttgtttttgtaaagtccctgtgagctaagaatagttttcatactttttaaagagagagagagagtgtgtgtatgtgtgtgtgtgtataatgtgacagagactttatatggccctcaaagcttaatttccttattggcctttaaagtttgctgacccctgatggatgctataaaaataatttcaactatcaatacaaagaaaaccaacaacccagtgaaaaaatgggcaaagaacttcaccgtactaaaggaagtatatgaatagtaaataagcacgtgaaaagatgcccaacctgactttactggtcttgggtagcaaagaaaaagtatatatatgaaaaagaaagatgtccaaccttattagtcagtagggaagtttatattaaaggcatgagttaaaccatagactcactagaattgctaaaattttaaaagactgatcatactaaattgctgagaatttggagcaactggaactgtcatacgccactggtgggaatttaaaatgtatataatcactgtggaaaatcatttgggagtttaagggctaaacatatacctgacatatgaaatgaaagaatatgtctatgaaagactggtacacaaatgtgtaacagctgtctttgtaatagctaaaaactggaaacaaggctgagggcagtggctcatgcctataatcccagcactttaggaggccaaggcaggagaatcatgcccaggagtttgagaccagcctgggcaacactgtaagaccttatctctaaaaaaaaataaaataaaattttttaatgcttttcattgataaatgctttaccagcccttttgtaaggttctttcatttcttgttgtgcatacttaataaatgtttgttgctgtctgatcgtagtcattagccacacatttgaaagagtcaagaatgggctgggcacggtggctcacgcctgtaatcccagcactttgggaggccgaggtgggtggatcacgaggtcgggagatcgagaccatcctggctaacgtggtgaaaccccatctctactaaaaatacaaaaaattagccgggtgtggtggcgggcgcctgtagtcccagctactcgggaggctgaggcaggagaatggcgtgaatctgggaggcggagcttgcagtgagccgagatcacaccactgcactccagcctgggcgacagagcgagactccgtctcaaaaaaaaaaaaaaagagtcaagaatgatgactaaaattatgtagtagaataggtgtatgatagttcactttctcttttacctactcttgttttcttctcatgtttgctgccatttacctgcacatgatttttatctatctcatctgttcctgctatgcagcttcacttgaaccaaagagaaatttttttttcctacttgtccctttgaacacatggcaggttgctctgaggaactattgctaccacttggttttgtccttttttctttcttgaaaataaattcacaaaagaagattgacacaaaatttcaggggagattgtatttatgaggggaccgtggagtttgatactttctcagatttttggaaggtaaatagggcaacagacctataaaacatcccctgaaaaaggtagatggtgggaagcctctctttggtaatgtcactaacttatgggctatttttaggacaaattagtaagctgtgtgtgaatccaaatacagaggtcgataaaaatttcttgttatttcgtttttgaccatgggcaggtttcctaaccactccaagcttaatcattctctgcagccataagtatgatacctacctaatttggagggatattatgatattcagtttaataatatatatcaagatgcctagtgtgctgcttagcatgaagccagtgtttcctttaaaagtgtagatttacatcagaattaatattagttataaagatggaaagttgttacatttatttgcttattctaataccaaatttaggagctctgtgcttttcatctgacctctcttctgcctacctgcttgccactccctcaaaaaagaactgtttcagaggagacttttttttttacttagatgaaattttgaagaaaacattttacaaagaaatagtattattcccattattttattgtttatgattaaattagtttaagtagaatttatggtcttgtgtattaaaagttaagattattattctaaatttctagcattacattaaaatttaaagttgactttctaaatgaatgatttttatatttttaagtgtgtattctgtctggtaactaaaacaaatggttaacatttgaatttgaaatcaactaaattggaatgatgttttattaaaggaaaaatgagggagaaatgtgttaatttacagctaatgttttagtaaaagttgatgatacctagaacttaattttattcatatagaaaatggttttcattttatttgattcttattttaatgaactgttactaaaataacagttttaatatatacagttttcataagaaattctgtgaataattcttacttcttccacaagagggccttcttagaaaagctttttcttgtttaatgtcgaggtatttctgtacaatttccatgagaagtgaactttccat

SEQ ID NO: 3066 - protein, 68 aa, Homosapiens [sequence omitted]

SEQ ID NO: 3067 - DNA, 539 bp, Homosapiens
taaacatatacctgacatatgaaatgaaagaatatgtctatgaaagactggtacacaaatgtgtaacagctgtctttgtaatagctaaaaatggtctcgaactcctgaccttgtgatccacccgcctcggcctcccaaagtgctgggattataggcgtgagcccctgcacccggccaaaagttgatttttaattacataaaaatcgtaaaaacttctagtaaaaacttgatttggtgaatacagttatatttaaaaaccttaaggtgacaagcattttctatgcctaaatcttcattggtttgcctggaaagagtctctgttaaaagattttccatattcaaagtaaaaggaaagatttcttgctttctaattgtcttttggacacatgcctattttctttgaggtataaacctttagatgtgaaaaatgtaatttcattctgctattgtgtgtgcttgtgtgtgtgtaattgaaaaaactgggaaatcctgctttgttggtaataaatcaatatttttatattcttttggtgtatgtt

SEQ ID NO: 3068 - protein, 30 aa, Homosapiens
MKEYVYERLVHKCVTAVFVIAKNGLELLTL

SEQ ID NO: 3069 - DNA, 549 bp, Homosapiens
agagacagggtcttgccatcttgctcaggctggtcttgaactcctggcctcgtgatcctcctacctcagcctccggaatagctgggattacaggcataagctacagtgccagctctttattcctttagatggtttggatacaggatataagaagatccaagtaacagaacaatcaccatacctgattgatttcatcaactactctgaatggacatctatttagctcctgaagtgccatcaagtataacatggtagaaacacttctttcacctccactttgatgatgaggagttaattcatgcagttgagtactacttcgaaatttgactctaattcgaattccatatttatcataatcttcctataaaacatttaaaaagtgatgaaaaatgagtttcctctggtaatgtcattctattatttgaaaatggattgaattaactgagtaagagtaaagaactcaaaatttagtgacactagtttaaatatgtaacaataaatatatatgtatttttaaaaataataaatattaagcaaacagttactatc

SEQ ID NO: 3070 - protein, 55 aa, Homosapiens
SSYLSLRNSWDYRHKLQCQLFIPLDGLDTGYKKIQVTEQSPYLIDFINYSEWTSI

SEQ ID NO: 3071 - DNA, 5205 bp, Homosapiens
tgacataatggggtttttttaattatagattcacactgcatttattcatcacccctgtcctctcatccataactcaaatttactaccagcaacacaaaatacaaagatgtgtccagtttcactacagctcttcgcgtttacaagtgtcgagcgcttgctttcggaacgcccttgtgattggccgagccaatgccagtgacatcaaccaacttacttttgattggaaggctggttgctgggactgtagcgtttgcaggaagtcacttaactgtttgggagctggaaaaccgaagctgaagttctcttttgccataggaacgagcgcaactgactaggaaagatgtgtcccaaagctccgcaagctggaacgtgagccaggaggcccggaccggccacgggaccgcgaggcactccgaaagtgtgcggctgccccttccctgcctcccagctgttacccttttaaatgtcagtgttcgaggctgtaggggtagcacgaggcagcgaaacggaacagtcggattggccgcacgcctcagttctagacgcacctctccaccgaaggccgttctgactggcagggggagaaagtaaacagagttgaatcaccctccccactggccaattggagggggtttggtttgtgacgtgatgggattctgcgaaattgttactgagcaagagaatgccggaacggtgcggaccggccggagcaggggttcagaagccgtcagtggactcgggaaaaagtgtctcttagacctggcgctcggcgggaccctcgccacccgcgtcggggtgatcgggtgaatgtcctggggctttggctcgacggcgaggcggccgagggcgtgcacctctcttgcagtttcctctcccagcgcctcgggggcgttttcagtcgaataaacttgcgaccgccacgtgtggcatctttccaagggagccggctcagaggggccggcgcgcccgtcgggggatcgcggccggcgcggggcaggggcggcggctagaggcggcggcgcggcggagcccggggccgtggatgctgcgtgcggaggcgctgccggttacgtaaagatgaggggctgaggtcgcctcggcgctcctgcgagtcggaagcgccccgcgcccccgcccccttggccgccgcgccgtgccgcgccgcgccgcgctcgtcgtccgaggccagggcagggcgagccgaacctccgcagccaccgccaagtttgtccgcgccgcctgggctgccgtcgcccgcaccatgtccgcggccgcctacatggacttcgtggctgcccagtgtctggtttccatttcgaaccgcgctgcggtgccggagcatggggtcgctccggacgccgagcggctgcgactacctgagcgcgaggtgaccaaggagcacggtgacccgggggacacctggaaggattactgcacactggtcaccatcgccaagagcttgttggacctgaacaagtaccgacccatccagaccccctccgtgtgcagcgacagtctggaaagtccagatgaggatatgggatccgacagcgacgtgaccaccgaatctgggtcgagtccttcccacagcccggaggagagacaggatcctggcagcgcgcccagcccgctctccctcctccatcctggagtggctgcgaaggggaaacacgcctccgaaaagaggcacaagtgcccctacagtggctgtgggaaagtctatggaaaatcctcccatctcaaagcccattacagagtgcatacaggtgaacggccctttccctgcacgtggccagactgccttaaaaagttctcccgctcagacgagctgacccgccactaccggacccacactggggaaaagcagttccgctgtccgctgtgtgagaagcgcttcatgaggagtgaccacctcacaaagcacgcccggcggcacaccgagttccaccccagcatgatcaagcgatcgaaaaaggcgctggccaacgctttgtgaggtgctgcccgtggaagccagggagggatggaccccgaaaggagaaaagtactcccaggaaacagacgcgtgaaaactgagccccagaagaggcacacttgacggcacaggaagtcactgctctttggtcaatattctgattttcctctccctgcattgtttttaaaaagcacattgtagcctaagatcaaagtcaacaacactcggtccccttgaagaggcaactctctgaacccgtctctgactgttggagggaaggcaaatgcttttgggttttttggtttttgtttttgtttttttttctccttttatttttttgcgggggagggtagggagtgggtgggggggaggggggtaaggccaagactggggtagaattttaaagattcaacactggtgtacatatgtccgctgggtgagttgacctgtggcctcgcacagtgattctgggccctttatgcttgctgtctctcagaattgttttcttaccttttaatgtaatgacgagtgtgcttcagtttgtttagcaaaaccactctcttgaatcacgttaacttttgagattaaaaaaaaaaacgccatagcacagctgtctttatgcaagcaagagcacatctactccagcatgatctgtcatctaaagacttgaaaacaaaaaacagttacttatagtcaatgggtaagcagagtctgaatttatactaatcaagacaaacctttgaaaggttacactaagtacagaacttttaaaccttgctttgtatgagttgtactttttgaacataagctgcacttttattttctaatgcagaggatgaataagttaaatacatgctttgaggatagaagcagatgttctgtttggcaccacgttataatctgcttattttacaatatacacgtttccctaagaaatcatggcagagatgtgagggcagaatatacacaacagatgctgaaggagaaggagggtagtgttttgcaaaagaaaaagaaaagaaccaacagaattttaactctattaacttttccaaattttcctatgcttttagttaacatcattattgtatcctaatgccactaggggagagagcttttgactctgttgggttttatttgaatgtgtgcataacagtaatgagatctggaaacacctattttttggggaaaaaggtttgttggtctccttcctgtgttcctacaaaactcccactctcaggtgcaagagttatgtagaaggaaagggagctgaaataggaacagaaaaatcaacccctataactagtgaacaccaagggaaaataccacaatgatttcagaggagactctgcaaaatcgtcccttgtggagaatgcaggcaacatggaatactaggaatgaaatcacatcactgtatcttttacatcaatagcctcaccactaatatatcttgtatctaggtgtctataatggctgaaaccactacatccatctatgccatttacctgaaaacttaactgtggcctttatgaggccagaaaagtgaactgagttttcgtagttaagacctcaaatgaggggagtcagcagtgatcatgggggaaatgtttacattttttttttcttcagaagtaacgctttctgatgattttatctgatatttaaaacagggagctatggtgcactctagtttatacttgcgctctgaaatgtgtaaacatagggtgcctacctatttcacctgacccatactcgtttctgattcagaatcagtgtgggctcctgcagtgggcgcgggtcacggctgactccaacttccaatacaacagccatcactagcacagtgtttttttgtttaaccaacgtagttgtattagtagttctataaagagaactgcttttaacattagggactgggagcagtccatgggataaaaaggaaagtgttttctcacgagaaaacatgtcaggaaaaataaagaacactttctacctctgtttcagatttttgaaacacttattttaaaccaaattttaatttctgtgtccaaaataagttttaaggacatctgttcttccatacgaaataggttaggctgcctatttctcactgagctcatggaatggttctgcttatgatactctgcacgctgccttttagtgagtgaggagtttggggttgcctagcaacttgctaacttgtaaaaagtcatctttccctcacagaaagaaacgaaagaaagcaaagcaaagtcagtgaaagacaatctttatagtttcaggagtaaatctaaatgtggcttttgtcaagcacttagatggatataaatgcagcaacttgttttaaaaaaatgcacaatttacttcccaaaaaagttgttacttgccttttcaagttgttgacaaacacacatttgatattctcttatatgttatagtaatgtaacgtataaactcaagcctttttattctttgtgattaaatcctgttttaaaatgtcacaaaacaggaaccagcattctaattagatttactatatcaagatatggttcaaataggactactagagttcattgaacactaaaactatgaaacaattactttttatattaaaaagaccatggatttaacttatgaaaatccaaatgcaggatagtaatttttgtttacttttttaaccaaactgaatttttgaaagactattgcaggtgtttaaaaagaaagaaaagttgttttatctaatactgtaagtagttgtcatattctggaaaatttaatagttttagagttaagatatctcctctctttggttagggaagaagaaagcccttcaccattgtggaatgatgccctggctttaaggtttagctccacatcatgcttctcttgagaattctatttggtagttacaattacagaaactgattagtttgtcagtttgcagatagatttagcacagtactcatcactcggatagattgagatgttctttcacatcagatgatctgtaacactgtaagatactgatctttacaactgtttaatcagttttatttttgtacagtattagtgacctaagttattttgctgtcccgtttttgtaaatcaaatgaaattataaaagaggattctgacagtaggtattttgtacatatgtatatatgttgtccaaataaaaataataaatgataaagactgaattgttctagccattatgtgttgtaaaaggg

SEQ ID NO: 3072 - protein, 244 aa, Homosapiens; identical to SEQ ID NO: 394

SEQ ID NO: 3073 - DNA, 5173 bp, Homosapiens
tgacataatggggtttttttaattatagattcacactgcatttattcatcacccctgtcctctcatccataactcaaatttactaccagcaacacaaaatacaaagatgtgtccagtttcactacagctcttcgcgtttacaagtgtcgagcgcttgctttcggaacgcccttgtgattggccgagccaatgccagtgacatcaaccaacttacttttgattggaaggctggttgctgggactgtagcgtttgcaggaagtcacttaactgtttgggagctggaaaaccgaagctgaagttctcttttgccataggaacgagcgcaactgactaggaaagatgtgtcccaaagctccgcaagctggaacgtgagccaggaggcccggaccggccacgggaccgcgaggcactccgaaagtgtgcggctgccccttccctgcctcccagctgttacccttttaaatgtcagtgttcgaggctgtaggggtagcacgaggcagcgaaacggaacagtcggattggccgcacgcctcagttctagacgcacctctccaccgaaggccgttctgactggcagggggagaaagtaaacagagttgaatcaccctccccactggccaattggagggggtttggtttgtgacgtgatgggattctgcgaaattgttactgagcaagagaatgccggaacggtgcggaccggccggagcaggggttcagaagccgtcagtggactcgggaaaaagtgtctcttagacctggcgctcggcgggaccctcgccacccgcgtcggggtgatcgggtgaatgtcctggggctttggctcgacggcgaggcggccgagggcgtgcacctctcttgcagtttcctctcccagcgcctcgggggcgttttcagtcgaataaacttgcgaccgccacgtgtggcatctttccaagggagccggctcagaggggccggcgcgcccgtcgggggatcgcggccggcgcggggcaggggcggcggctagaggcggcggcgcggcggagcccggggccgtggatgctgcgtgcggaggcgctgccggttacgtaaagatgaggggctgaggtcgcctcggcgctcctgcgagtcggaagcgccccgcgcccccgcccccttggccgccgcgccgtgccgcgccgcgccgcgctcgtcgtccgaggccagggcagggcgagccgaacctccgcagccaccgccaagtttgtccgcgccgcctgggctgccgtcgcccgcaccatgtccgcggccgcctacatggacttcgtggctgcccagtgtctggtttccatttcgaaccgcgctgcggtgccggagcatggggtcgctccggacgccgagcggctgcgactacctgagcgcgaggtgaccaaggagcacggtgacccgggggacacctggaaggattactgcacactggtcaccatcgccaagagcttgttggacctgaacaagtaccgacccatccagaccccctccgtgtgcagcgacagtctggaaagtccagatgaggatatgggatccgacagcgacgtgaccaccgaatctgggtcgagtccttcccacagcccggaggagagacaggatcctggcagcgcgcccagcccgctctccctcctccatcctggagtggctgcgaaggggaaacacgcctccgaaaagaggcacaagtgcccctacagtggctgtgggaaagtctatggaaaatcctcccatctcaaagcccattacagagtgcatacaggtgaacggccctttccctgcacgtggccagactgccttaaaaagttctcccgctcagacgagctgacccgccactaccggacccacactggggaaaagcagttccgctgtccgctgtgtgagaagcgcttcatgaggagtgaccacctcacaaagcacgcccggcggcacaccgagttccaccccagcatgatcaagcgatcgaaaaaggcgctggccaacgctttgtgaggtgctgcccgtggaagccagggagggatggaccccgaaaggagaaaagtactcccaggaaacagacgcgtgaaaactgagccccagaagaggcacacttgacggcacaggaagtcactgctctttggtcaatattctgattttcctctccctgcattgtttttaaaaagcacattgtagcctaagatcaaagtcaacaacactcggtccccttgaagaggcaactctctgaacccgtctctgactgttggagggaaggcaaatgcttttgggttttttggtttttgtttttgtttttttttctccttttatttttttgcgggggagggtagggagtgggtgggggggaggggggtaaggccaagactggggtagaattttaaagattcaacactggtgtacatatgtccgctgggtgagttgacctgtggcctcgcacagtgattctgggccctttatgcttgctgtctctcagaattgttttcttaccttttaatgtaatgacgagtgtgcttcagtttgtttagcaaaaccactctcttgaatcacgttaacttttgagattaaaaaaaaaaacgccatagcacagctgtctttatgcaagcaagagcacatctactccagcatgatctgtcatctaaagacttgaaaacaaaaaacagttacttatagtcaatgggtaagcagagtctgaatttatactaatcaagacaaacctttgaaaggttacactaagtacagaacttttaaaccttgctttgtatgagttgtactttttgaacataagctgcacttttattttctaatgcagaggatgaataagttaaatacatgctttgaggatagaagcagatgttctgtttggcaccacgttataatctgcttattttacaatatacacgtttccctaagaaatcatggcagagatgtgagggcagaatatacacaacagatgctgaaggagaaggagggtagtgttttgcaaaagaaaaagaaaagaaccaacagaattttaactctattaacttttccaaattttcctatgcttttagttaacatcattattgtatcctaatgccactaggggagagagcttttgactctgttgggttttatttgaatgtgtgcataacagtaatgagatctggaaacacctattttttggggaaaaaggtttgttggtctccttcctgtgttcctacaaaactcccactctcaggtgcaagagttatgtagaaggaaagggagctgaaataggaacagaaaaatcaacccctataactagtgaacaccaagggaaaataccacaatgatttcagaggagactctgcaaaatcgtcccttgtggagaatgcaggcaacatggaatactaggaatgaaatcacatcactgtatcttttacatcaatagcctcaccactaatatatcttgtatctaggtgtctataatggctgaaaccactacatccatctatgccatttacctgaaaacttaactgtggcctttatgaggccagaaaagtgaactgagttttcgtagttaagacctcaaatgaggggagtcagcagtgatcatgggggaaatgtttacattttttttttcttcagaagtaacgctttctgatgattttatctgatatttaaaacagggagctatggtgcactctagtttatacttgcgctctgaaatgtgtaaacatagggtgcctacctatttcacctgacccatactcgtttctgattcagaatcagtgtgggctcctgcagtgggcgcgggtcacggctgactccaacttccaatacaacagccatcactagcacagtgtttttttgtttaaccaacgtagttgtattagtagttctataaagagaactgcttttaacattagggactgggagcagtccatgggataaaaaggaaagtgttttctcacgagaaaacatgtcaggaaaaataaagaacactttctacctctgtttcagatttttgaaacacttattttaaaccaaattttaatttctgtgtccaaaataagttttaaggacatctgttcttccatacgaaataggttaggctgcctatttctcactgagctcatggaatggttctgcttatgatactctgcacgctgccttttagtgagtgaggagtttggggttgcctagcaacttgctaacttgtaaaaagtcatctttccctcacagaaagaaacgaaagaaagcaaagcaaagtcagtgaaagacaatctttatagtttcaggagtaaatctaaatgtggcttttgtcaagcacttagatggatataaatgcagcaacttgttttaaaaaaatgcacaatttacttcccaaaaaagttgttacttgccttttcaagttgttgacaaacacacatttgatattctcttatatgttatagtaatgtaacgtataaactcaagcctttttattctttgtgattaaatcctgttttaaaatgtcacaaaacaggaaccagcattctaattagatttactatatcaagatatggttcaaataggactactagagttcattgaacactaaaactatgaaacaattactttttatattaaaaagaccatggatttaacttatgaaaatccaaatgcaggatagtaatttttgtttacttttttaaccaaactgaatttttgaaagactattgcaggtgtttaaaaagaaagaaaagttgttttatctaatactgtaagtagttgtcatattctggaaaatttaatagttttagagttaagatatctcctctctttggttagggaagaagaaagcccttcaccattgtggaatgatgccctggctttaaggtttagctccacatcatgcttctcttgagaattctatttggtagttacaattacagaaactgattagtttgtcagtttgcagatagatttagcacagtactcatcactcggatagattgagatgttctttcacatcagatgatctgtaacactgtaagatactgatctttacaactgtttaatcagttttatttttgtacagtattagtgacctaagttattttgctgtcccgtttttgtaaatcaaatgaaattataaaagaggattctgacagtaggtattttgtacatatgtatatatgttgtccaaataaaaataataaatgataaagactg

SEQ ID NO: 3074 - protein, 244 aa, Homosapiens; identical to SEQ ID NO: 394

SEQ ID NO: 3075 - DNA, 5947 bp, Homosapiens
gcattattaacggaatgaccagccctagctgcagcaaaatgaaagcaacaggagctgctccggggactgcttttgccagtacccagaatcagtgctcaggctcagaaatcctggatagaaagagcattttataaaagagaatgtgtccacatcatacccagcaccaaagacccccataggtgttgctgtgggcgtctgataggccagcatgttggcctcacccccagtatctccgtgcttcagaatgagaaaaatgaaagtcgcctctcccgaaatgacatccagtctgaaaagtggtccatcagcaaacacactcaactcagccctacggatgcttttgggaccattgagttccaaggaggtggccattccaacaaagccatgtatgtgcgagtatcttttgatacaaaacctgatctcctcttacacctgatgaccaaggaatggcagttggagcttcccaagcttctcatctctgtccatgggggcctgcagaactttgaactccagccaaaactcaagcaagtctttgggaaagggctcatcaaagcagcaatgacaactggagcgtggatattcactggaggggttaacacaggtgttattcgtcatgttggcgatgccttgaaggatcatgcctctaagtctcgaggaaagatatgcaccataggtattgccccctggggaattgtggaaaaccaggaggacctcattggaagagatgttgtccggccataccagaccatgtccaatcccatgagcaagctcactgttctcaacagcatgcattcccacttcattctggctgacaacgggaccactggaaaatatggagcagaggtgaaacttcgaagacaactggaaaagcatatttcactccagaagataaacacaagaatcggtcaaggtgttcctgtggtggcactcatagtggaaggaggacccaatgtgatctcgattgttttggagtaccttcgagacacccctcccgtgccagtggttgtctgtgatgggagtggacgggcatcggacatcctggcctttgggcataaatactcagaagaaggcggactgataaatgaatctttgagggaccagctgttggtgactatacagaagactttcacatacactcgaacccaagctcagcatctgttcatcatcctcatggagtgcatgaagaagaaggaattgattacggtatttcggatgggatcagaaggacaccaggacattgatttggctatcctgacagctttactcaaaggagccaatgcctcggccccagaccaactgagcttagctttagcctggaacagagtcgacatcgctcgcagccagatctttatttacgggcaacagtggccggtgggatctctggagcaagccatgttggatgccttagttctggacagagtggattttgtgaaattactcatagagaatggagtaagcatgcaccgttttctcaccatctccagactagaggaattgtacaatacgagacatgggccctcaaatacattgtaccacttggtcagggatgtcaaaaaggggaacctgcccccagactacagaatcagcctgattgacatcggcctggtgatcgagtacctgatgggcggggcttatcgctgcaactacacgcgcaagcgcttccggaccctctaccacaacctcttcggccccaagaggcccaaagccttgaaactgctgggaatggaggatgatattcccttgaggcgaggaagaaagacaaccaagaaacgtgaagaagaggtggacattgacttggatgatcctgagatcaaccacttccccttccctttccatgagctcatggtgtgggctgttctcatgaagcggcagaagatggccctgttcttctggcagcacggtgaggaggccatggccaaggccctggtggcctgcaagctctgcaaagccatggctcatgaggcctctgagaacgacatggttgacgacatttcccaggagctgaatcacaattccagagactttggccagctggctgtggagctcctggaccagtcctacaagcaggacgaacagctggccatgaaactgctgacgtatgagctgaagaactggagcaacgccacgtgcctgcagcttgccgtggctgccaaacaccgcgacttcatcgcgcacacgtgcagccagatgctgctcaccgacatgtggatgggccggctccgcatgcgcaagaactcaggcctcaaggtaattctgggaattctacttcctccttcaattctcagcttggagttcaagaacaaagacgacatgccctatatgtctcaggcccaggaaatccacctccaagagaaggaggcagaagaaccagagaagcccacaaaggaaaaagaggaagaggacatggagctcacagcaatgttgggacgaaacaacggggagtcctccaggaagaaggatgaagaggaagttcagagcaagcaccggttaatccccctcggcagaaaaatctatgaattctacaatgcacccatcgtgaagttctggttctacacactggcgtatatcggatacctgatgctcttcaactatatcgtgttagtgaagatggaacgctggccgtccacccaggaatggatcgtaatctcctatattttcaccctgggaatagaaaagatgagagagattctgatgtcagagccagggaagttgctacagaaagtgaaggtatggctgcaggagtactggaatgtcacggacctcatcgccatccttctgttttctgtcggaatgatccttcgtctccaagaccagcccttcaggagtgacgggagggtcatctactgcgtgaacatcatttactggtatatccgtctcctagacatcttcggcgtgaacaagtatttgggcccgtatgtaatgatgattggaaaaatgatgatagacatgatgtactttgtcatcattatgctggtggttctgatgagctttggggtcgccaggcaagccatcctttttcccaatgaggagccatcatggaaactggccaagaacatcttctacatgccctattggatgatttatggggaagtgtttgcggaccagatagaccctccctgtggacagaatgagacccgagaggatggtaaaataatccagctgcctccctgcaagacaggagcttggatcgtgccggccatcatggcctgctacctcttagtggcaaacatcttgctggtcaacctcctcattgctgtctttaacaatacattttttgaagtaaaatcgatatccaaccaagtctggaagtttcagaggtatcagctcatcatgactttccatgaaaggccagttctgcccccaccactgatcatcttcagccacatgaccatgatattccagcacctgtgctgccgatggaggaaacacgagagcgacccggatgaaagggactacggcctgaaactcttcataaccgatgatgagctcaagaaagtacatgactttgaagagcaatgcatagaagaatacttcagagaaaaggatgatcggttcaactcatctaatgatgagaggatacgggtgacttcagaaagggtggagaacatgtctatgcggctggaggaagtcaacgagagagagcactccatgaaggcttcactccagaccgtggacatccggctggcgcagctggaagaccttatcgggcgcatggccacggccctggagcgcctgacaggtctggagcgggccgagtccaacaaaatccgctcgaggacctcgtcagactgcacggacgccgcctacattgtccgtcagagcagcttcaacagccaggaagggaacaccttcaagctccaagagagtatagaccctgcaggtgaggagaccatgtccccaacttctccaaccttaatgccccgtatgcgaagccattctttctattcggtcaatatgaaagacaaaggtggtatagaaaagttggaaagtatttttaaagaaaggtccctgagcctacaccgggctactagttcccactctgtagcaaaagaacccaaagctcctgcagcccctgccaacaccttggccattgttcctgattccagaagaccatcatcgtgtatagacatctatgtctctgctatggatgagctccactgtgatatagaccctctggacaattccgtgaacatccttgggctgggcgagccaagcttttcaactccagtaccttccacagccccttcaagtagtgcctatgcaacacttgcacccacagacagacctccaagccggagcattgattttgaggacatcacctccatggacactagatctttttcttcagactacacccacctcccagaatgccaaaacccctgggactcagagcctccgatgtaccacaccattgagcgttccaaaagtagccgctacctagccaccacaccctttcttctagaagaggctcccattgtgaaatctcatagctttatgttttccccctcaaggagctattatgccaactttggggtgcctgtaaaaacagcagaatacacaagtattacagactgtattgacacaaggtgtgtcaatgcccctcaagcaattgcggacagagctgccttccctggaggtcttggagacaaagtggaggacttaacttgctgccatccagagcgagaagcagaactgagtcaccccagctctgacagtgaggagaatgaggccaaaggccgcagagccaccattgcaatatcctcccaggagggtgataactcagagagaaccctgtccaacaacatcactgttcccaagatagagcgcgccaacagctactcggcagaggagccaagtgcgccatatgcacacaccaggaagagcttctccatcagtgacaaactcgacaggcagcggaacacagcaagcctgcgaaatcccttccagagaagcaagtcctccaagccggagggccgaggggacagcctgtccatgaggagactgtccagaacatcggctttccaaagctttgaaagcaagcacaactaaaccttcttaatatccgccacagaaggctcaagaatccagccctaaaattctctccaactccagtttttcccctttccttgaatcatacctgctttattcttagctgagcaaaacaagcaatgctttgggaggtgttaactcaaaggtgacttctgggccacagatcaagaaagcatttgatctgacccagtgccagacacaggggatttaaggcatgttcacacttgctgggcagggagggggaagagagggagaaggaagggttagagatgaatgtgtatccgcagtcacagcagaaagccatgagagcaggggaaacaaggggcttcgagcacgctccatgccaggaggcatctgttgatttctgaccattatcaagagttgtaggatgcagggctaaattgcaaaataaaataaaatagccagcgtacacaatgagatattctaaacttccattctgttttcttttcacattggctccatcactggtgactgatgaagagcatcctctttattcagtataagccggcagcaagcagttctacctaacgtcccacatccttctcatgccaacacttctgtaattgatcattataaagaaaaaacaaggtaacagtcatagttcacctgtctcttatctattcacttctggtgccacaactgtttatccttttttgaagaaaataagggaacagaaatgcctttttgtattgcaatcgaaatgaaagaagagttgatgttaaaaaaacaaaagtcaagtgatttattatatacagtgggcgttcaagtctagtcgagcaagctcaggagaatgtaattaaataattttatattttttaatttattttgtatctcacctgtcatggatgaattcattcactgaatatgtaatattgaactt

SEQ ID NO: 3076 - protein, 1554 aa, Homosapiens
MYVRVSFDTKPDLLLHLMTKEWQLELPKLLISVHGGLQNFELQPKLKQVFGKGLIKAAMTTGAWIFTGGVNTGVIRHVGDALKDHASKSRGKICTIGIAPWGIVENQEDLIGRDVVRPYQTMSNPMSKLTVLNSMHSHFILADNGTTGKYGAEVKLRRQLEKHISLQKINTRIGQGVPVVALIVEGGPNVISIVLEYLRDTPPVPVVVCDGSGRASDILAFGHKYSEEGGLINESLRDQLLVTIQKTFTYTRTQAQHLFIILMECMKKKELITVFRMGSEGHQDIDLAILTALLKGANASAPDQLSLALAWNRVDIARSQIFIYGQQWPVGSLEQAMLDALVLDRVDFVKLLIENGVSMHRFLTISRLEELYNTRHGPSNTLYHLVRDVKKGNLPPDYRISLIDIGLVIEYLMGGAYRCNYTRKRFRTLYHNLFGPKRPKALKLLGMEDDIPLRRGRKTTKKREEEVDIDLDDPEINHFPFPFHELMVWAVLMKRQKMALFFWQHGEEAMAKALVACKLCKAMAHEASENDMVDDISQELNHNSRDFGQLAVELLDQSYKQDEQLAMKLLTYELKNWSNATCLQLAVAAKHRDFIAHTCSQMLLTDMWMGRLRMRKNSGLKVILGILLPPSILSLEFKNKDDMPYMSQAQEIHLQEKEAEEPEKPTKEKEEEDMELTAMLGRNNGESSRKKDEEEVQSKHRLIPLGRKIYEFYNAPIVKFWFYTLAYIGYLMLFNYIVLVKMERWPSTQEWIVISYIFTLGIEKMREILMSEPGKLLQKVKVWLQEYWNVTDLIAILLFSVGMILRLQDQPFRSDGRVIYCVNIIYWYIRLLDIFGVNKYLGPYVMMIGKMMIDMMYFVIIMLVVLMSFGVARQAILFPNEEPSWKLAKNIFYMPYWMIYGEVFADQIDPPCGQNETREDGKIIQLPPCKTGAWIVPAIMACYLLVANILLVNLLIAVFNNTFFEVKSISNQVWKFQRYQLIMTFHERPVLPPPLIIFSHMTMIFQHLCCRWRKHESDPDERDYGLKLFITDDELKKVHDFEEQCIEEYFREKDDRFNSSNDERIRVTSERVENMSMRLEEVNEREHSMKASLQTVDIRLAQLEDLIGRMATALERLTGLERAESNKIRSRTSSDCTDAAYIVRQSSFNSQEGNTFKLQESIDPAGEETMSPTSPTLMPRMRSHSFYSVNMKDKGGIEKLESIFKERSLSLHRATSSHSVAKEPKAPAAPANTLAIVPDSRRPSSCIDIYVSAMDELHCDIDPLDNSVNILGLGEPSFSTPVPSTAPSSSAYATLAPTDRPPSRSIDFEDITSMDTRSFSSDYTHLPECQNPWDSEPPMYHTIERSKSSRYLATTPFLLEEAPIVKSHSFMFSPSRSYYANFGVPVKTAEYTSITDCIDTRCVNAPQAIADRAAFPGGLGDKVEDLTCCHPEREAELSHPSSDSEENEAKGRRATIAISSQEGDNSERTLSNNITVPKIERANSYSAEEPSAPYAHTRKSFSISDKLDRQRNTASLRNPFQRSKSSKPEGRGDSLSMRRLSRTSAFQSFESKHN

SEQ ID NO: 3077 - DNA, 6022 bp, Homosapiens
gcattattaacggaatgaccagccctagctgcagcaaaatgaaagcaacaggagctgctccggggactgcttttgccagtacccagaatcagtgctcaggctcagaaatcctggatagaaagagcattttataaaagagaatgtgtccacatcatacccagcaccaaagacccccataggtgttgctgtgggcgtctgataggccagcatgttggcctcacccccagtatctccgtgcttcagaatgagaaaaatgaaagtcgcctctcccgaaatgacatccagtctgaaaagtggtccatcagcaaacacactcaactcagccctacggatgcttttgggaccattgagttccaaggaggtggccattccaacaaagccatgtatgtgcgagtatcttttgatacaaaacctgatctcctcttacacctgatgaccaaggaatggcagttggagcttcccaagcttctcatctctgtccatgggggcctgcagaactttgaactccagccaaaactcaagcaagtctttgggaaagggctcatcaaagcagcaatgacaactggagcgtggatattcactggaggggttaacacaggtgttattcgtcatgttggcgatgccttgaaggatcatgcctctaagtctcgaggaaagatatgcaccataggtattgccccctggggaattgtggaaaaccaggaggacctcattggaagagatgttgtccggccataccagaccatgtccaatcccatgagcaagctcactgttctcaacagcatgcattcccacttcattctggctgacaacgggaccactggaaaatatggagcagaggtgaaacttcgaagacaactggaaaagcatatttcactccagaagataaacacaagatgcctgccgtttttctctcttgactcccgcttgttttattcattttggggtagttgccagttagactcagttggaatcggtcaaggtgttcctgtggtggcactcatagtggaaggaggacccaatgtgatctcgattgttttggagtaccttcgagacacccctcccgtgccagtggttgtctgtgatgggagtggacgggcatcggacatcctggcctttgggcataaatactcagaagaaggcggactgataaatgaatctttgagggaccagctgttggtgactatacagaagactttcacatacactcgaacccaagctcagcatctgttcatcatcctcatggagtgcatgaagaagaaggaattgattacggtatttcggatgggatcagaaggacaccaggacattgatttggctatcctgacagctttactcaaaggagccaatgcctcggccccagaccaactgagcttagctttagcctggaacagagtcgacatcgctcgcagccagatctttatttacgggcaacagtggccggtgggatctctggagcaagccatgttggatgccttagttctggacagagtggattttgtgaaattactcatagagaatggagtaagcatgcaccgttttctcaccatctccagactagaggaattgtacaatacgagacatgggccctcaaatacattgtaccacttggtcagggatgtcaaaaaggggaacctgcccccagactacagaatcagcctgattgacatcggcctggtgatcgagtacctgatgggcggggcttatcgctgcaactacacgcgcaagcgcttccggaccctctaccacaacctcttcggccccaagaggcccaaagccttgaaactgctgggaatggaggatgatattcccttgaggcgaggaagaaagacaaccaagaaacgtgaagaagaggtggacattgacttggatgatcctgagatcaaccacttccccttccctttccatgagctcatggtgtgggctgttctcatgaagcggcagaagatggccctgttcttctggcagcacggtgaggaggccatggccaaggccctggtggcctgcaagctctgcaaagccatggctcatgaggcctctgagaacgacatggttgacgacatttcccaggagctgaatcacaattccagagactttggccagctggctgtggagctcctggaccagtcctacaagcaggacgaacagctggccatgaaactgctgacgtatgagctgaagaactggagcaacgccacgtgcctgcagcttgccgtggctgccaaacaccgcgacttcatcgcgcacacgtgcagccagatgctgctcaccgacatgtggatgggccggctccgcatgcgcaagaactcaggcctcaaggtaattctgggaattctacttcctccttcaattctcagcttggagttcaagaacaaagacgacatgccctatatgtctcaggcccaggaaatccacctccaagagaaggaggcagaagaaccagagaagcccacaaaggaaaaagaggaagaggacatggagctcacagcaatgttgggacgaaacaacggggagtcctccaggaagaaggatgaagaggaagttcagagcaagcaccggttaatccccctcggcagaaaaatctatgaattctacaatgcacccatcgtgaagttctggttctacacactggcgtatatcggatacctgatgctcttcaactatatcgtgttagtgaagatggaacgctggccgtccacccaggaatggatcgtaatctcctatattttcaccctgggaatagaaaagatgagagagattctgatgtcagagccagggaagttgctacagaaagtgaaggtatggctgcaggagtactggaatgtcacggacctcatcgccatccttctgttttctgtcggaatgatccttcgtctccaagaccagcccttcaggagtgacgggagggtcatctactgcgtgaacatcatttactggtatatccgtctcctagacatcttcggcgtgaacaagtatttgggcccgtatgtaatgatgattggaaaaatgatgatagacatgatgtactttgtcatcattatgctggtggttctgatgagctttggggtcgccaggcaagccatcctttttcccaatgaggagccatcatggaaactggccaagaacatcttctacatgccctattggatgatttatggggaagtgtttgcggaccagatagaccctccctgtggacagaatgagacccgagaggatggtaaaataatccagctgcctccctgcaagacaggagcttggatcgtgccggccatcatggcctgctacctcttagtggcaaacatcttgctggtcaacctcctcattgctgtctttaacaatacattttttgaagtaaaatcgatatccaaccaagtctggaagtttcagaggtatcagctcatcatgactttccatgaaaggccagttctgcccccaccactgatcatcttcagccacatgaccatgatattccagcacctgtgctgccgatggaggaaacacgagagcgacccggatgaaagggactacggcctgaaactcttcataaccgatgatgagctcaagaaagtacatgactttgaagagcaatgcatagaagaatacttcagagaaaaggatgatcggttcaactcatctaatgatgagaggatacgggtgacttcagaaagggtggagaacatgtctatgcggctggaggaagtcaacgagagagagcactccatgaaggcttcactccagaccgtggacatccggctggcgcagctggaagaccttatcgggcgcatggccacggccctggagcgcctgacaggtctggagcgggccgagtccaacaaaatccgctcgaggacctcgtcagactgcacggacgccgcctacattgtccgtcagagcagcttcaacagccaggaagggaacaccttcaagctccaagagagtatagaccctgcaggtgaggagaccatgtccccaacttctccaaccttaatgccccgtatgcgaagccattctttctattcggtcaatatgaaagacaaaggtggtatagaaaagttggaaagtatttttaaagaaaggtccctgagcctacaccgggctactagttcccactctgtagcaaaagaacccaaagctcctgcagcccctgccaacaccttggccattgttcctgattccagaagaccatcatcgtgtatagacatctatgtctctgctatggatgagctccactgtgatatagaccctctggacaattccgtgaacatccttgggctgggcgagccaagcttttcaactccagtaccttccacagccccttcaagtagtgcctatgcaacacttgcacccacagacagacctccaagccggagcattgattttgaggacatcacctccatggacactagatctttttcttcagactacacccacctcccagaatgccaaaacccctgggactcagagcctccgatgtaccacaccattgagcgttccaaaagtagccgctacctagccaccacaccctttcttctagaagaggctcccattgtgaaatctcatagctttatgttttccccctcaaggagctattatgccaactttggggtgcctgtaaaaacagcagaatacacaagtattacagactgtattgacacaaggtgtgtcaatgcccctcaagcaattgcggacagagctgccttccctggaggtcttggagacaaagtggaggacttaacttgctgccatccagagcgagaagcagaactgagtcaccccagctctgacagtgaggagaatgaggccaaaggccgcagagccaccattgcaatatcctcccaggagggtgataactcagagagaaccctgtccaacaacatcactgttcccaagatagagcgcgccaacagctactcggcagaggagccaagtgcgccatatgcacacaccaggaagagcttctccatcagtgacaaactcgacaggcagcggaacacagcaagcctgcgaaatcccttccagagaagcaagtcctccaagccggagggccgaggggacagcctgtccatgaggagactgtccagaacatcggctttccaaagctttgaaagcaagcacaactaaaccttcttaatatccgccacagaaggctcaagaatccagccctaaaattctctccaactccagtttttcccctttccttgaatcatacctgctttattcttagctgagcaaaacaagcaatgctttgggaggtgttaactcaaaggtgacttctgggccacagatcaagaaagcatttgatctgacccagtgccagacacaggggatttaaggcatgttcacacttgctgggcagggagggggaagagagggagaaggaagggttagagatgaatgtgtatccgcagtcacagcagaaagccatgagagcaggggaaacaaggggcttcgagcacgctccatgccaggaggcatctgttgatttctgaccattatcaagagttgtaggatgcagggctaaattgcaaaataaaataaaatagccagcgtacacaatgagatattctaaacttccattctgttttcttttcacattggctccatcactggtgactgatgaagagcatcctctttattcagtataagccggcagcaagcagttctacctaacgtcccacatccttctcatgccaacacttctgtaattgatcattataaagaaaaaacaaggtaacagtcatagttcacctgtctcttatctattcacttctggtgccacaactgtttatccttttttgaagaaaataagggaacagaaatgcctttttgtattgcaatcgaaatgaaagaagagttgatgttaaaaaaacaaaagtcaagtgatttattatatacagtgggcgttcaagtctagtcgagcaagctcaggagaatgtaattaaataattttatattttttaatttattttgtatctcacctgtcatggatgaattcattcactgaatatgtaatattgaactt

SEQ ID NO: 3078 - protein, 1579 aa, Homosapiens
MYVRVSFDTKPDLLLHLMTKEWQLELPKLLISVHGGLQNFELQPKLKQVFGKGLIKAAMTTGAWIFTGGVNTGVIRHVGDALKDHASKSRGKICTIGIAPWGIVENQEDLIGRDVVRPYQTMSNPMSKLTVLNSMHSHFILADNGTTGKYGAEVKLRRQLEKHISLQKINTRCLPFFSLDSRLFYSFWGSCQLDSVGIGQGVPVVALIVEGGPNVISIVLEYLRDTPPVPVVVCDGSGRASDILAFGHKYSEEGGLINESLRDQLLVTIQKTFTYTRTQAQHLFIILMECMKKKELITVFRMGSEGHQDIDLAILTALLKGANASAPDQLSLALAWNRVDIARSQIFIYGQQWPVGSLEQAMLDALVLDRVDFVKLLIENGVSMHRFLTISRLEELYNTRHGPSNTLYHLVRDVKKGNLPPDYRISLIDIGLVIEYLMGGAYRCNYTRKRFRTLYHNLFGPKRPKALKLLGMEDDIPLRRGRKTTKKREEEVDIDLDDPEINHFPFPFHELMVWAVLMKRQKMALFFWQHGEEAMAKALVACKLCKAMAHEASENDMVDDISQELNHNSRDFGQLAVELLDQSYKQDEQLAMKLLTYELKNWSNATCLQLAVAAKHRDFIAHTCSQMLLTDMWMGRLRMRKNSGLKVILGILLPPSILSLEFKNKDDMPYMSQAQEIHLQEKEAEEPEKPTKEKEEEDMELTAMLGRNNGESSRKKDEEEVQSKHRLIPLGRKIYEFYNAPIVKFWFYTLAYIGYLMLFNYIVLVKMERWPSTQEWIVISYIFTLGIEKMREILMSEPGKLLQKVKVWLQEYWNVTDLIAILLFSVGMILRLQDQPFRSDGRVIYCVNIIYWYIRLLDIFGVNKYLGPYVMMIGKMMIDMMYFVIIMLVVLMSFGVARQAILFPNEEPSWKLAKNIFYMPYWMIYGEVFADQIDPPCGQNETREDGKIIQLPPCKTGAWIVPAIMACYLLVANILLVNLLIAVFNNTFFEVKSISNQVWKFQRYQLIMTFHERPVLPPPLIIFSHMTMIFQHLCCRWRKHESDPDERDYGLKLFITDDELKKVHDFEEQCIEEYFREKDDRFNSSNDERIRVTSERVENMSMRLEEVNEREHSMKASLQTVDIRLAQLEDLIGRMATALERLTGLERAESNKIRSRTSSDCTDAAYIVRQSSFNSQEGNTFKLQESIDPAGEETMSPTSPTLMPRMRSHSFYSVNMKDKGGIEKLESIFKERSLSLHRATSSHSVAKEPKAPAAPANTLAIVPDSRRPSSCIDIYVSAMDELHCDIDPLDNSVNILGLGEPSFSTPVPSTAPSSSAYATLAPTDRPPSRSIDFEDITSMDTRSFSSDYTHLPECQNPWDSEPPMYHTIERSKSSRYLATTPFLLEEAPIVKSHSFMFSPSRSYYANFGVPVKTAEYTSITDCIDTRCVNAPQAIADRAAFPGGLGDKVEDLTCCHPEREAELSHPSSDSEENEAKGRRATIAISSQEGDNSERTLSNNITVPKIERANSYSAEEPSAPYAHTRKSFSISDKLDRQRNTASLRNPFQRSKSSKPEGRGDSLSMRRLSRTSAFQSFESKHN

SEQ ID NO: 3079 - DNA, 5917 bp, Homosapiens
gcattattaacggaatgaccagccctagctgcagcaaaatgaaagcaacaggagctgctccggggactgcttttgccagtacccagaatcagtgctcaggctcagaaatcctggatagaaagagcattttataaaagagaatgtgtccacatcatacccagcaccaaagacccccataggtgttgctgtgggcgtctgataggccagcatgttggcctcacccccagtatctccgtgcttcagaatgagaaaaatgaaagtcgcctctcccgaaatgacatccagtctgaaaagtggtccatcagcaaacacactcaactcagccctacggatgcttttgggaccattgagttccaaggaggtggccattccaacaaagccatgtatgtgcgagtatcttttgatacaaaacctgatctcctcttacacctgatgaccaaggaatggcagttggagcttcccaagcttctcatctctgtccatgggggcctgcagaactttgaactccagccaaaactcaagcaagtctttgggaaagggctcatcaaagcagcaatgacaactggagcgtggatattcactggaggggttaacacaggtgttattcgtcatgttggcgatgccttgaaggatcatgcctctaagtctcgaggaaagatatgcaccataggtattgccccctggggaattgtggaaaaccaggaggacctcattggaagagatgttgtccggccataccagaccatgtccaatcccatgagcaagctcactgttctcaacagcatgcattcccacttcattctggctgacaacgggaccactggaaaatatggagcagaggtgaaacttcgaagacaactggaaaagcatatttcactccagaagataaacacaagaatcggtcaaggtgttcctgtggtggcactcatagtggaaggaggacccaatgtgatctcgattgttttggagtaccttcgagacacccctcccgtgccagtggttgtctgtgatgggagtggacgggcatcggacatcctggcctttgggcataaatactcagaagaaggcggactgataaatgaatctttgagggaccagctgttggtgactatacagaagactttcacatacactcgaacccaagctcagcatctgttcatcatcctcatggagtgcatgaagaagaaggaattgattacggtatttcggatgggatcagaaggacaccaggacattgatttggctatcctgacagctttactcaaaggagccaatgcctcggccccagaccaactgagcttagctttagcctggaacagagtcgacatcgctcgcagccagatctttatttacgggcaacagtggccggtgggatctctggagcaagccatgttggatgccttagttctggacagagtggattttgtgaaattactcatagagaatggagtaagcatgcaccgttttctcaccatctccagactagaggaattgtacaatacgagacatgggccctcaaatacattgtaccacttggtcagggatgtcaaaaaggggaacctgcccccagactacagaatcagcctgattgacatcggcctggtgatcgagtacctgatgggcggggcttatcgctgcaactacacgcgcaagcgcttccggaccctctaccacaacctcttcggccccaagagggatgatattcccttgaggcgaggaagaaagacaaccaagaaacgtgaagaagaggtggacattgacttggatgatcctgagatcaaccacttccccttccctttccatgagctcatggtgtgggctgttctcatgaagcggcagaagatggccctgttcttctggcagcacggtgaggaggccatggccaaggccctggtggcctgcaagctctgcaaagccatggctcatgaggcctctgagaacgacatggttgacgacatttcccaggagctgaatcacaattccagagactttggccagctggctgtggagctcctggaccagtcctacaagcaggacgaacagctggccatgaaactgctgacgtatgagctgaagaactggagcaacgccacgtgcctgcagcttgccgtggctgccaaacaccgcgacttcatcgcgcacacgtgcagccagatgctgctcaccgacatgtggatgggccggctccgcatgcgcaagaactcaggcctcaaggtaattctgggaattctacttcctccttcaattctcagcttggagttcaagaacaaagacgacatgccctatatgtctcaggcccaggaaatccacctccaagagaaggaggcagaagaaccagagaagcccacaaaggaaaaagaggaagaggacatggagctcacagcaatgttgggacgaaacaacggggagtcctccaggaagaaggatgaagaggaagttcagagcaagcaccggttaatccccctcggcagaaaaatctatgaattctacaatgcacccatcgtgaagttctggttctacacactggcgtatatcggatacctgatgctcttcaactatatcgtgttagtgaagatggaacgctggccgtccacccaggaatggatcgtaatctcctatattttcaccctgggaatagaaaagatgagagagattctgatgtcagagccagggaagttgctacagaaagtgaaggtatggctgcaggagtactggaatgtcacggacctcatcgccatccttctgttttctgtcggaatgatccttcgtctccaagaccagcccttcaggagtgacgggagggtcatctactgcgtgaacatcatttactggtatatccgtctcctagacatcttcggcgtgaacaagtatttgggcccgtatgtaatgatgattggaaaaatgatgatagacatgatgtactttgtcatcattatgctggtggttctgatgagctttggggtcgccaggcaagccatcctttttcccaatgaggagccatcatggaaactggccaagaacatcttctacatgccctattggatgatttatggggaagtgtttgcggaccagatagaccctccctgtggacagaatgagacccgagaggatggtaaaataatccagctgcctccctgcaagacaggagcttggatcgtgccggccatcatggcctgctacctcttagtggcaaacatcttgctggtcaacctcctcattgctgtctttaacaatacattttttgaagtaaaatcgatatccaaccaagtctggaagtttcagaggtatcagctcatcatgactttccatgaaaggccagttctgcccccaccactgatcatcttcagccacatgaccatgatattccagcacctgtgctgccgatggaggaaacacgagagcgacccggatgaaagggactacggcctgaaactcttcataaccgatgatgagctcaagaaagtacatgactttgaagagcaatgcatagaagaatacttcagagaaaaggatgatcggttcaactcatctaatgatgagaggatacgggtgacttcagaaagggtggagaacatgtctatgcggctggaggaagtcaacgagagagagcactccatgaaggcttcactccagaccgtggacatccggctggcgcagctggaagaccttatcgggcgcatggccacggccctggagcgcctgacaggtctggagcgggccgagtccaacaaaatccgctcgaggacctcgtcagactgcacggacgccgcctacattgtccgtcagagcagcttcaacagccaggaagggaacaccttcaagctccaagagagtatagaccctgcaggtgaggagaccatgtccccaacttctccaaccttaatgccccgtatgcgaagccattctttctattcggtcaatatgaaagacaaaggtggtatagaaaagttggaaagtatttttaaagaaaggtccctgagcctacaccgggctactagttcccactctgtagcaaaagaacccaaagctcctgcagcccctgccaacaccttggccattgttcctgattccagaagaccatcatcgtgtatagacatctatgtctctgctatggatgagctccactgtgatatagaccctctggacaattccgtgaacatccttgggctgggcgagccaagcttttcaactccagtaccttccacagccccttcaagtagtgcctatgcaacacttgcacccacagacagacctccaagccggagcattgattttgaggacatcacctccatggacactagatctttttcttcagactacacccacctcccagaatgccaaaacccctgggactcagagcctccgatgtaccacaccattgagcgttccaaaagtagccgctacctagccaccacaccctttcttctagaagaggctcccattgtgaaatctcatagctttatgttttccccctcaaggagctattatgccaactttggggtgcctgtaaaaacagcagaatacacaagtattacagactgtattgacacaaggtgtgtcaatgcccctcaagcaattgcggacagagctgccttccctggaggtcttggagacaaagtggaggacttaacttgctgccatccagagcgagaagcagaactgagtcaccccagctctgacagtgaggagaatgaggccaaaggccgcagagccaccattgcaatatcctcccaggagggtgataactcagagagaaccctgtccaacaacatcactgttcccaagatagagcgcgccaacagctactcggcagaggagccaagtgcgccatatgcacacaccaggaagagcttctccatcagtgacaaactcgacaggcagcggaacacagcaagcctgcgaaatcccttccagagaagcaagtcctccaagccggagggccgaggggacagcctgtccatgaggagactgtccagaacatcggctttccaaagctttgaaagcaagcacaactaaaccttcttaatatccgccacagaaggctcaagaatccagccctaaaattctctccaactccagtttttcccctttccttgaatcatacctgctttattcttagctgagcaaaacaagcaatgctttgggaggtgttaactcaaaggtgacttctgggccacagatcaagaaagcatttgatctgacccagtgccagacacaggggatttaaggcatgttcacacttgctgggcagggagggggaagagagggagaaggaagggttagagatgaatgtgtatccgcagtcacagcagaaagccatgagagcaggggaaacaaggggcttcgagcacgctccatgccaggaggcatctgttgatttctgaccattatcaagagttgtaggatgcagggctaaattgcaaaataaaataaaatagccagcgtacacaatgagatattctaaacttccattctgttttcttttcacattggctccatcactggtgactgatgaagagcatcctctttattcagtataagccggcagcaagcagttctacctaacgtcccacatccttctcatgccaacacttctgtaattgatcattataaagaaaaaacaaggtaacagtcatagttcacctgtctcttatctattcacttctggtgccacaactgtttatccttttttgaagaaaataagggaacagaaatgcctttttgtattgcaatcgaaatgaaagaagagttgatgttaaaaaaacaaaagtcaagtgatttattatatacagtgggcgttcaagtctagtcgagcaagctcaggagaatgtaattaaataattttatattttttaatttattttgtatctcacctgtcatggatgaattcattcactgaatatgtaatattgaactt

SEQ ID NO: 3080 - protein, 1544 aa, Homosapiens
MYVRVSFDTKPDLLLHLMTKEWQLELPKLLISVHGGLQNFELQPKLKQVFGKGLIKAAMTTGAWIFTGGVNTGVIRHVGDALKDHASKSRGKICTIGIAPWGIVENQEDLIGRDVVRPYQTMSNPMSKLTVLNSMHSHFILADNGTTGKYGAEVKLRRQLEKHISLQKINTRIGQGVPVVALIVEGGPNVISIVLEYLRDTPPVPVVVCDGSGRASDILAFGHKYSEEGGLINESLRDQLLVTIQKTFTYTRTQAQHLFIILMECMKKKELITVFRMGSEGHQDIDLAILTALLKGANASAPDQLSLALAWNRVDIARSQIFIYGQQWPVGSLEQAMLDALVLDRVDFVKLLIENGVSMHRFLTISRLEELYNTRHGPSNTLYHLVRDVKKGNLPPDYRISLIDIGLVIEYLMGGAYRCNYTRKRFRTLYHNLFGPKRDDIPLRRGRKTTKKREEEVDIDLDDPEINHFPFPFHELMVWAVLMKRQKMALFFWQHGEEAMAKALVACKLCKAMAHEASENDMVDDISQELNHNSRDFGQLAVELLDQSYKQDEQLAMKLLTYELKNWSNATCLQLAVAAKHRDFIAHTCSQMLLTDMWMGRLRMRKNSGLKVILGILLPPSILSLEFKNKDDMPYMSQAQEIHLQEKEAEEPEKPTKEKEEEDMELTAMLGRNNGESSRKKDEEEVQSKHRLIPLGRKIYEFYNAPIVKFWFYTLAYIGYLMLFNYIVLVKMERWPSTQEWIVISYIFTLGIEKMREILMSEPGKLLQKVKVWLQEYWNVTDLIAILLFSVGMILRLQDQPFRSDGRVIYCVNIIYWYIRLLDIFGVNKYLGPYVMMIGKMMIDMMYFVIIMLVVLMSFGVARQAILFPNEEPSWKLAKNIFYMPYWMIYGEVFADQIDPPCGQNETREDGKIIQLPPCKTGAWIVPAIMACYLLVANILLVNLLIAVFNNTFFEVKSISNQVWKFQRYQLIMTFHERPVLPPPLIIFSHMTMIFQHLCCRWRKHESDPDERDYGLKLFITDDELKKVHDFEEQCIEEYFREKDDRFNSSNDERIRVTSERVENMSMRLEEVNEREHSMKASLQTVDIRLAQLEDLIGRMATALERLTGLERAESNKIRSRTSSDCTDAAYIVRQSSFNSQEGNTFKLQESIDPAGEETMSPTSPTLMPRMRSHSFYSVNMKDKGGIEKLESIFKERSLSLHRATSSHSVAKEPKAPAAPANTLAIVPDSRRPSSCIDIYVSAMDELHCDIDPLDNSVNILGLGEPSFSTPVPSTAPSSSAYATLAPTDRPPSRSIDFEDITSMDTRSFSSDYTHLPECQNPWDSEPPMYHTIERSKSSRYLATTPFLLEEAPIVKSHSFMFSPSRSYYANFGVPVKTAEYTSITDCIDTRCVNAPQAIADRAAFPGGLGDKVEDLTCCHPEREAELSHPSSDSEENEAKGRRATIAISSQEGDNSERTLSNNITVPKIERANSYSAEEPSAPYAHTRKSFSISDKLDRQRNTASLRNPFQRSKSSKPEGRGDSLSMRRLSRTSAFQSFESKHN

SEQ ID NO: 3081 - DNA, 5953 bp, Homosapiens
gcattattaacggaatgaccagccctagctgcagcaaaatgaaagcaacaggagctgctccggggactgcttttgccagtacccagaatcagtgctcaggctcagaaatcctggatagaaagagcattttataaaagagaatgtgtccacatcatacccagcaccaaagacccccataggtgttgctgtgggcgtctgataggccagcatgttggcctcacccccagtatctccgtgcttcagaatgagaaaaatgaaagtcgcctctcccgaaatgacatccagtctgaaaagtggtccatcagcaaacacactcaactcagccctacggatgcttttgggaccattgagttccaaggaggtggccattccaacaaagccatgtatgtgcgagtatcttttgatacaaaacctgatctcctcttacacctgatgaccaaggaatggcagttggagcttcccaagcttctcatctctgtccatgggggcctgcagaactttgaactccagccaaaactcaagcaagtctttgggaaagggctcatcaaagcagcaatgacaactggagcgtggatattcactggaggggttaacacaggtgttattcgtcatgttggcgatgccttgaaggatcatgcctctaagtctcgaggaaagatatgcaccataggtattgccccctggggaattgtggaaaaccaggaggacctcattggaagagatgttgtccggccataccagaccatgtccaatcccatgagcaagctcactgttctcaacagcatgcattcccacttcattctggctgacaacgggaccactggaaaatatggagcagaggtgaaacttcgaagacaactggaaaagcatatttcactccagaagataaacacaagaatcggtcaaggtgttcctgtggtggcactcatagtggaaggaggacccaatgtgatctcgattgttttggagtaccttcgagacacccctcccgtgccagtggttgtctgtgatgggagtggacgggcatcggacatcctggcctttgggcataaatactcagaagaaggcggactgataaatgaatctttgagggaccagctgttggtgactatacagaagactttcacatacactcgaacccaagctcagcatctgttcatcatcctcatggagtgcatgaagaagaaggaattgattacggtatttcggatgggatcagaaggacaccaggacattgatttggctatcctgacagctttactcaaaggagccaatgcctcggccccagaccaactgagcttagctttagcctggaacagagtcgacatcgctcgcagccagatctttatttacgggcaacagtggccggtgggatctctggagcaagccatgttggatgccttagttctggacagagtggattttgtgaaattactcatagagaatggagtaagcatgcaccgttttctcaccatctccagactagaggaattgtacaatacgagacatgggccctcaaatacattgtaccacttggtcagggatgtcaaaaagcgagagtatccaggtttcggttggatctattttaaggggaacctgcccccagactacagaatcagcctgattgacatcggcctggtgatcgagtacctgatgggcggggcttatcgctgcaactacacgcgcaagcgcttccggaccctctaccacaacctcttcggccccaagagggatgatattcccttgaggcgaggaagaaagacaaccaagaaacgtgaagaagaggtggacattgacttggatgatcctgagatcaaccacttccccttccctttccatgagctcatggtgtgggctgttctcatgaagcggcagaagatggccctgttcttctggcagcacggtgaggaggccatggccaaggccctggtggcctgcaagctctgcaaagccatggctcatgaggcctctgagaacgacatggttgacgacatttcccaggagctgaatcacaattccagagactttggccagctggctgtggagctcctggaccagtcctacaagcaggacgaacagctggccatgaaactgctgacgtatgagctgaagaactggagcaacgccacgtgcctgcagcttgccgtggctgccaaacaccgcgacttcatcgcgcacacgtgcagccagatgctgctcaccgacatgtggatgggccggctccgcatgcgcaagaactcaggcctcaaggtaattctgggaattctacttcctccttcaattctcagcttggagttcaagaacaaagacgacatgccctatatgtctcaggcccaggaaatccacctccaagagaaggaggcagaagaaccagagaagcccacaaaggaaaaagaggaagaggacatggagctcacagcaatgttgggacgaaacaacggggagtcctccaggaagaaggatgaagaggaagttcagagcaagcaccggttaatccccctcggcagaaaaatctatgaattctacaatgcacccatcgtgaagttctggttctacacactggcgtatatcggatacctgatgctcttcaactatatcgtgttagtgaagatggaacgctggccgtccacccaggaatggatcgtaatctcctatattttcaccctgggaatagaaaagatgagagagattctgatgtcagagccagggaagttgctacagaaagtgaaggtatggctgcaggagtactggaatgtcacggacctcatcgccatccttctgttttctgtcggaatgatccttcgtctccaagaccagcccttcaggagtgacgggagggtcatctactgcgtgaacatcatttactggtatatccgtctcctagacatcttcggcgtgaacaagtatttgggcccgtatgtaatgatgattggaaaaatgatgatagacatgatgtactttgtcatcattatgctggtggttctgatgagctttggggtcgccaggcaagccatcctttttcccaatgaggagccatcatggaaactggccaagaacatcttctacatgccctattggatgatttatggggaagtgtttgcggaccagatagaccctccctgtggacagaatgagacccgagaggatggtaaaataatccagctgcctccctgcaagacaggagcttggatcgtgccggccatcatggcctgctacctcttagtggcaaacatcttgctggtcaacctcctcattgctgtctttaacaatacattttttgaagtaaaatcgatatccaaccaagtctggaagtttcagaggtatcagctcatcatgactttccatgaaaggccagttctgcccccaccactgatcatcttcagccacatgaccatgatattccagcacctgtgctgccgatggaggaaacacgagagcgacccggatgaaagggactacggcctgaaactcttcataaccgatgatgagctcaagaaagtacatgactttgaagagcaatgcatagaagaatacttcagagaaaaggatgatcggttcaactcatctaatgatgagaggatacgggtgacttcagaaagggtggagaacatgtctatgcggctggaggaagtcaacgagagagagcactccatgaaggcttcactccagaccgtggacatccggctggcgcagctggaagaccttatcgggcgcatggccacggccctggagcgcctgacaggtctggagcgggccgagtccaacaaaatccgctcgaggacctcgtcagactgcacggacgccgcctacattgtccgtcagagcagcttcaacagccaggaagggaacaccttcaagctccaagagagtatagaccctgcaggtgaggagaccatgtccccaacttctccaaccttaatgccccgtatgcgaagccattctttctattcggtcaatatgaaagacaaaggtggtatagaaaagttggaaagtatttttaaagaaaggtccctgagcctacaccgggctactagttcccactctgtagcaaaagaacccaaagctcctgcagcccctgccaacaccttggccattgttcctgattccagaagaccatcatcgtgtatagacatctatgtctctgctatggatgagctccactgtgatatagaccctctggacaattccgtgaacatccttgggctgggcgagccaagcttttcaactccagtaccttccacagccccttcaagtagtgcctatgcaacacttgcacccacagacagacctccaagccggagcattgattttgaggacatcacctccatggacactagatctttttcttcagactacacccacctcccagaatgccaaaacccctgggactcagagcctccgatgtaccacaccattgagcgttccaaaagtagccgctacctagccaccacaccctttcttctagaagaggctcccattgtgaaatctcatagctttatgttttccccctcaaggagctattatgccaactttggggtgcctgtaaaaacagcagaatacacaagtattacagactgtattgacacaaggtgtgtcaatgcccctcaagcaattgcggacagagctgccttccctggaggtcttggagacaaagtggaggacttaacttgctgccatccagagcgagaagcagaactgagtcaccccagctctgacagtgaggagaatgaggccaaaggccgcagagccaccattgcaatatcctcccaggagggtgataactcagagagaaccctgtccaacaacatcactgttcccaagatagagcgcgccaacagctactcggcagaggagccaagtgcgccatatgcacacaccaggaagagcttctccatcagtgacaaactcgacaggcagcggaacacagcaagcctgcgaaatcccttccagagaagcaagtcctccaagccggagggccgaggggacagcctgtccatgaggagactgtccagaacatcggctttccaaagctttgaaagcaagcacaactaaaccttcttaatatccgccacagaaggctcaagaatccagccctaaaattctctccaactccagtttttcccctttccttgaatcatacctgctttattcttagctgagcaaaacaagcaatgctttgggaggtgttaactcaaaggtgacttctgggccacagatcaagaaagcatttgatctgacccagtgccagacacaggggatttaaggcatgttcacacttgctgggcagggagggggaagagagggagaaggaagggttagagatgaatgtgtatccgcagtcacagcagaaagccatgagagcaggggaaacaaggggcttcgagcacgctccatgccaggaggcatctgttgatttctgaccattatcaagagttgtaggatgcagggctaaattgcaaaataaaataaaatagccagcgtacacaatgagatattctaaacttccattctgttttcttttcacattggctccatcactggtgactgatgaagagcatcctctttattcagtataagccggcagcaagcagttctacctaacgtcccacatccttctcatgccaacacttctgtaattgatcattataaagaaaaaacaaggtaacagtcatagttcacctgtctcttatctattcacttctggtgccacaactgtttatccttttttgaagaaaataagggaacagaaatgcctttttgtattgcaatcgaaatgaaagaagagttgatgttaaaaaaacaaaagtcaagtgatttattatatacagtgggcgttcaagtctagtcgagcaagctcaggagaatgtaattaaataattttatattttttaatttattttgtatctcacctgtcatggatgaattcattcactgaatatgtaatattgaactt

SEQ ID NO: 3082 - protein, 1556 aa, Homosapiens
MYVRVSFDTKPDLLLHLMTKEWQLELPKLLISVHGGLQNFELQPKLKQVFGKGLIKAAMTTGAWIFTGGVNTGVIRHVGDALKDHASKSRGKICTIGIAPWGIVENQEDLIGRDVVRPYQTMSNPMSKLTVLNSMHSHFILADNGTTGKYGAEVKLRRQLEKHISLQKINTRIGQGVPVVALIVEGGPNVISIVLEYLRDTPPVPVVVCDGSGRASDILAFGHKYSEEGGLINESLRDQLLVTIQKTFTYTRTQAQHLFIILMECMKKKELITVFRMGSEGHQDIDLAILTALLKGANASAPDQLSLALAWNRVDIARSQIFIYGQQWPVGSLEQAMLDALVLDRVDFVKLLIENGVSMHRFLTISRLEELYNTRHGPSNTLYHLVRDVKKREYPGFGWIYFKGNLPPDYRISLIDIGLVIEYLMGGAYRCNYTRKRFRTLYHNLFGPKRDDIPLRRGRKTTKKREEEVDIDLDDPEINHFPFPFHELMVWAVLMKRQKMALFFWQHGEEAMAKALVACKLCKAMAHEASENDMVDDISQELNHNSRDFGQLAVELLDQSYKQDEQLAMKLLTYELKNWSNATCLQLAVAAKHRDFIAHTCSQMLLTDMWMGRLRMRKNSGLKVILGILLPPSILSLEFKNKDDMPYMSQAQEIHLQEKEAEEPEKPTKEKEEEDMELTAMLGRNNGESSRKKDEEEVQSKHRLIPLGRKIYEFYNAPIVKFWFYTLAYIGYLMLFNYIVLVKMERWPSTQEWIVISYIFTLGIEKMREILMSEPGKLLQKVKVWLQEYWNVTDLIAILLFSVGMILRLQDQPFRSDGRVIYCVNIIYWYIRLLDIFGVNKYLGPYVMMIGKMMIDMMYFVIIMLVVLMSFGVARQAILFPNEEPSWKLAKNIFYMPYWMIYGEVFADQIDPPCGQNETREDGKIIQLPPCKTGAWIVPAIMACYLLVANILLVNLLIAVFNNTFFEVKSISNQVWKFQRYQLIMTFHERPVLPPPLIIFSHMTMIFQHLCCRWRKHESDPDERDYGLKLFITDDELKKVHDFEEQCIEEYFREKDDRFNSSNDERIRVTSERVENMSMRLEEVNEREHSMKASLQTVDIRLAQLEDLIGRMATALERLTGLERAESNKIRSRTSSDCTDAAYIVRQSSFNSQEGNTFKLQESIDPAGEETMSPTSPTLMPRMRSHSFYSVNMKDKGGIEKLESIFKERSLSLHRATSSHSVAKEPKAPAAPANTLAIVPDSRRPSSCIDIYVSAMDELHCDIDPLDNSVNILGLGEPSFSTPVPSTAPSSSAYATLAPTDRPPSRSIDFEDITSMDTRSFSSDYTHLPECQNPWDSEPPMYHTIERSKSSRYLATTPFLLEEAPIVKSHSFMFSPSRSYYANFGVPVKTAEYTSITDCIDTRCVNAPQAIADRAAFPGGLGDKVEDLTCCHPEREAELSHPSSDSEENEAKGRRATIAISSQEGDNSERTLSNNITVPKIERANSYSAEEPSAPYAHTRKSFSISDKLDRQRNTASLRNPFQRSKSSKPEGRGDSLSMRRLSRTSAFQSFESKHN

SEQ ID NO: 3083 - DNA, 5992 bp, Homosapiens
gcattattaacggaatgaccagccctagctgcagcaaaatgaaagcaacaggagctgctccggggactgcttttgccagtacccagaatcagtgctcaggctcagaaatcctggatagaaagagcattttataaaagagaatgtgtccacatcatacccagcaccaaagacccccataggtgttgctgtgggcgtctgataggccagcatgttggcctcacccccagtatctccgtgcttcagaatgagaaaaatgaaagtcgcctctcccgaaatgacatccagtctgaaaagtggtccatcagcaaacacactcaactcagccctacggatgcttttgggaccattgagttccaaggaggtggccattccaacaaagccatgtatgtgcgagtatcttttgatacaaaacctgatctcctcttacacctgatgaccaaggaatggcagttggagcttcccaagcttctcatctctgtccatgggggcctgcagaactttgaactccagccaaaactcaagcaagtctttgggaaagggctcatcaaagcagcaatgacaactggagcgtggatattcactggaggggttaacacaggtgttattcgtcatgttggcgatgccttgaaggatcatgcctctaagtctcgaggaaagatatgcaccataggtattgccccctggggaattgtggaaaaccaggaggacctcattggaagagatgttgtccggccataccagaccatgtccaatcccatgagcaagctcactgttctcaacagcatgcattcccacttcattctggctgacaacgggaccactggaaaatatggagcagaggtgaaacttcgaagacaactggaaaagcatatttcactccagaagataaacacaagatgcctgccgtttttctctcttgactcccgcttgttttattcattttggggtagttgccagttagactcagttggaatcggtcaaggtgttcctgtggtggcactcatagtggaaggaggacccaatgtgatctcgattgttttggagtaccttcgagacacccctcccgtgccagtggttgtctgtgatgggagtggacgggcatcggacatcctggcctttgggcataaatactcagaagaaggcggactgataaatgaatctttgagggaccagctgttggtgactatacagaagactttcacatacactcgaacccaagctcagcatctgttcatcatcctcatggagtgcatgaagaagaaggaattgattacggtatttcggatgggatcagaaggacaccaggacattgatttggctatcctgacagctttactcaaaggagccaatgcctcggccccagaccaactgagcttagctttagcctggaacagagtcgacatcgctcgcagccagatctttatttacgggcaacagtggccggtgggatctctggagcaagccatgttggatgccttagttctggacagagtggattttgtgaaattactcatagagaatggagtaagcatgcaccgttttctcaccatctccagactagaggaattgtacaatacgagacatgggccctcaaatacattgtaccacttggtcagggatgtcaaaaaggggaacctgcccccagactacagaatcagcctgattgacatcggcctggtgatcgagtacctgatgggcggggcttatcgctgcaactacacgcgcaagcgcttccggaccctctaccacaacctcttcggccccaagagggatgatattcccttgaggcgaggaagaaagacaaccaagaaacgtgaagaagaggtggacattgacttggatgatcctgagatcaaccacttccccttccctttccatgagctcatggtgtgggctgttctcatgaagcggcagaagatggccctgttcttctggcagcacggtgaggaggccatggccaaggccctggtggcctgcaagctctgcaaagccatggctcatgaggcctctgagaacgacatggttgacgacatttcccaggagctgaatcacaattccagagactttggccagctggctgtggagctcctggaccagtcctacaagcaggacgaacagctggccatgaaactgctgacgtatgagctgaagaactggagcaacgccacgtgcctgcagcttgccgtggctgccaaacaccgcgacttcatcgcgcacacgtgcagccagatgctgctcaccgacatgtggatgggccggctccgcatgcgcaagaactcaggcctcaaggtaattctgggaattctacttcctccttcaattctcagcttggagttcaagaacaaagacgacatgccctatatgtctcaggcccaggaaatccacctccaagagaaggaggcagaagaaccagagaagcccacaaaggaaaaagaggaagaggacatggagctcacagcaatgttgggacgaaacaacggggagtcctccaggaagaaggatgaagaggaagttcagagcaagcaccggttaatccccctcggcagaaaaatctatgaattctacaatgcacccatcgtgaagttctggttctacacactggcgtatatcggatacctgatgctcttcaactatatcgtgttagtgaagatggaacgctggccgtccacccaggaatggatcgtaatctcctatattttcaccctgggaatagaaaagatgagagagattctgatgtcagagccagggaagttgctacagaaagtgaaggtatggctgcaggagtactggaatgtcacggacctcatcgccatccttctgttttctgtcggaatgatccttcgtctccaagaccagcccttcaggagtgacgggagggtcatctactgcgtgaacatcatttactggtatatccgtctcctagacatcttcggcgtgaacaagtatttgggcccgtatgtaatgatgattggaaaaatgatgatagacatgatgtactttgtcatcattatgctggtggttctgatgagctttggggtcgccaggcaagccatcctttttcccaatgaggagccatcatggaaactggccaagaacatcttctacatgccctattggatgatttatggggaagtgtttgcggaccagatagaccctccctgtggacagaatgagacccgagaggatggtaaaataatccagctgcctccctgcaagacaggagcttggatcgtgccggccatcatggcctgctacctcttagtggcaaacatcttgctggtcaacctcctcattgctgtctttaacaatacattttttgaagtaaaatcgatatccaaccaagtctggaagtttcagaggtatcagctcatcatgactttccatgaaaggccagttctgcccccaccactgatcatcttcagccacatgaccatgatattccagcacctgtgctgccgatggaggaaacacgagagcgacccggatgaaagggactacggcctgaaactcttcataaccgatgatgagctcaagaaagtacatgactttgaagagcaatgcatagaagaatacttcagagaaaaggatgatcggttcaactcatctaatgatgagaggatacgggtgacttcagaaagggtggagaacatgtctatgcggctggaggaagtcaacgagagagagcactccatgaaggcttcactccagaccgtggacatccggctggcgcagctggaagaccttatcgggcgcatggccacggccctggagcgcctgacaggtctggagcgggccgagtccaacaaaatccgctcgaggacctcgtcagactgcacggacgccgcctacattgtccgtcagagcagcttcaacagccaggaagggaacaccttcaagctccaagagagtatagaccctgcaggtgaggagaccatgtccccaacttctccaaccttaatgccccgtatgcgaagccattctttctattcggtcaatatgaaagacaaaggtggtatagaaaagttggaaagtatttttaaagaaaggtccctgagcctacaccgggctactagttcccactctgtagcaaaagaacccaaagctcctgcagcccctgccaacaccttggccattgttcctgattccagaagaccatcatcgtgtatagacatctatgtctctgctatggatgagctccactgtgatatagaccctctggacaattccgtgaacatccttgggctgggcgagccaagcttttcaactccagtaccttccacagccccttcaagtagtgcctatgcaacacttgcacccacagacagacctccaagccggagcattgattttgaggacatcacctccatggacactagatctttttcttcagactacacccacctcccagaatgccaaaacccctgggactcagagcctccgatgtaccacaccattgagcgttccaaaagtagccgctacctagccaccacaccctttcttctagaagaggctcccattgtgaaatctcatagctttatgttttccccctcaaggagctattatgccaactttggggtgcctgtaaaaacagcagaatacacaagtattacagactgtattgacacaaggtgtgtcaatgcccctcaagcaattgcggacagagctgccttccctggaggtcttggagacaaagtggaggacttaacttgctgccatccagagcgagaagcagaactgagtcaccccagctctgacagtgaggagaatgaggccaaaggccgcagagccaccattgcaatatcctcccaggagggtgataactcagagagaaccctgtccaacaacatcactgttcccaagatagagcgcgccaacagctactcggcagaggagccaagtgcgccatatgcacacaccaggaagagcttctccatcagtgacaaactcgacaggcagcggaacacagcaagcctgcgaaatcccttccagagaagcaagtcctccaagccggagggccgaggggacagcctgtccatgaggagactgtccagaacatcggctttccaaagctttgaaagcaagcacaactaaaccttcttaatatccgccacagaaggctcaagaatccagccctaaaattctctccaactccagtttttcccctttccttgaatcatacctgctttattcttagctgagcaaaacaagcaatgctttgggaggtgttaactcaaaggtgacttctgggccacagatcaagaaagcatttgatctgacccagtgccagacacaggggatttaaggcatgttcacacttgctgggcagggagggggaagagagggagaaggaagggttagagatgaatgtgtatccgcagtcacagcagaaagccatgagagcaggggaaacaaggggcttcgagcacgctccatgccaggaggcatctgttgatttctgaccattatcaagagttgtaggatgcagggctaaattgcaaaataaaataaaatagccagcgtacacaatgagatattctaaacttccattctgttttcttttcacattggctccatcactggtgactgatgaagagcatcctctttattcagtataagccggcagcaagcagttctacctaacgtcccacatccttctcatgccaacacttctgtaattgatcattataaagaaaaaacaaggtaacagtcatagttcacctgtctcttatctattcacttctggtgccacaactgtttatccttttttgaagaaaataagggaacagaaatgcctttttgtattgcaatcgaaatgaaagaagagttgatgttaaaaaaacaaaagtcaagtgatttattatatacagtgggcgttcaagtctagtcgagcaagctcaggagaatgtaattaaataattttatattttttaatttattttgtatctcacctgtcatggatgaattcattcactgaatatgtaatattgaactt

SEQ ID NO: 3084 - protein, 1569 aa, Homosapiens
MYVRVSFDTKPDLLLHLMTKEWQLELPKLLISVHGGLQNFELQPKLKQVFGKGLIKAAMTTGAWIFTGGVNTGVIRHVGDALKDHASKSRGKICTIGIAPWGIVENQEDLIGRDVVRPYQTMSNPMSKLTVLNSMHSHFILADNGTTGKYGAEVKLRRQLEKHISLQKINTRCLPFFSLDSRLFYSFWGSCQLDSVGIGQGVPVVALIVEGGPNVISIVLEYLRDTPPVPVVVCDGSGRASDILAFGHKYSEEGGLINESLRDQLLVTIQKTFTYTRTQAQHLFIILMECMKKKELITVFRMGSEGHQDIDLAILTALLKGANASAPDQLSLALAWNRVDIARSQIFIYGQQWPVGSLEQAMLDALVLDRVDFVKLLIENGVSMHRFLTISRLEELYNTRHGPSNTLYHLVRDVKKGNLPPDYRISLIDIGLVIEYLMGGAYRCNYTRKRFRTLYHNLFGPKRDDIPLRRGRKTTKKREEEVDIDLDDPEINHFPFPFHELMVWAVLMKRQKMALFFWQHGEEAMAKALVACKLCKAMAHEASENDMVDDISQELNHNSRDFGQLAVELLDQSYKQDEQLAMKLLTYELKNWSNATCLQLAVAAKHRDFIAHTCSQMLLTDMWMGRLRMRKNSGLKVILGILLPPSILSLEFKNKDDMPYMSQAQEIHLQEKEAEEPEKPTKEKEEEDMELTAMLGRNNGESSRKKDEEEVQSKHRLIPLGRKIYEFYNAPIVKFWFYTLAYIGYLMLFNYIVLVKMERWPSTQEWIVISYIFTLGIEKMREILMSEPGKLLQKVKVWLQEYWNVTDLIAILLFSVGMILRLQDQPFRSDGRVIYCVNIIYWYIRLLDIFGVNKYLGPYVMMIGKMMIDMMYFVIIMLVVLMSFGVARQAILFPNEEPSWKLAKNIFYMPYWMIYGEVFADQIDPPCGQNETREDGKIIQLPPCKTGAWIVPAIMACYLLVANILLVNLLIAVFNNTFFEVKSISNQVWKFQRYQLIMTFHERPVLPPPLIIFSHMTMIFQHLCCRWRKHESDPDERDYGLKLFITDDELKKVHDFEEQCIEEYFREKDDRFNSSNDERIRVTSERVENMSMRLEEVNEREHSMKASLQTVDIRLAQLEDLIGRMATALERLTGLERAESNKIRSRTSSDCTDAAYIVRQSSFNSQEGNTFKLQESIDPAGEETMSPTSPTLMPRMRSHSFYSVNMKDKGGIEKLESIFKERSLSLHRATSSHSVAKEPKAPAAPANTLAIVPDSRRPSSCIDIYVSAMDELHCDIDPLDNSVNILGLGEPSFSTPVPSTAPSSSAYATLAPTDRPPSRSIDFEDITSMDTRSFSSDYTHLPECQNPWDSEPPMYHTIERSKSSRYLATTPFLLEEAPIVKSHSFMFSPSRSYYANFGVPVKTAEYTSITDCIDTRCVNAPQAIADRAAFPGGLGDKVEDLTCCHPEREAELSHPSSDSEENEAKGRRATIAISSQEGDNSERTLSNNITVPKIERANSYSAEEPSAPYAHTRKSFSISDKLDRQRNTASLRNPFQRSKSSKPEGRGDSLSMRRLSRTSAFQSFESKHN

SEQ ID NO: 3085 - DNA, 5983 bp, Homosapiens
gcattattaacggaatgaccagccctagctgcagcaaaatgaaagcaacaggagctgctccggggactgcttttgccagtacccagaatcagtgctcaggctcagaaatcctggatagaaagagcattttataaaagagaatgtgtccacatcatacccagcaccaaagacccccataggtgttgctgtgggcgtctgataggccagcatgttggcctcacccccagtatctccgtgcttcagaatgagaaaaatgaaagtcgcctctcccgaaatgacatccagtctgaaaagtggtccatcagcaaacacactcaactcagccctacggatgcttttgggaccattgagttccaaggaggtggccattccaacaaagccatgtatgtgcgagtatcttttgatacaaaacctgatctcctcttacacctgatgaccaaggaatggcagttggagcttcccaagcttctcatctctgtccatgggggcctgcagaactttgaactccagccaaaactcaagcaagtctttgggaaagggctcatcaaagcagcaatgacaactggagcgtggatattcactggaggggttaacacaggtgttattcgtcatgttggcgatgccttgaaggatcatgcctctaagtctcgaggaaagatatgcaccataggtattgccccctggggaattgtggaaaaccaggaggacctcattggaagagatgttgtccggccataccagaccatgtccaatcccatgagcaagctcactgttctcaacagcatgcattcccacttcattctggctgacaacgggaccactggaaaatatggagcagaggtgaaacttcgaagacaactggaaaagcatatttcactccagaagataaacacaagaatcggtcaaggtgttcctgtggtggcactcatagtggaaggaggacccaatgtgatctcgattgttttggagtaccttcgagacacccctcccgtgccagtggttgtctgtgatgggagtggacgggcatcggacatcctggcctttgggcataaatactcagaagaaggcggactgataaatgaatctttgagggaccagctgttggtgactatacagaagactttcacatacactcgaacccaagctcagcatctgttcatcatcctcatggagtgcatgaagaagaaggaattgattacggtatttcggatgggatcagaaggacaccaggacattgatttggctatcctgacagctttactcaaaggagccaatgcctcggccccagaccaactgagcttagctttagcctggaacagagtcgacatcgctcgcagccagatctttatttacgggcaacagtggccggtgggatctctggagcaagccatgttggatgccttagttctggacagagtggattttgtgaaattactcatagagaatggagtaagcatgcaccgttttctcaccatctccagactagaggaattgtacaatacgagacatgggccctcaaatacattgtaccacttggtcagggatgtcaaaaagcgagagtatccaggtttcggttggatctattttaaggggaacctgcccccagactacagaatcagcctgattgacatcggcctggtgatcgagtacctgatgggcggggcttatcgctgcaactacacgcgcaagcgcttccggaccctctaccacaacctcttcggccccaagaggcccaaagccttgaaactgctgggaatggaggatgatattcccttgaggcgaggaagaaagacaaccaagaaacgtgaagaagaggtggacattgacttggatgatcctgagatcaaccacttccccttccctttccatgagctcatggtgtgggctgttctcatgaagcggcagaagatggccctgttcttctggcagcacggtgaggaggccatggccaaggccctggtggcctgcaagctctgcaaagccatggctcatgaggcctctgagaacgacatggttgacgacatttcccaggagctgaatcacaattccagagactttggccagctggctgtggagctcctggaccagtcctacaagcaggacgaacagctggccatgaaactgctgacgtatgagctgaagaactggagcaacgccacgtgcctgcagcttgccgtggctgccaaacaccgcgacttcatcgcgcacacgtgcagccagatgctgctcaccgacatgtggatgggccggctccgcatgcgcaagaactcaggcctcaaggtaattctgggaattctacttcctccttcaattctcagcttggagttcaagaacaaagacgacatgccctatatgtctcaggcccaggaaatccacctccaagagaaggaggcagaagaaccagagaagcccacaaaggaaaaagaggaagaggacatggagctcacagcaatgttgggacgaaacaacggggagtcctccaggaagaaggatgaagaggaagttcagagcaagcaccggttaatccccctcggcagaaaaatctatgaattctacaatgcacccatcgtgaagttctggttctacacactggcgtatatcggatacctgatgctcttcaactatatcgtgttagtgaagatggaacgctggccgtccacccaggaatggatcgtaatctcctatattttcaccctgggaatagaaaagatgagagagattctgatgtcagagccagggaagttgctacagaaagtgaaggtatggctgcaggagtactggaatgtcacggacctcatcgccatccttctgttttctgtcggaatgatccttcgtctccaagaccagcccttcaggagtgacgggagggtcatctactgcgtgaacatcatttactggtatatccgtctcctagacatcttcggcgtgaacaagtatttgggcccgtatgtaatgatgattggaaaaatgatgatagacatgatgtactttgtcatcattatgctggtggttctgatgagctttggggtcgccaggcaagccatcctttttcccaatgaggagccatcatggaaactggccaagaacatcttctacatgccctattggatgatttatggggaagtgtttgcggaccagatagaccctccctgtggacagaatgagacccgagaggatggtaaaataatccagctgcctccctgcaagacaggagcttggatcgtgccggccatcatggcctgctacctcttagtggcaaacatcttgctggtcaacctcctcattgctgtctttaacaatacattttttgaagtaaaatcgatatccaaccaagtctggaagtttcagaggtatcagctcatcatgactttccatgaaaggccagttctgcccccaccactgatcatcttcagccacatgaccatgatattccagcacctgtgctgccgatggaggaaacacgagagcgacccggatgaaagggactacggcctgaaactcttcataaccgatgatgagctcaagaaagtacatgactttgaagagcaatgcatagaagaatacttcagagaaaaggatgatcggttcaactcatctaatgatgagaggatacgggtgacttcagaaagggtggagaacatgtctatgcggctggaggaagtcaacgagagagagcactccatgaaggcttcactccagaccgtggacatccggctggcgcagctggaagaccttatcgggcgcatggccacggccctggagcgcctgacaggtctggagcgggccgagtccaacaaaatccgctcgaggacctcgtcagactgcacggacgccgcctacattgtccgtcagagcagcttcaacagccaggaagggaacaccttcaagctccaagagagtatagaccctgcaggtgaggagaccatgtccccaacttctccaaccttaatgccccgtatgcgaagccattctttctattcggtcaatatgaaagacaaaggtggtatagaaaagttggaaagtatttttaaagaaaggtccctgagcctacaccgggctactagttcccactctgtagcaaaagaacccaaagctcctgcagcccctgccaacaccttggccattgttcctgattccagaagaccatcatcgtgtatagacatctatgtctctgctatggatgagctccactgtgatatagaccctctggacaattccgtgaacatccttgggctgggcgagccaagcttttcaactccagtaccttccacagccccttcaagtagtgcctatgcaacacttgcacccacagacagacctccaagccggagcattgattttgaggacatcacctccatggacactagatctttttcttcagactacacccacctcccagaatgccaaaacccctgggactcagagcctccgatgtaccacaccattgagcgttccaaaagtagccgctacctagccaccacaccctttcttctagaagaggctcccattgtgaaatctcatagctttatgttttccccctcaaggagctattatgccaactttggggtgcctgtaaaaacagcagaatacacaagtattacagactgtattgacacaaggtgtgtcaatgcccctcaagcaattgcggacagagctgccttccctggaggtcttggagacaaagtggaggacttaacttgctgccatccagagcgagaagcagaactgagtcaccccagctctgacagtgaggagaatgaggccaaaggccgcagagccaccattgcaatatcctcccaggagggtgataactcagagagaaccctgtccaacaacatcactgttcccaagatagagcgcgccaacagctactcggcagaggagccaagtgcgccatatgcacacaccaggaagagcttctccatcagtgacaaactcgacaggcagcggaacacagcaagcctgcgaaatcccttccagagaagcaagtcctccaagccggagggccgaggggacagcctgtccatgaggagactgtccagaacatcggctttccaaagctttgaaagcaagcacaactaaaccttcttaatatccgccacagaaggctcaagaatccagccctaaaattctctccaactccagtttttcccctttccttgaatcatacctgctttattcttagctgagcaaaacaagcaatgctttgggaggtgttaactcaaaggtgacttctgggccacagatcaagaaagcatttgatctgacccagtgccagacacaggggatttaaggcatgttcacacttgctgggcagggagggggaagagagggagaaggaagggttagagatgaatgtgtatccgcagtcacagcagaaagccatgagagcaggggaaacaaggggcttcgagcacgctccatgccaggaggcatctgttgatttctgaccattatcaagagttgtaggatgcagggctaaattgcaaaataaaataaaatagccagcgtacacaatgagatattctaaacttccattctgttttcttttcacattggctccatcactggtgactgatgaagagcatcctctttattcagtataagccggcagcaagcagttctacctaacgtcccacatccttctcatgccaacacttctgtaattgatcattataaagaaaaaacaaggtaacagtcatagttcacctgtctcttatctattcacttctggtgccacaactgtttatccttttttgaagaaaataagggaacagaaatgcctttttgtattgcaatcgaaatgaaagaagagttgatgttaaaaaaacaaaagtcaagtgatttattatatacagtgggcgttcaagtctagtcgagcaagctcaggagaatgtaattaaataattttatattttttaatttattttgtatctcacctgtcatggatgaattcattcactgaatatgtaatattgaactt

SEQ ID NO: 3086 - protein, 1566 aa, Homosapiens
MYVRVSFDTKPDLLLHLMTKEWQLELPKLLISVHGGLQNFELQPKLKQVFGKGLIKAAMTTGAWIFTGGVNTGVIRHVGDALKDHASKSRGKICTIGIAPWGIVENQEDLIGRDVVRPYQTMSNPMSKLTVLNSMHSHFILADNGTTGKYGAEVKLRRQLEKHISLQKINTRIGQGVPVVALIVEGGPNVISIVLEYLRDTPPVPVVVCDGSGRASDILAFGHKYSEEGGLINESLRDQLLVTIQKTFTYTRTQAQHLFIILMECMKKKELITVFRMGSEGHQDIDLAILTALLKGANASAPDQLSLALAWNRVDIARSQIFIYGQQWPVGSLEQAMLDALVLDRVDFVKLLIENGVSMHRFLTISRLEELYNTRHGPSNTLYHLVRDVKKREYPGFGWIYFKGNLPPDYRISLIDIGLVIEYLMGGAYRCNYTRKRFRTLYHNLFGPKRPKALKLLGMEDDIPLRRGRKTTKKREEEVDIDLDDPEINHFPFPFHELMVWAVLMKRQKMALFFWQHGEEAMAKALVACKLCKAMAHEASENDMVDDISQELNHNSRDFGQLAVELLDQSYKQDEQLAMKLLTYELKNWSNATCLQLAVAAKHRDFIAHTCSQMLLTDMWMGRLRMRKNSGLKVILGILLPPSILSLEFKNKDDMPYMSQAQEIHLQEKEAEEPEKPTKEKEEEDMELTAMLGRNNGESSRKKDEEEVQSKHRLIPLGRKIYEFYNAPIVKFWFYTLAYIGYLMLFNYIVLVKMERWPSTQEWIVISYIFTLGIEKMREILMSEPGKLLQKVKVWLQEYWNVTDLIAILLFSVGMILRLQDQPFRSDGRVIYCVNIIYWYIRLLDIFGVNKYLGPYVMMIGKMMIDMMYFVIIMLVVLMSFGVARQAILFPNEEPSWKLAKNIFYMPYWMIYGEVFADQIDPPCGQNETREDGKIIQLPPCKTGAWIVPAIMACYLLVANILLVNLLIAVFNNTFFEVKSISNQVWKFQRYQLIMTFHERPVLPPPLIIFSHMTMIFQHLCCRWRKHESDPDERDYGLKLFITDDELKKVHDFEEQCIEEYFREKDDRFNSSNDERIRVTSERVENMSMRLEEVNEREHSMKASLQTVDIRLAQLEDLIGRMATALERLTGLERAESNKIRSRTSSDCTDAAYIVRQSSFNSQEGNTFKLQESIDPAGEETMSPTSPTLMPRMRSHSFYSVNMKDKGGIEKLESIFKERSLSLHRATSSHSVAKEPKAPAAPANTLAIVPDSRRPSSCIDIYVSAMDELHCDIDPLDNSVNILGLGEPSFSTPVPSTAPSSSAYATLAPTDRPPSRSIDFEDITSMDTRSFSSDYTHLPECQNPWDSEPPMYHTIERSKSSRYLATTPFLLEEAPIVKSHSFMFSPSRSYYANFGVPVKTAEYTSITDCIDTRCVNAPQAIADRAAFPGGLGDKVEDLTCCHPEREAELSHPSSDSEENEAKGRRATIAISSQEGDNSERTLSNNITVPKIERANSYSAEEPSAPYAHTRKSFSISDKLDRQRNTASLRNPFQRSKSSKPEGRGDSLSMRRLSRTSAFQSFESKHN

SEQ ID NO: 3087 - DNA, 4599 bp, Homosapiens
tccgaccacaggctgttttgtgcaggctgtccctcttcttcaaaatcgtgcatcccctccccgaagcagcaggcagtgtgcctccattcagccacatttggtatgcatgagcacggctgcagagagaggggaggtggctgttttaagaaggttcaggggctcaggcaaggctacttgactagtcttccaagttccaggaagcctctgccctaatggaatttgcaggtgtggagatgaccatgggatgccagagccgtgggggaccgtttattttctaggcattgctcaggttttcagtttcttgttttcctggtggaatttggaaggggtcatgaatcaggctgatgctcctcgacccctaaactggaccatccggaagctgtgccacgcagcctttcttccatctgtcagacttctgaaggctcagaaatcctggatagaaagagcattttataaaagagaatgtgtccacatcatacccagcaccaaagacccccataggtgttgctgtgggcgtctgataggccagcatgttggcctcacccccagtatctccgtgcttcagaatgagaaaaatgaaagtcgcctctcccgaaatgacatccagtctgaaaagtggtccatcagcaaacacactcaactcagccctacggatgcttttgggaccattgagttccaaggaggtggccattccaacaaagccatgtatgtgcgagtatcttttgatacaaaacctgatctcctcttacacctgatgaccaaggaatggcagttggagcttcccaagcttctcatctctgtccatgggggcctgcagaactttgaactccagccaaaactcaagcaagtctttgggaaagggctcatcaaagcagcaatgacaactggagcgtggatattcactggaggggttaacacaggtgttattcgtcatgttggcgatgccttgaaggatcatgcctctaagtctcgaggaaagatatgcaccataggtattgccccctggggaattgtggaaaaccaggaggacctcattggaagagatgttgtccggccataccagaccatgtccaatcccatgagcaagctcactgttctcaacagcatgcattcccacttcattctggctgacaacgggaccactggaaaatatggagcagaggtgaaacttcgaagacaactggaaaagcatatttcactccagaagataaacacaagaatcggtcaaggtgttcctgtggtggcactcatagtggaaggaggacccaatgtgatctcgattgttttggagtaccttcgagacacccctcccgtgccagtggttgtctgtgatgggagtggacgggcatcggacatcctggcctttgggcataaatactcagaagaaggcggactgataaatgaatctttgagggaccagctgttggtgactatacagaagactttcacatacactcgaacccaagctcagcatctgttcatcatcctcatggagtgcatgaagaagaaggaattgattacggtatttcggatgggatcagaaggacaccaggacattgatttggctatcctgacagctttactcaaaggagccaatgcctcggccccagaccaactgagcttagctttagcctggaacagagtcgacatcgctcgcagccagatctttatttacgggcaacagtggccggtgggatctctggagcaagccatgttggatgccttagttctggacagagtggattttgtgaaattactcatagagaatggagtaagcatgcaccgttttctcaccatctccagactagaggaattgtacaatacgagacatgggccctcaaatacattgtaccacttggtcagggatgtcaaaaaggggaacctgcccccagactacagaatcagcctgattgacatcggcctggtgatcgagtacctgatgggcggggcttatcgctgcaactacacgcgcaagcgcttccggaccctctaccacaacctcttcggccccaagaggcccaaagccttgaaactgctgggaatggaggatgatattcccttgaggcgaggaagaaagacaaccaagaaacgtgaagaagaggtggacattgacttggatgatcctgagatcaaccacttccccttccctttccatgagctcatggtgtgggctgttctcatgaagcggcagaagatggccctgttcttctggcagcacggtgaggaggccatggccaaggccctggtggcctgcaagctctgcaaagccatggctcatgaggcctctgagaacgacatggttgacgacatttcccaggagctgaatcacaattccagagactttggccagctggctgtggagctcctggaccagtcctacaagcaggacgaacagctggccatgaaactgctgacgtatgagctgaagaactggagcaacgccacgtgcctgcagcttgccgtggctgccaaacaccgcgacttcatcgcgcacacgtgcagccagatgctgctcaccgacatgtggatgggccggctccgcatgcgcaagaactcaggcctcaaggtaattctgggaattctacttcctccttcaattctcagcttggagttcaagaacaaagacgacatgccctatatgtctcaggcccaggaaatccacctccaagagaaggaggcagaagaaccagagaagcccacaaaggaaaaagaggaagaggacatggagctcacagcaatgttgggacgaaacaacggggagtcctccaggaagaaggatgaagaggaagttcagagcaagcaccggttaatccccctcggcagaaaaatctatgaattctacaatgcacccatcgtgaagttctggttctacacactggcgtatatcggatacctgatgctcttcaactatatcgtgttagtgaagatggaacgctggccgtccacccaggaatggatcgtaatctcctatattttcaccctgggaatagaaaagatgagagagattctgatgtcagagccagggaagttgctacagaaagtgaaggtatggctgcaggagtactggaatgtcacggacctcatcgccatccttctgttttctgtcggaatgatccttcgtctccaagaccagcccttcaggagtgacgggagggtcatctactgcgtgaacatcatttactggtatatccgtctcctagacatcttcggcgtgaacaagtatttgggcccgtatgtaatgatgattggaaaaatgatgatagacatgatgtactttgtcatcattatgctggtggttctgatgagctttggggtcgccaggcaagccatcctttttcccaatgaggagccatcatggaaactggccaagaacatcttctacatgccctattggatgatttatggggaagtgtttgcggaccagatagaccctccctgtggacagaatgagacccgagaggatggtaaaataatccagctgcctccctgcaagacaggagcttggatcgtgccggccatcatggcctgctacctcttagtggcaaacatcttgctggtcaacctcctcattgctgtctttaacaatacattttttgaagtaaaatcgatatccaaccaagtctggaagtttcagaggtatcagctcatcatgactttccatgaaaggccagttctgcccccaccactgatcatcttcagccacatgaccatgatattccagcacctgtgctgccgatggaggaaacacgagagcgacccggatgaaagggactacggcctgaaactcttcataaccgatgatgagctcaagaaagtacatgactttgaagagcaatgcatagaagaatacttcagagaaaaggatgatcggttcaactcatctaatgatgagaggatacgggtgacttcagaaagggtggagaacatgtctatgcggctggaggaagtcaacgagagagagcactccatgaaggcttcactccagaccgtggacatccggctggcgcagctggaagaccttatcgggcgcatggccacggccctggagcgcctgacaggtctggagcgggccgagtccaacaaaatccgctcgaggacctcgtcagactgcacggacgccgcctacattgtccgtcagagcagcttcaacagccaggaagggaacaccttcaagctccaagagagtatagaccctgcagagcatcctctttattcagtataagccggcagcaagcagttctacctaacgtcccacatccttctcatgccaacacttctgtaattgatcattataaagaaaaaacaaggtaacagtcatagttcacctgtctcttatctattcacttctggtgccacaactgtttatccttttttgaagaaaataagggaacagaaatgcctttttgtattgcaatcgaaatgaaagaagagttgatgttaaaaaaacaaaagtcaagtgatttattatatacagtgggcgttcaagtctagtcgagcaagctcaggagaatgtaattaaataattttatattttttaatttattttgtatctcacctgtcatggatgaattcattcactgaatatgtaatattgaactt

SEQ ID NO: 3088 - protein, 1325 aa, Homosapiens
MPEPWGTVYFLGIAQVFSFLFSWWNLEGVMNQADAPRPLNWTIRKLCHAAFLPSVRLLKAQKSWIERAFYKRECVHIIPSTKDPHRCCCGRLIGQHVGLTPSISVLQNEKNESRLSRNDIQSEKWSISKHTQLSPTDAFGTIEFQGGGHSNKAMYVRVSFDTKPDLLLHLMTKEWQLELPKLLISVHGGLQNFELQPKLKQVFGKGLIKAAMTTGAWIFTGGVNTGVIRHVGDALKDHASKSRGKICTIGIAPWGIVENQEDLIGRDVVRPYQTMSNPMSKLTVLNSMHSHFILADNGTTGKYGAEVKLRRQLEKHISLQKINTRIGQGVPVVALIVEGGPNVISIVLEYLRDTPPVPVVVCDGSGRASDILAFGHKYSEEGGLINESLRDQLLVTIQKTFTYTRTQAQHLFIILMECMKKKELITVFRMGSEGHQDIDLAILTALLKGANASAPDQLSLALAWNRVDIARSQIFIYGQQWPVGSLEQAMLDALVLDRVDFVKLLIENGVSMHRFLTISRLEELYNTRHGPSNTLYHLVRDVKKGNLPPDYRISLIDIGLVIEYLMGGAYRCNYTRKRFRTLYHNLFGPKRPKALKLLGMEDDIPLRRGRKTTKKREEEVDIDLDDPEINHFPFPFHELMVWAVLMKRQKMALFFWQHGEEAMAKALVACKLCKAMAHEASENDMVDDISQELNHNSRDFGQLAVELLDQSYKQDEQLAMKLLTYELKNWSNATCLQLAVAAKHRDFIAHTCSQMLLTDMWMGRLRMRKNSGLKVILGILLPPSILSLEFKNKDDMPYMSQAQEIHLQEKEAEEPEKPTKEKEEEDMELTAMLGRNNGESSRKKDEEEVQSKHRLIPLGRKIYEFYNAPIVKFWFYTLAYIGYLMLFNYIVLVKMERWPSTQEWIVISYIFTLGIEKMREILMSEPGKLLQKVKVWLQEYWNVTDLIAILLFSVGMILRLQDQPFRSDGRVIYCVNIIYWYIRLLDIFGVNKYLGPYVMMIGKMMIDMMYFVIIMLVVLMSFGVARQAILFPNEEPSWKLAKNIFYMPYWMIYGEVFADQIDPPCGQNETREDGKIIQLPPCKTGAWIVPAIMACYLLVANILLVNLLIAVFNNTFFEVKSISNQVWKFQRYQLIMTFHERPVLPPPLIIFSHMTMIFQHLCCRWRKHESDPDERDYGLKLFITDDELKKVHDFEEQCIEEYFREKDDRFNSSNDERIRVTSERVENMSMRLEEVNEREHSMKASLQTVDIRLAQLEDLIGRMATALERLTGLERAESNKIRSRTSSDCTDAAYIVRQSSFNSQEGNTFKLQESIDPAEHPLYSV

SEQ ID NO: 3089 - DNA, 671 bp, Homosapiens
ctccttacagctggcgtatatcggatacctgatgctcttcaactatatcgtgttagtgaagatggaacgctggccgtccacccaggaatggatcgtaatctcctatattttcaccctgggaatagaaaagatgagagagattctgatgtcagagccagggaagttgctacagaaagtgaaggtatggctgcaggagtactggaatgtcacggacctcatcgccatccttctgttttctgtcggaatgatccttcgtctccaagaccagcccttcaggagtgacgggagggtcatctactgcgtgaacatcatttactggtatatccgtctcctagacatcttcggcgtgaacaagtatttgggcccgtatgtaatgatgattggaaaaatgatgatagacatgatgtactttgtcatcattatgctggtggttctgatgagctttggggtcgccaggcaagccatcctttttcccaatgaggagccatcatggaaactggccaagaacatcttctacatgccctattggatgatttatggggaagtgtttgcggaccagatagaccgtaagcaagtttatgattctcatacaccaaagtcaggtatttaaattcaattcggttatgtcttttccaagttcatttgtttgttctcaataaatggctcaagat

SEQ ID NO: 3090 - protein, 192 aa, Homosapiens
MLFNYIVLVKMERWPSTQEWIVISYIFTLGIEKMREILMSEPGKLLQKVKVWLQEYWNVTDLIAILLFSVGMILRLQDQPFRSDGRVIYCVNIIYWYIRLLDIFGVNKYLGPYVMMIGKMMIDMMYFVIIMLVVLMSFGVARQAILFPNEEPSWKLAKNIFYMPYWMIYGEVFADQIDRKQVYDSHTPKSGI

SEQ ID NO: 3091 - DNA, 444 bp, Homosapiens
ctcgagtccttcccttttctgcttatcatggggaaggaatatgcgtctaggcgttaaatcgctcgagtgccagctggcacagcacagccacagggccccagcaggagcgggcctcagttctcagagagctgcacaaagaccaaagcaaatttattactgtttttcagtttacaaatgggaaatccacaacattggtcaagaagaaaaggcaccatgaatgggaagaccgaagtgcagacaaccagctggaacaagggtgaaaatataggagattacgatccattcctgggtggacggccagcgttccatcttcactaacacgatatagttgaagagcatcagggtcttctgttacccaggctggagtgcaacggcataatcacagctcactgcagcctcgaactcttgggctcaccttagcctcctgagtagctgggactacag

SEQ ID NO: 3092 - protein, 47 aa, Homosapiens
MGNPQHWSRRKGTMNGKTEVQTTSWNKGENIGDYDPFLGGRPAFHLH

SEQ ID NO: 3093 - DNA, 347 bp, Homosapiens
aaaaaataaactggatcaaagctatactcaacttcaagatgactgttcactgagaaatgtgaaattaatatgaaatatgaaagaaaactcttactatgtaaatgaatcacagaatccaagaaagatgtgccggatgggaactagaggtcatctagattgcattctgtctaatcagatcatatgaaggagccaaagctgtcttcctgttagctccagagtaaaagtagcctgcagcccacaccctggggtctgatgaaaggactcacactccagtctgcattcctgctgcacctgccagaccctgctgacaaaatttctgtttctccattgaccaaataaaactgcag

SEQ ID NO: 3094 - protein, 35 aa, Homosapiens
MKENSYYVNESQNPRKMCRMGTRGHLDCILSNQII

SEQ ID NO: 3095 - DNA, 347 bp, Homosapiens; identical to SEQ ID NO: 3093

SEQ ID NO: 3096 - protein, 35 aa, Homosapiens; identical to SEQ ID NO: 3094

SEQ ID NO: 3097 - DNA, 1314 bp, Homosapiens
gcattattaacggaatgaccagccctagctgcagcaaaatgaaagcaacaggagctgctccggggactgcttttgccagtacccagaatcagtgctcaggctcagaaatcctggatagaaagagcattttataaaagagaatgtgtccacatcatacccagcaccaaagacccccataggtgttgctgtgggcgtctgataggccagcatgttggcctcacccccagtatctccgtgcttcagaatgagaaaaatgaaagtcgcctctcccgaaatgacatccagtctgaaaagtggtccatcagcaaacacactcaactcagccctacggatgcttttgggaccattgagttccaaggaggtggccattccaacaaagccatgtatgtgcgagtatcttttgatacaaaacctgatctcctcttacacctgatgaccaaggaatggcagttggagcttcccaagcttctcatctctgtccatgggggcctgcagaactttgaactccagccaaaactcaagcaagtctttgggaaagggctcatcaaagcagcaatgacaactggagcgtggatattcactggaggggttaacacaggtgttattcgtcatgttggcgatgccttgaaggatcatgcctctaagtctcgaggaaagatatgcaccataggtattgccccctggggaattgtggaaaaccaggaggacctcattggaagagatgttgtccggccataccagaccatgtccaatcccatgagcaagctcactgttctcaacagcatgcattcccacttcattctggctgacaacgggaccactggaaaatatggagcagaggtgaaacttcgaagacaactggaaaagcatatttcactccagaagataaacacaagaatcggtcaaggtgttcctgtggtggcactcatagtggaaggaggacccaatgtgatctcgattgttttggagtaccttcgagacacccctcccgtgccagtggttgtctgtgatgggagtggacgggcatcggacatcctggcctttgggcataaatactcagaagaaggcgggtaggtaactttccaggccccatggaagaaccctaaagcctgtttggaaacgagggtatgagtggattatgttttcagtagctcaaccaagacctcaaatcaaaacaagctatgaacaaattgtctaaaaaatgtctgtcatgggagggctgtggtgaagaacagagaaacatattctaaatgtcctgtgaagtgggaaattctatgaaagctacacggataataaaaagggtgaggaaaagag

SEQ ID NO: 3098 - protein, 230 aa, Homosapiens; identical to SEQ ID NO: 412

SEQ ID NO: 3099 - DNA, 2317 bp, Homosapiens
gcattattaacggaatgaccagccctagctgcagcaaaatgaaagcaacaggagctgctccggggactgcttttgccagtacccagaatcagtgctcaggctcagaaatcctggatagaaagagcattttataaaagagaatgtgtccacatcatacccagcaccaaagacccccataggtgttgctgtgggcgtctgataggccagcatgttggcctcacccccagtatctccgtgcttcagaatgagaaaaatgaaagtcgcctctcccgaaatgacatccagtctgaaaagtggtccatcagcaaacacactcaactcagccctacggatgcttttgggaccattgagttccaaggaggtggccattccaacaaagccatgtatgtgcgagtatcttttgatacaaaacctgatctcctcttacacctgatgaccaaggaatggcagttggagcttcccaagcttctcatctctgtccatgggggcctgcagaactttgaactccagccaaaactcaagcaagtctttgggaaagggctcatcaaagcagcaatgacaactggagcgtggatattcactggaggggttaacacaggtgttattcgtcatgttggcgatgccttgaaggatcatgcctctaagtctcgaggaaagatatgcaccataggtattgccccctggggaattgtggaaaaccaggaggacctcattggaagagatgttgtccggccataccagaccatgtccaatcccatgagcaagctcactgttctcaacagcatgcattcccacttcattctggctgacaacgggaccactggaaaatatggagcagaggtgaaacttcgaagacaactggaaaagcatatttcactccagaagataaacacaagttttcatagttacaaaacagctcatgtggaccttcaggataaaagacaggtgaagactgccttagagcaagcagagtggcagccgggaagaggaatgtttgatcatgataatctcatgcaaagtacataaaggggtatatatatgtatgtatatatgtatgtatgtttatatgtgtttatatgcatacatatacatatgtgttttatatatatatatatatatatatttttttttttttttgagacaaagcctcactctgtcactgaggctttggtgcaatggcaccctcagggctcactgcagcctcgacttcccaggctcaagtgattctcctacctcagggtcctgagtagctgggactacaggcacatgcatcaaaccccactaatttttaaaaatatttttgtagagacaggttcttgctatatttcccaggctgatcctgaattcctgggctcaaatgatcctcccgcctcgtccctcttttattctctcttcctctctttcacagatgccctctctctgctttctttcattctcttttattctctctctctccctctttttccctctctttcatagattctttctcttttctctcccctctctctctccttcctcccccataccacttccttccctcttcctggggccatgtgatctctcccctccatggtaccctctgctcctttgttttctacctgcatatggcttttttgttcattggcttaccttcctcacatggttggtctggaggaccaccactaacagaggcttcattccccaagtatgcatgccctggaagcccatctcccagttactggccttgggctcaggatctccacttcaatcccaggaaagcaaatctggctcactgcaggtctgacatccatgtaagtccagccagctttgaaaaaagtcaagcagggctgcgccttctatgcagtggatgggtctgttctctgacaggggagaggggatagggcggacaccatgagagttttcagtacacatgccacagtgacctctttggccagcttaaaggatttcccattcaatctactcatccactgcccagcttctgtcctttgtcctccgattactagatagaaaagcaaagcaagaaggcaatgccccaaaagaaggccagtcgatgggcattaatacaggattgctgtgaaaatgcctcgagcactgagaatgcacaaaatagatttgtttagctgtattgaaaacaaacagaaaaaaatacagtttgccatattaatttaatatattctgcattctcagtccctaggaaaagatacactatgcaccatcagttttcaattttttatcactgtgtgagggaggcattctaattaatccaaactctatattttcagtgtcttgacatccccatatctccagccaaatttgc

SEQ ID NO: 3100 - protein, 214 aa, Homosapiens
MYVRVSFDTKPDLLLHLMTKEWQLELPKLLISVHGGLQNFELQPKLKQVFGKGLIKAAMTTGAWIFTGGVNTGVIRHVGDALKDHASKSRGKICTIGIAPWGIVENQEDLIGRDVVRPYQTMSNPMSKLTVLNSMHSHFILADNGTTGKYGAEVKLRRQLEKHISLQKINTSFHSYKTAHVDLQDKRQVKTALEQAEWQPGRGMFDHDNLMQST

SEQ ID NO: 3101 - DNA, 4449 bp, Homosapiens
cccgcggcgaggagccagcgagagcgctcggcgctgggctgtttcccggccgagggaggcgaacttctcatggggaagaagtggagggatgcggcggaaatggagcggggctgctccgaccgcgaggacaacgcggagagccgcagacgcagccggagcgccagccggggcaggtttgccgagtcgtggaaaaggttaagttccaagcaggggtccaccaaacgctcgggactcccgtcgcagcagacgccggctcagaaatcctggatagaaagagcattttataaaagagaatgtgtccacatcatacccagcaccaaagacccccataggtgttgctgtgggcgtctgataggccagcatgttggcctcacccccagtatctccgtgcttcagaatgagaaaaatgaaagtcgcctctcccgaaatgacatccagtctgaaaagtggtccatcagcaaacacactcaactcagccctacggatgcttttgggaccattgagttccaaggaggtggccattccaacaaagccatgtatgtgcgagtatcttttgatacaaaacctgatctcctcttacacctgatgaccaaggaatggcagttggagcttcccaagcttctcatctctgtccatgggggcctgcagaactttgaactccagccaaaactcaagcaagtctttgggaaagggctcatcaaagcagcaatgacaactggagcgtggatattcactggaggggttaacacaggtgttattcgtcatgttggcgatgccttgaaggatcatgcctctaagtctcgaggaaagatatgcaccataggtattgccccctggggaattgtggaaaaccaggaggacctcattggaagagatgttgtccggccataccagaccatgtccaatcccatgagcaagctcactgttctcaacagcatgcattcccacttcattctggctgacaacgggaccactggaaaatatggagcagaggtgaaacttcgaagacaactggaaaagcatatttcactccagaagataaacacaagtaagtagcggttgttcccactggcatggctcgtaggaggtatgctgaaagtgaataactttaagtacaccatgcagcaatgtaataaaaacttgagcaagttttaaacatgaaccattatttctaccgggccagagcttagaatgagaggaagccatccagaggagaacaattggaggcgtaagaagtaattacacaattagtgactccagcttatgtatcatgtgtgaaaaattcaactccatctggggtatgtgtatgcagataagctttctcttcagacttttccttcatcatctgcatggtactccaaggagaaaagtttctatttattaagctctttttggtggctaaacagaaaagcaaaagaatcagattttgatcttagcaccgatctggctgtgcaaaggcatttcaaagaaattgaacattcactctctaagctaaagcatcatgtgaaaatgtttctatttattaagctttttttggtggctaaacagaaatgtttctatttattaagagacaatgtttctatttattaagctttttttggtggctaaacagaaaagcaaaagaatcagattttgaacttagcaacgatctagctgtgcaaaggcatttcaaagaaattgaacattcactctctaagctaaagcatcatgtgaaactatcttcatgaaattttaattgtctgaattttaagtatgtactcattgtctctagatacatatggatttagatatagatagatgtatatgtgaaccacatagtacatagttacgctaatattatctcttaagcgcataggaatctctatttgctgtatttattgtgtaaacatttgttttaactgtgaaaggtagcatcatcaaaacagcaatgctccccagatcactaagtggcttgcatttaaatgcaatttaggtatgaaagcaatctaccgtcccgcctcacaaaataaaattctatttgtttttataaagtaacaggtgaggatgcatggcaagctcaaactttgtggtaattagatgtcccatcagggaaactttgatctaattgattgaaattccaaagtctacagttccaaagaacaaaagattccctttggctagatgagttttcagaggttctatgtactgtgattcaacttttccaaatgacttttcccttctctagatttttctctgcacctgtcccaaatgggtcttcattgccatcgccaccttcctccaaaaacagggatgttagatttatcagaccacagcttctccttcctacactctcttttctggtcccaccttttagggactgctactgtttaagtgtcatgtttcatggtttcatatttttcacagtgaaacctgaaataataaattttgtcctaggtctgaaataaaaattatattacgaaatttccttcccaaactgtctttggaaagaagaaacacaagtgttattatcccaaggtgaacatcttctggaaacaaaaagagtagaaaagactagaaaatatacagagaccagcagagatcaaatgtaacaaagcactgtgatcaatgggtggtaggttttactgtaaatactaaaattgagttccattacagtacttgatagaatgggcaaatgttatgtaatcagtgttatctatttaggtttttataagctgcagcatgactttctgtacaccatcaagttaagaacgagagcttaaataggactgagctagaagctgaagaggataagagcaaggaaacaaggaataaattcagggtcaagttcagtacttggtaataagacaaaatcggtccagagaggcaaagcatgtcattgtggcaggccctggtggcagctgggctggttagccagtagtgtgggtagcaggcctagggatgtgttcgtgtaagttacacacccagcaaaggggatgggagctggagttaaaaccccagccagagcctaggttttagtcaaactttggcaccttccagaatgcctagaggaagggggttcctttttctaattgatcatcccagagggagtacccttttgcaatgtacgtgcctgaaggggtgactttcttcagaaatgggagagctgctgcatatatggatggcactgcaggggaagtccagggaggctcatggacagtggcctggcctccctgaggagcagaggccaacagcacgcagctgaagagcagggcacggtggatggtcagcatgtcaggaatgctggaggagtcaccacccgatactagtccttgggtagatcatcagggacacatcacattccatttatggaaacaccaaacctttgctagattatcaaggcaggtagtggcacatgggcacttgacaagcaggggcccgtcaggagtctagagtacaaaggaggggagaggcacggatccaggtaccacgggacttacttttgggactgtatttgtggcttcatagagacccacaggctcctcttccagtgaatatattaataattaaatggtaagaggagagttataaaagcccaagagaaattctgaagtcacaggaagtaaaaaggcccaaggtaaggaatttgtgcatgagctgtagtgaatgtcaagagttagctcctatagcagttctacccctgaacttaatagtggtagggtgaccaacttgtctcagtttgcctgggactttgttaggtttagccgtgaaagtcccaaatccctgggccccctcagtctgggcaaactgagataatgggtcgccctacaagagagtgactcataagtcattaggtcaacttccctcattactgtactcagcccccaaagtcggatggagcagcaagctccttagagggtagggagtgacccaggctctttgaagtaggtaaagcaggacctttgaggtctccattcaattaacagcaaaaaatgctcactgagaacacaaaggcctctagaacagcactgacaaagacacaaagacaggcaaaaagcggacctggtcttaacatgaaaaacggcagaagaatacaaacctttaatgcaatcctcagtcagcaatttagaacagcaaatctactttctaacatggacactttgtggttcttccttttaaaaataaaattttatggccgggcacagtggctcacacctgtaatcccagcactttgggaggccgaggcaggtggatcacgatgtcaggagttcgagaccagcctggccaacatggtgaaaccccgtctctactaaaaatacaaaaattagctgggcatggtggcgggtgcctgtaatcccagctactcgggagactgaggcaggagaattgtttgaaccctggaggcggaagttgcagtgagccgagaccatgccattgcactccagcctgggcgacagagcaggactccatctc

SEQ ID NO: 3102 - protein, 328 aa, Homosapiens
MGKKWRDAAEMERGCSDREDNAESRRRSRSASRGRFAESWKRLSSKQGSTKRSGLPSQQTPAQKSWIERAFYKRECVHIIPSTKDPHRCCCGRLIGQHVGLTPSISVLQNEKNESRLSRNDIQSEKWSISKHTQLSPTDAFGTIEFQGGGHSNKAMYVRVSFDTKPDLLLHLMTKEWQLELPKLLISVHGGLQNFELQPKLKQVFGKGLIKAAMTTGAWIFTGGVNTGVIRHVGDALKDHASKSRGKICTIGIAPWGIVENQEDLIGRDVVRPYQTMSNPMSKLTVLNSMHSHFILADNGTTGKYGAEVKLRRQLEKHISLQKINTSK

SEQ ID NO: 3103 - DNA, 1223 bp, Homosapiens
ttcggagctcagaggcccgggccgccggccgcctcccctccgtggctctagggcggaggcggaggcggggaccggggtatctcgctcgcgcagcctggagcccatgctgggctcagcccgaccctgctttggccgctgcccgccgggtctccagcgccgccggaccctcacgccgccaccttctctccagcccagcgccgctgcggccgcagcctcctgccgagcatcttccagatcccaatccctgagaatcagttctgggatgtaacagagcaagcggacattattctgggaccagcaagcctcggtcactgcagccaccacactacgtggcagccagacccggtccgtttggaatgcctgggatggtgccgccgcatgttcctcctcagatgctcaacattccgcagacctctctgcaagcaaagcccgtggccccacaggtgcccagcccagggggcgccccgggccagggtccatacccgtacagcctctctgagccagcacctctcactttggacacgagcgggaagaatctgacggagcagaacagctacagcaacattcctcacgaagggaagcacacgccgctgtatgagcggtccttgcccatcaacccggcccagagcggcagccccaaccacgtggattccgcctacttccctggctcttctacatcgtcatcttccgacaacgacgagggcagcggaggggcgacaaaatatacaatctattggggattccgtgccactgaccaccatgtacaaggaagggattcacaggcaagggggacaggtgagggcagcccccacttcactcaaggaacagggcaagggggcccagtacagagaacagaaatctcttacgacagcatcgtgccctggcagaagattctgcataatcacctagaaaattcaattctaactgaattgatggaataatagatttgaaccaaaataatttacccagttctaataagtacagaaactatacaattcacagctgggcagtcccaagcagtctgctttccagtgggaggtggaggaggctggggccttcccctcccaccaagggctgtgttgtgcccactggggacgagtcccactgaaatctccaggagaagaatgaccccgccctccgcagagcaggcttagggctggacgggagagcggtctgcatgccaggggtgagcagagccacaggtctccatggaaatcatggag

SEQ ID NO: 3104 - protein, 194 aa, Homosapiens
MPGMVPPHVPPQMLNIPQTSLQAKPVAPQVPSPGGAPGQGPYPYSLSEPAPLTLDTSGKNLTEQNSYSNIPHEGKHTPLYERSLPINPAQSGSPNHVDSAYFPGSSTSSSSDNDEGSGGATKYTIYWGFRATDHHVQGRDSQARGTGEGSPHFTQGTGQGGPVQRTEISYDSIVPWQKILHNHLENSILTELME

SEQ ID NO: 3105 - DNA, 641 bp, Homosapiens
cggcactgtgggggatttttttaaatgtaaataaccagcaggcttatatataatgcagcaagtgtgaaaagcatcacaggtctaataataatgtatgtagatgtcagtaaagtatacttttgcttctagtgcttcacttgcctcatgatatccatcaagcttttgagaagaaagtacaggatctgttaggttcttaacctagcagtttaccagatgcattccttgatcagcctgcatgtgtcaaaccactgagtaccacatgtgtccacaaagacacctctgagaggggcaggcgctgacaagatcctggagtcagaggctgggctgggctgttgcctgattgactatgcgaccctggatgtgcccatccccatgtgctttgaattcatcatggatcacatgagggagtccacagagtatgccagatcctttttggcatctttccccaagtctaaatttctttagtgtcattcatttttctgattttgtaattgttttgagtctattattgccttatttttctgattttaaagcaatataagctcattgtcaaaattttgtaaaatccagaaaagtatgataaagggaatcagcatgctgagccctactattcagcagcaaccaccaataacattttgaga

SEQ ID NO: 3106 - protein, 40 aa, Homosapiens
MPDPFWHLSPSLNFFSVIHFSDFVIVLSLLLPYFSDFKAI

SEQ ID NO: 3107 - DNA, 746 bp, Homosapiens
ttcctttagcccagcctacaccgctggaaataggccctttatgagattctcttctaaatcctagaagagtgtaccctccatttcctgaagaatcctgacaaccaaaaatcaggagcagactatgtatacaagtctggaatggaggactttccattctagaagaaagagtggccattttcaactcttcttccttttgagacctcactaaaattagaggaacagaatttaaaaatacattacatctccatgataaagagaacaggaaaggaaatatcaacagacaaggggatttgacagatatttttggagggaagaaacggtggagcagaggtaattaagccgattggagagaggctgtcctgcagaccgagtgagacaaggtcctggcactggagaggctgctgcctggatccctcccccaacacaagaaatcaggaaatcaccactcctcttgccccaggccagagactaggtttctgtagacatggaaggtagaggctgcggacctggaccccagacacaggtgagaggagaggctttgcgctaaagagagagagagagagaaaaggaggtggggaagaagaaaggaaagaaaggaggaagagagaaggccaggcgcggtggctcacgtctgtaatcccagcactttgggaggccgaggcgggcggatcacgaggtcaggagatcgagaccatcctggctaacacggtgaaaccccgtctctactaaaaacacaaaaaattagc

SEQ ID NO: 3108 - protein, 32 aa, Homosapiens
QPKIRSRLCIQVWNGGLSILEERVAIFNSSSF

SEQ ID NO: 3109 - DNA, 1436 bp, Homosapiens
attcaaggggaggccaagcgtgatggctcatgcctgtaatcctaacacttcgggaggccaacacgggtggaccgcttgagctccggagttccagaggagcctgggcaacatggtgaaaccctgtctctaccaaaaatacaaaaacattgcccagatgtggtggcatgcacctgtggtcccagctatttgagaagctaagcaggtgaagcccagggagcaaaaagagggagttgccagattatttctacctccacgccctccctgcctgtcaaggactgagtcccaggaagatgccagctccagtgctttcccgctcttgccgtctcaggccactctggctggccgctgggtccctcaacatcccctgttggttcctttagcccagcctacaccgctggaaataggccctttatgagattctcttctaaatcctagaagagtgtaccctccatttcctgaagaatcctgacaagtatgtaaacattacttaataattgttaggtaaaaatactataaatattaaatttataagtaaataaaaatatttaattttacataagacaaagctaaaaatttcagtttataatttttaaacatagacaataaatttcccagaaagaaattgctgactaccaaccaaattttcatttttattttttaaatgttggaaaaattttgtcagaaagattcttatcaaccaatcaaattgtgttagcagttgtgttagtagtcacaaggaaaataatcagtcatattagttttcttactattgttcatattttgtctttcaaaaataggtgtaatgtacaaatacttcttaattagatatgcttaaataaaacatttcatattgtattgatttgggtatattgtagaaaataaaaagttcctcttcaaagcttcccttcttgttaaagaataaatcataagtgttagaattaacagtttcttttaaagactaactttatgctagacatgctcacagacacgtagtacattctatgtcctcgtactttaaccaagatatctgtgctagacgtgcacacaggcatgtctcagctcgcagcctatgccctttccttatttgggaatgtttattccttatttggaaatgttattacttttctaagtcctttcgtaagcaacttcattttttttcctttgtttttctattgcctttacctgtttaaaaaagttttaaactgttagccaatcgggttttagtttagattgtgaggtctggctccagccaatggagacaggacacagtagcagggacaaactgggtaagggataaaaattgcttcgctccattgttccggggtgctctcgccattgttccaactgccataaacaccctttctgcagaaagcaaaaatggccttgctgagagaattaaatttatgttcgagtgctatttctttgtggcactgggg

SEQ ID NO: 3110 - protein, 62 aa, Homosapiens
MSSYFNQDICARRAHRHVSARSLCPFLIWECLFLIWKCYYFSKSFRKQLHFFSFVFLLPLPV

SEQ ID NO: 3111 - DNA, 895 bp, Homosapiens
attcaaggggaggccaagcgtgatggctcatgcctgtaatcctaacacttcgggaggccaacacgggtggaccgcttgagctccggagttccagaggagcctgggcaacatggtgaaaccctgtctctaccaaaaatacaaaaacattgcccagatgtggtggcatgcacctgtggtcccagctatttgagaagctaagcaggtgaagcccagggagcaaaaagagggagttgccagattatttctacctccacgccctccctgcctgtcaaggactgagtcccaggaagatgccagctccagtgctttcccgctcttgccgtctcaggccactctggctggccgctgggtccctcaacatcccctgttggttcctttagcccagcctacaccgctggaaataggccctttatgagattctcttctaaatcctagaagagtgtaccctccatttcctgaagaatcctgacaagtatgtaaacattacttaataattgttaggtaaaaatactataaatattaaatttataagtaaataaaaatatttaattttacataagacaaagctaaaaatttcagtttataatttttaaacatagacaataaatttcccagaaagaaattgctgactaccaaccaaattttcatttttattttttaaatgttggaaaaattttgtcagaaagattcttatcaaccaatcaaattgtgttagcagttgtgttagtagtcacaaggaaaataatcagtcatattagttttcttactattgttcatattttgtctttcaaaaataggtgtaatgtacaaatacttcttaattagatatgcttaaataaaacatttcatattgtattgatttgggtatattgtagaaaataaaaagttcctcttc

SEQ ID NO: 3112 - protein, 74 aa, Homosapiens
EAKQVKPREQKEGVARLFLPPRPPCLSRTESQEDASSSAFPLLPSQATLAGRWVPQHPLLVPLAQPTPLEIGPL

SEQ ID NO: 3113 - DNA, 974 bp, Homosapiens
gccgcccaggcccgccggctagcaggcggaagaggcggcgccggcgggacgcggctcggggctcccggaggcggcggcggaggcggaggcccggagttgggccgggacgggatccgggaggcttctgagccggagcaggcagcgcctggaggccagaggccgttcgcccgcctcaggccggtcggccgccgctcccctcccctgcgccctgttcccggcagggccagagaggccgccgcctccgcccggtggttctcgggcgaagggaagccgcgaagcaggtcctggggaagagctcgcctgctcctgagggaagcagcgataagatggcgctttgaaggggagccgaggccgagtcactctgttcgtcgggacgccgcctttctaacgccgccgtcggctcgcaccactctgggcctgctgcccacactgactgcggggtccgggagagcgggatgctggccggccgcgcctggcttcttggaaagagcaggaaggagcgcgagaatgcagttccgcggcagaaacctctgtagaggagcaggatgcaaccgacaggctgtggccggacagctgctgcccagcacatggagcctgcacgcgcacggtttggccaaagaagcccccatactcccggtgaaaaagtcatacttacctggttgcttgcgcatctagtaatgttggatcatattctggatgttttgaataccaagtcccaagagtctgcaacttgttaaaatccctggagaagactgattgctggaatgcaatggcgcaatctcagctcactgcaaactccgcctcccgagttaaagtgattctcctgcctcaccctcccaagtagctgggattacaggggaggccaagcgtgatggctcatgcctgtaatcctaacacttcgggaggccaacacgggtggaccgcttgagctccggagttccagaggagcctgggcaacatggtgaaaccctgtc

SEQ ID NO: 3114 - protein, 63 aa, Homosapiens
MQPTGCGRTAAAQHMEPARARFGQRSPHTPGEKVILTWLLAHLVMLDHILDVLNTKSQESATC

SEQ ID NO: 3115 - DNA, 2924 bp, Homosapiens
tgctgcccagcacatggagcctgcacgcgcacggtttggccaaagaagcccccatactcccggtgaaaaagatttccagaagctgttctgtcaataacaaagtctcaaagaaaaccacaaaaccaccaacactaagatcattcttgagtccaatttgaaaaactagggtcaagttctgcagaggcattgaaaggacaagaaaccaccctgatacccatcgtgtgagggaaaatgctctattcaccattcctcagcttctgcttctggtttcagagttctctctatattggagggtgttttaaagctagagtggtctttatccacttttattaacacatctgaatgtgaaggtcaagagaggaaagtgatatgtcctaagtcagagtagagtcaacaagaaaataagacaaacagcgactgagcccctggtgtatactgggcattggccagctactggggatatggagatgaagaaaacataacccttcttcaaggagcccaacctaccaaggtagacagacatatagacaaatagatacttgcatagaaaaaaagaggaaaaggggatcagtgtgacctgtgtaactaagtaccctataaaccctcctgcaacagatcatattgccctttatagtggggatggtaatcccatctgaattccacaggtactttgcagtcataccacacccatgtgtctgtcggtcctgactgtaccatttataaacagcttcactttcagcagttctcagccctcttaagctagggtcattgtcagtagggatactgcttcataagcaccagcagaacaccaaaggagaccatatgggtgaaagcaaccagcactgccctggcgcttcataggttcttagagtttttatcttttactttcagtctaacacagcactgcctgctttttgtttttgttgcttggtttgtttttttcttaccgtgttcaccaaacttgtgtccaaatagctttgggctgatgcaaaaatatctatgtggaagagaagagttgttctcatggagggccttcagatgagtgctatagactctctaggcaactccaagaggcttctcaagcagggtgggcagtgagagctgctatggaatcaatggacaaactgacagggactgctttgaaagacagtactcagttgagtatatatattctctcttaagggctaaaagtttataatcatcccttaaacactctgtgatgggatcttcaggatcatcttttgaagtaaactatattttacaatgtgatataaatcaagtgagttttttttttaattaggaattcccgtaagtataaagccattttaagatgtacattttagagactagctattgttaagtggtctgttacatttgtgtaaaccataaagatctttccagaggaagcaagtctctcataccagaatatgaaaacactagccccaggcttgagtaacctagatcacatgaagctgacttcctctgaggagtctaggacctcagatataggtgggagcacacaatcacccttctggaaacagctaagacttgtggctcaggcgtttgaccttgctgacaaaggaagaggtcagggttgacgagagctccaggaagaatgaaagtgcctctggaaggcaggaagaaagttactgtaatactttatccttagggtggaacaagagtctgggaaagctctgccctataaagtccccttccccattcctcccaggtcccaggtgtggtggtataaggagagttggcccaatctgggagctgagggatctgagacatccatctactgcatcagtgcactcagaagtgaggattttggcacagttattcatgagacatcagcccatcatataaaacatgcctccagtttggttaaactaggaagcactatataatattttaaaatcagttacatgtcactgataaaagacttagtattaccatgatgttatttttcttgaggcaacatgatgaaacccattgtctacaaaaaatccaaaaattagccaggtgaggtgtgcacctgtagtcccatcttctcaggaggctgaggtgggaagactacttgagccaaggtggtggaggttggagtgagcccagattacaccacttgcactccagcctgggcaacagagtgaggccttgtctcaaaaaaaaaaaaaaaaaaaaaaaacaacgatttttatgaaagttggagaaccaggattaagactgggtgggaactaagaatgacaggtacttttaacaatacagctgggatgctgttgatgacatgaatgaaccccactcttactgtagtcatttgctcaagattcaaagtcatgaaaaagagtagaatggaccaaacttaggtactaagagtccccagcctggcagtgaaaacagtatagttcctttgactttaatatggggaaacaggttcctggattgacgatctcaccaaaactatacacaatttttttttattttttctcagacctttcagggatgaatatatacaatttctgagaaagaaacctgagtacctttaggaagggaaaaggaatgctgaatatccccaaataacatgtcttacatgtttggtaagacttactgtaccctgtcctagaagatagaagatgccctgcccttagaagacaaagagactgtagagctatgccttctaaatcttaagccactcttcagataatggatcccttcatggtcagcccaaacatctcaagaacttttaatttgtaccgtttgtctttttttccatttatttaataccacaaattcactttattattatgaagccaatatctacatcttctcacaaagattctcttaagaaatgcagaactggccgggtgcagtggctcattcctgtaatcccagcactttgggaggccgaggcgggtggatcacctgag

SEQ ID NO: 3116 - protein, 56 aa, Homosapiens [sequence omitted]

SEQ ID NO: 3117 - DNA, 3216 bp, Homosapiens
cgcctgctcgtcacggaagagactgtcttgagagcacaggtctgttgcagcgtgggaaagcctgcgttaccactgcgcaatggctagactgaaacgtgcgcctttgcagtggatctcccagctcttctgagggagagggatttgaatcttgttgctttagtagcatcttctggaaggaggtcgtttacgtaaattctgttccaaagctctgtcgtaactgcttctaaaatgaggttgatactaaacctctgtagaggagcaggatgcaaccgacaggctgtggccggacagctgctgcccagcacatggagcctgcacgcgcacggtttggccaaagaagcccccatactcccggtgaaaaagatttccagaagctgttctgtcaataacaaagtctcaaagaaaaccacaaaaccaccaacactaagatcattcttgagtccaatttgaaaaactagggtcaagttctgcagaggcattgaaaggacaagaaaccaccctgatacccatcgtgtgagggaaaatgctctattcaccattcctcagcttctgcttctggtttcagagttctctctatattggagggtgttttaaagctagagtggtctttatccacttttattaacacatctgaatgtgaaggtcaagagaggaaagtgatatgtcctaagtcagagtagagtcaacaagaaaataagacaaacagcgactgagcccctggtgtatactgggcattggccagctactggggatatggagatgaagaaaacataacccttcttcaaggagcccaacctaccaaggtagacagacatatagacaaatagatacttgcatagaaaaaaagaggaaaaggggatcagtgtgacctgtgtaactaagtaccctataaaccctcctgcaacagatcatattgccctttatagtggggatggtaatcccatctgaattccacaggtactttgcagtcataccacacccatgtgtctgtcggtcctgactgtaccatttataaacagcttcactttcagcagttctcagccctcttaagctagggtcattgtcagtagggatactgcttcataagcaccagcagaacaccaaaggagaccatatgggtgaaagcaaccagcactgccctggcgcttcataggttcttagagtttttatcttttactttcagtctaacacagcactgcctgctttttgtttttgttgcttggtttgtttttttcttaccgtgttcaccaaacttgtgtccaaatagctttgggctgatgcaaaaatatctatgtggaagagaagagttgttctcatggagggccttcagatgagtgctatagactctctaggcaactccaagaggcttctcaagcagggtgggcagtgagagctgctatggaatcaatggacaaactgacagggactgctttgaaagacagtactcagttgagtatatatattctctcttaagggctaaaagtttataatcatcccttaaacactctgtgatgggatcttcaggatcatcttttgaagtaaactatattttacaatgtgatataaatcaagtgagttttttttttaattaggaattcccgtaagtataaagccattttaagatgtacattttagagactagctattgttaagtggtctgttacatttgtgtaaaccataaagatctttccagaggaagcaagtctctcataccagaatatgaaaacactagccccaggcttgagtaacctagatcacatgaagctgacttcctctgaggagtctaggacctcagatataggtgggagcacacaatcacccttctggaaacagctaagacttgtggctcaggcgtttgaccttgctgacaaaggaagaggtcagggttgacgagagctccaggaagaatgaaagtgcctctggaaggcaggaagaaagttactgtaatactttatccttagggtggaacaagagtctgggaaagctctgccctataaagtccccttccccattcctcccaggtcccaggtgtggtggtataaggagagttggcccaatctgggagctgagggatctgagacatccatctactgcatcagtgcactcagaagtgaggattttggcacagttattcatgagacatcagcccatcatataaaacatgcctccagtttggttaaactaggaagcactatataatattttaaaatcagttacatgtcactgataaaagacttagtattaccatgatgttatttttcttgaggcaacatgatgaaacccattgtctacaaaaaatccaaaaattagccaggtgaggtgtgcacctgtagtcccatcttctcaggaggctgaggtgggaagactacttgagccaaggtggtggaggttggagtgagcccagattacaccacttgcactccagcctgggcaacagagtgaggccttgtctcaaaaaaaaaaaaaaaaaaaaaaaacaacgatttttatgaaagttggagaaccaggattaagactgggtgggaactaagaatgacaggtacttttaacaatacagctgggatgctgttgatgacatgaatgaaccccactcttactgtagtcatttgctcaagattcaaagtcatgaaaaagagtagaatggaccaaacttaggtactaagagtccccagcctggcagtgaaaacagtatagttcctttgactttaatatggggaaacaggttcctggattgacgatctcaccaaaactatacacaatttttttttattttttctcagacctttcagggatgaatatatacaatttctgagaaagaaacctgagtacctttaggaagggaaaaggaatgctgaatatccccaaataacatgtcttacatgtttggtaagacttactgtaccctgtcctagaagatagaagatgccctgcccttagaagacaaagagactgtagagctatgccttctaaatcttaagccactcttcagataatggatcccttcatggtcagcccaaacatctcaagaacttttaatttgtaccgtttgtctttttttccatttatttaataccacaaattcactttattattatgaagccaatatctacatcttctcacaaagattctcttaagaaatgcagaactggccgggtgcagtggctcattcctgtaatcccagcactttgggaggccgaggcgggtggatcacctgag

SEQ ID NO: 3118 - protein, 73 aa, Homosapiens
MRLILNLCRGAGCNRQAVAGQLLPSTWSLHAHGLAKEAPILPVKKISRSCSVNNKVSKKTTKPPTLRSFLSPI

SEQ ID NO: 3119 - DNA, 3232 bp, Homosapiens
gctcccggaggcggcggcggaggcggaggcccggagttgggccgggacgggatccgggaggcttctgagccggagcaggcagcgcctggcttcttggaaagagcaggaaggagcgcgagaatgcagttccgcggcagaaacctctgtagaggagcaggatgcaaccgacaggctgtggccggacagctgctgcccagcacatggagcctgcacgcgcacggtttggccaaagaagcccccatactcccggtgaaaaagatggagtcttgctctgttgcccaggctggagtacaatgatgtgttctcagctcactgcaacctccctctcccaggttcaagtgatctcctgcctcagcctctggagtagctgggattacagatttccagaagctgttctgtcaataacaaagtctcaaagaaaaccacaaaaccaccaacactaagatcattcttgagtccaatttgaaaaactagggtcaagttctgcagaggcattgaaaggacaagaaaccaccctgatacccatcgtgtgagggaaaatgctctattcaccattcctcagcttctgcttctggtttcagagttctctctatattggagggtgttttaaagctagagtggtctttatccacttttattaacacatctgaatgtgaaggtcaagagaggaaagtgatatgtcctaagtcagagtagagtcaacaagaaaataagacaaacagcgactgagcccctggtgtatactgggcattggccagctactggggatatggagatgaagaaaacataacccttcttcaaggagcccaacctaccaaggtagacagacatatagacaaatagatacttgcatagaaaaaaagaggaaaaggggatcagtgtgacctgtgtaactaagtaccctataaaccctcctgcaacagatcatattgccctttatagtggggatggtaatcccatctgaattccacaggtactttgcagtcataccacacccatgtgtctgtcggtcctgactgtaccatttataaacagcttcactttcagcagttctcagccctcttaagctagggtcattgtcagtagggatactgcttcataagcaccagcagaacaccaaaggagaccatatgggtgaaagcaaccagcactgccctggcgcttcataggttcttagagtttttatcttttactttcagtctaacacagcactgcctgctttttgtttttgttgcttggtttgtttttttcttaccgtgttcaccaaacttgtgtccaaatagctttgggctgatgcaaaaatatctatgtggaagagaagagttgttctcatggagggccttcagatgagtgctatagactctctaggcaactccaagaggcttctcaagcagggtgggcagtgagagctgctatggaatcaatggacaaactgacagggactgctttgaaagacagtactcagttgagtatatatattctctcttaagggctaaaagtttataatcatcccttaaacactctgtgatgggatcttcaggatcatcttttgaagtaaactatattttacaatgtgatataaatcaagtgagttttttttttaattaggaattcccgtaagtataaagccattttaagatgtacattttagagactagctattgttaagtggtctgttacatttgtgtaaaccataaagatctttccagaggaagcaagtctctcataccagaatatgaaaacactagccccaggcttgagtaacctagatcacatgaagctgacttcctctgaggagtctaggacctcagatataggtgggagcacacaatcacccttctggaaacagctaagacttgtggctcaggcgtttgaccttgctgacaaaggaagaggtcagggttgacgagagctccaggaagaatgaaagtgcctctggaaggcaggaagaaagttactgtaatactttatccttagggtggaacaagagtctgggaaagctctgccctataaagtccccttccccattcctcccaggtcccaggtgtggtggtataaggagagttggcccaatctgggagctgagggatctgagacatccatctactgcatcagtgcactcagaagtgaggattttggcacagttattcatgagacatcagcccatcatataaaacatgcctccagtttggttaaactaggaagcactatataatattttaaaatcagttacatgtcactgataaaagacttagtattaccatgatgttatttttcttgaggcaacatgatgaaacccattgtctacaaaaaatccaaaaattagccaggtgaggtgtgcacctgtagtcccatcttctcaggaggctgaggtgggaagactacttgagccaaggtggtggaggttggagtgagcccagattacaccacttgcactccagcctgggcaacagagtgaggccttgtctcaaaaaaaaaaaaaaaaaaaaaaaacaacgatttttatgaaagttggagaaccaggattaagactgggtgggaactaagaatgacaggtacttttaacaatacagctgggatgctgttgatgacatgaatgaaccccactcttactgtagtcatttgctcaagattcaaagtcatgaaaaagagtagaatggaccaaacttaggtactaagagtccccagcctggcagtgaaaacagtatagttcctttgactttaatatggggaaacaggttcctggattgacgatctcaccaaaactatacacaatttttttttattttttctcagacctttcagggatgaatatatacaatttctgagaaagaaacctgagtacctttaggaagggaaaaggaatgctgaatatccccaaataacatgtcttacatgtttggtaagacttactgtaccctgtcctagaagatagaagatgccctgcccttagaagacaaagagactgtagagctatgccttctaaatcttaagccactcttcagataatggatcccttcatggtcagcccaaacatctcaagaacttttaatttgtaccgtttgtctttttttccatttatttaataccacaaattcactttattattatgaagccaatatctacatcttctcacaaagattctcttaagaaatgcagaactggccgggtgcagtggctcattcctgtaatcccagcactttgggaggccgaggcgggtggatcacctgag

SEQ ID NO: 3120 - protein, 94 aa, Homosapiens
MQPTGCGRTAAAQHMEPARARFGQRSPHTPGEKDGVLLCCPGWSTMMCSQLTATSLSQVQVISCLSLWSSWDYRFPEAVLSITKSQRKPQNHQH

SEQ ID NO: 3121 - DNA, 3641 bp, Homosapiens
gccgcccaggcccgccggctagcaggcggaagaggcggcgccggcgggacgcggctcggggctcccggaggcggcggcggaggcggaggcccggagttgggccgggacgggatccgggaggcttctgagccggagcaggcagcgcctggaggccagaggccgttcgcccgcctcaggccggtcggccgccgctcccctcccctgcgccctgttcccggcagggccagagaggccgccgcctccgcccggtggttctcgggcgaagggaagccgcgaagcaggtcctggggaagagctcgcctgctcctgagggaagcagcgataagatggcgctttgaaggggagccgaggccgagtcactctgttcgtcgggacgccgcctttctaacgccgccgtcggctcgcaccactctgggcctgctgcccacactgactgcggggtccgggagagcgggatgctggccggccgcgcctggcttcttggaaagagcaggaaggagcgcgagaatgcagttccgcggcaggtgctcatcccagcagcttcgggctctcggttgtggtttttacacctatgacaaatgacatggccaaacacaccataatgtctgaaggtacaggtagccctaagcgcctgctcgtcacggaagagactgtcttgagagcacagaaacctctgtagaggagcaggatgcaaccgacaggctgtggccggacagctgctgcccagcacatggagcctgcacgcgcacggtttggccaaagaagcccccatactcccggtgaaaaagatttccagaagctgttctgtcaataacaaagtctcaaagaaaaccacaaaaccaccaacactaagatcattcttgagtccaatttgaaaaactagggtcaagttctgcagaggcattgaaaggacaagaaaccaccctgatacccatcgtgtgagggaaaatgctctattcaccattcctcagcttctgcttctggtttcagagttctctctatattggagggtgttttaaagctagagtggtctttatccacttttattaacacatctgaatgtgaaggtcaagagaggaaagtgatatgtcctaagtcagagtagagtcaacaagaaaataagacaaacagcgactgagcccctggtgtatactgggcattggccagctactggggatatggagatgaagaaaacataacccttcttcaaggagcccaacctaccaaggtagacagacatatagacaaatagatacttgcatagaaaaaaagaggaaaaggggatcagtgtgacctgtgtaactaagtaccctataaaccctcctgcaacagatcatattgccctttatagtggggatggtaatcccatctgaattccacaggtactttgcagtcataccacacccatgtgtctgtcggtcctgactgtaccatttataaacagcttcactttcagcagttctcagccctcttaagctagggtcattgtcagtagggatactgcttcataagcaccagcagaacaccaaaggagaccatatgggtgaaagcaaccagcactgccctggcgcttcataggttcttagagtttttatcttttactttcagtctaacacagcactgcctgctttttgtttttgttgcttggtttgtttttttcttaccgtgttcaccaaacttgtgtccaaatagctttgggctgatgcaaaaatatctatgtggaagagaagagttgttctcatggagggccttcagatgagtgctatagactctctaggcaactccaagaggcttctcaagcagggtgggcagtgagagctgctatggaatcaatggacaaactgacagggactgctttgaaagacagtactcagttgagtatatatattctctcttaagggctaaaagtttataatcatcccttaaacactctgtgatgggatcttcaggatcatcttttgaagtaaactatattttacaatgtgatataaatcaagtgagttttttttttaattaggaattcccgtaagtataaagccattttaagatgtacattttagagactagctattgttaagtggtctgttacatttgtgtaaaccataaagatctttccagaggaagcaagtctctcataccagaatatgaaaacactagccccaggcttgagtaacctagatcacatgaagctgacttcctctgaggagtctaggacctcagatataggtgggagcacacaatcacccttctggaaacagctaagacttgtggctcaggcgtttgaccttgctgacaaaggaagaggtcagggttgacgagagctccaggaagaatgaaagtgcctctggaaggcaggaagaaagttactgtaatactttatccttagggtggaacaagagtctgggaaagctctgccctataaagtccccttccccattcctcccaggtcccaggtgtggtggtataaggagagttggcccaatctgggagctgagggatctgagacatccatctactgcatcagtgcactcagaagtgaggattttggcacagttattcatgagacatcagcccatcatataaaacatgcctccagtttggttaaactaggaagcactatataatattttaaaatcagttacatgtcactgataaaagacttagtattaccatgatgttatttttcttgaggcaacatgatgaaacccattgtctacaaaaaatccaaaaattagccaggtgaggtgtgcacctgtagtcccatcttctcaggaggctgaggtgggaagactacttgagccaaggtggtggaggttggagtgagcccagattacaccacttgcactccagcctgggcaacagagtgaggccttgtctcaaaaaaaaaaaaaaaaaaaaaaaacaacgatttttatgaaagttggagaaccaggattaagactgggtgggaactaagaatgacaggtacttttaacaatacagctgggatgctgttgatgacatgaatgaaccccactcttactgtagtcatttgctcaagattcaaagtcatgaaaaagagtagaatggaccaaacttaggtactaagagtccccagcctggcagtgaaaacagtatagttcctttgactttaatatggggaaacaggttcctggattgacgatctcaccaaaactatacacaatttttttttattttttctcagacctttcagggatgaatatatacaatttctgagaaagaaacctgagtacctttaggaagggaaaaggaatgctgaatatccccaaataacatgtcttacatgtttggtaagacttactgtaccctgtcctagaagatagaagatgccctgcccttagaagacaaagagactgtagagctatgccttctaaatcttaagccactcttcagataatggatcccttcatggtcagcccaaacatctcaagaacttttaatttgtaccgtttgtctttttttccatttatttaataccacaaattcactttattattatgaagccaatatctacatcttctcacaaagattctcttaagaaatgcagaactggccgggtgcagtggctcattcctgtaatcccagcactttgggaggccgaggcgggtggatcacctgag

SEQ ID NO: 3122 - protein, 41 aa, Homosapiens
MQPTGCGRTAAAQHMEPARARFGQRSPHTPGEKDFQKLFCQ

SEQ ID NO: 3123 - DNA, 3762 bp, Homosapiens
gccgcccaggcccgccggctagcaggcggaagaggcggcgccggcgggacgcggctcggggctcccggaggcggcggcggaggcggaggcccggagttgggccgggacgggatccgggaggcttctgagccggagcaggcagcgcctggaggccagaggccgttcgcccgcctcaggccggtcggccgccgctcccctcccctgcgccctgttcccggcagggccagagaggccgccgcctccgcccggtggttctcgggcgaagggaagccgcgaagcaggtcctggggaagagctcgcctgctcctgagggaagcagcgataagatggcgctttgaaggggagccgaggccgagtcactctgttcgtcgggacgccgcctttctaacgccgccgtcggctcgcaccactctgggcctgctgcccacactgactgcggggtccgggagagcgggatgctggccggccgcgcctggcttcttggaaagagcaggaaggagcgcgagaatgcagttccgcggcaggtgctcatcccagcagcttcgggctctcggttgtggtttttacacctatgacaaatgacatggccaaacacaccataatgtctgaaggtacaggtagccctaagcgcctgctcgtcacggaagagactgtcttgagagcacagaaacctctgtagaggagcaggatgcaaccgacaggctgtggccggacagctgctgcccagcacatggagcctgcacgcgcacggtttggccaaagaagcccccatactcccggtgaaaaagatggagtcttgctctgttgcccaggctggagtacaatgatgtgttctcagctcactgcaacctccctctcccaggttcaagtgatctcctgcctcagcctctggagtagctgggattacagatttccagaagctgttctgtcaataacaaagtctcaaagaaaaccacaaaaccaccaacactaagatcattcttgagtccaatttgaaaaactagggtcaagttctgcagaggcattgaaaggacaagaaaccaccctgatacccatcgtgtgagggaaaatgctctattcaccattcctcagcttctgcttctggtttcagagttctctctatattggagggtgttttaaagctagagtggtctttatccacttttattaacacatctgaatgtgaaggtcaagagaggaaagtgatatgtcctaagtcagagtagagtcaacaagaaaataagacaaacagcgactgagcccctggtgtatactgggcattggccagctactggggatatggagatgaagaaaacataacccttcttcaaggagcccaacctaccaaggtagacagacatatagacaaatagatacttgcatagaaaaaaagaggaaaaggggatcagtgtgacctgtgtaactaagtaccctataaaccctcctgcaacagatcatattgccctttatagtggggatggtaatcccatctgaattccacaggtactttgcagtcataccacacccatgtgtctgtcggtcctgactgtaccatttataaacagcttcactttcagcagttctcagccctcttaagctagggtcattgtcagtagggatactgcttcataagcaccagcagaacaccaaaggagaccatatgggtgaaagcaaccagcactgccctggcgcttcataggttcttagagtttttatcttttactttcagtctaacacagcactgcctgctttttgtttttgttgcttggtttgtttttttcttaccgtgttcaccaaacttgtgtccaaatagctttgggctgatgcaaaaatatctatgtggaagagaagagttgttctcatggagggccttcagatgagtgctatagactctctaggcaactccaagaggcttctcaagcagggtgggcagtgagagctgctatggaatcaatggacaaactgacagggactgctttgaaagacagtactcagttgagtatatatattctctcttaagggctaaaagtttataatcatcccttaaacactctgtgatgggatcttcaggatcatcttttgaagtaaactatattttacaatgtgatataaatcaagtgagttttttttttaattaggaattcccgtaagtataaagccattttaagatgtacattttagagactagctattgttaagtggtctgttacatttgtgtaaaccataaagatctttccagaggaagcaagtctctcataccagaatatgaaaacactagccccaggcttgagtaacctagatcacatgaagctgacttcctctgaggagtctaggacctcagatataggtgggagcacacaatcacccttctggaaacagctaagacttgtggctcaggcgtttgaccttgctgacaaaggaagaggtcagggttgacgagagctccaggaagaatgaaagtgcctctggaaggcaggaagaaagttactgtaatactttatccttagggtggaacaagagtctgggaaagctctgccctataaagtccccttccccattcctcccaggtcccaggtgtggtggtataaggagagttggcccaatctgggagctgagggatctgagacatccatctactgcatcagtgcactcagaagtgaggattttggcacagttattcatgagacatcagcccatcatataaaacatgcctccagtttggttaaactaggaagcactatataatattttaaaatcagttacatgtcactgataaaagacttagtattaccatgatgttatttttcttgaggcaacatgatgaaacccattgtctacaaaaaatccaaaaattagccaggtgaggtgtgcacctgtagtcccatcttctcaggaggctgaggtgggaagactacttgagccaaggtggtggaggttggagtgagcccagattacaccacttgcactccagcctgggcaacagagtgaggccttgtctcaaaaaaaaaaaaaaaaaaaaaaaacaacgatttttatgaaagttggagaaccaggattaagactgggtgggaactaagaatgacaggtacttttaacaatacagctgggatgctgttgatgacatgaatgaaccccactcttactgtagtcatttgctcaagattcaaagtcatgaaaaagagtagaatggaccaaacttaggtactaagagtccccagcctggcagtgaaaacagtatagttcctttgactttaatatggggaaacaggttcctggattgacgatctcaccaaaactatacacaatttttttttattttttctcagacctttcagggatgaatatatacaatttctgagaaagaaacctgagtacctttaggaagggaaaaggaatgctgaatatccccaaataacatgtcttacatgtttggtaagacttactgtaccctgtcctagaagatagaagatgccctgcccttagaagacaaagagactgtagagctatgccttctaaatcttaagccactcttcagataatggatcccttcatggtcagcccaaacatctcaagaacttttaatttgtaccgtttgtctttttttccatttatttaataccacaaattcactttattattatgaagccaatatctacatcttctcacaaagattctcttaagaaatgcagaactggccgggtgcagtggctcattcctgtaatcccagcactttgggaggccgaggcgggtggatcacctgag

SEQ ID NO: 3124 - protein, 94 aa, Homosapiens; identical to SEQ ID NO: 3120

SEQ ID NO: 3125 - DNA, 3498 bp, Homosapiens
gccgcccaggcccgccggctagcaggcggaagaggcggcgccggcgggacgcggctcggggctcccggaggcggcggcggaggcggaggcccggagttgggccgggacgggatccgggaggcttctgagccggagcaggcagcgcctggaggccagaggccgttcgcccgcctcaggccggtcggccgccgctcccctcccctgcgccctgttcccggcagggccagagaggccgccgcctccgcccggtggttctcgggcgaagggaagccgcgaagcaggtcctggggaagagctcgcctgctcctgagggaagcagcgataagatggcgctttgaaggggagccgaggccgagtcactctgttcgtcgggacgccgcctttctaacgccgccgtcggctcgcaccactctgggcctgctgcccacactgactgcggggtccgggagagcgggatgctggccggccgcgcctggcttcttggaaagagcaggaaggagcgcgagaatgcagttccgcggcagaaacctctgtagaggagcaggatgcaaccgacaggctgtggccggacagctgctgcccagcacatggagcctgcacgcgcacggtttggccaaagaagcccccatactcccggtgaaaaagatttccagaagctgttctgtcaataacaaagtctcaaagaaaaccacaaaaccaccaacactaagatcattcttgagtccaatttgaaaaactagggtcaagttctgcagaggcattgaaaggacaagaaaccaccctgatacccatcgtgtgagggaaaatgctctattcaccattcctcagcttctgcttctggtttcagagttctctctatattggagggtgttttaaagctagagtggtctttatccacttttattaacacatctgaatgtgaaggtcaagagaggaaagtgatatgtcctaagtcagagtagagtcaacaagaaaataagacaaacagcgactgagcccctggtgtatactgggcattggccagctactggggatatggagatgaagaaaacataacccttcttcaaggagcccaacctaccaaggtagacagacatatagacaaatagatacttgcatagaaaaaaagaggaaaaggggatcagtgtgacctgtgtaactaagtaccctataaaccctcctgcaacagatcatattgccctttatagtggggatggtaatcccatctgaattccacaggtactttgcagtcataccacacccatgtgtctgtcggtcctgactgtaccatttataaacagcttcactttcagcagttctcagccctcttaagctagggtcattgtcagtagggatactgcttcataagcaccagcagaacaccaaaggagaccatatgggtgaaagcaaccagcactgccctggcgcttcataggttcttagagtttttatcttttactttcagtctaacacagcactgcctgctttttgtttttgttgcttggtttgtttttttcttaccgtgttcaccaaacttgtgtccaaatagctttgggctgatgcaaaaatatctatgtggaagagaagagttgttctcatggagggccttcagatgagtgctatagactctctaggcaactccaagaggcttctcaagcagggtgggcagtgagagctgctatggaatcaatggacaaactgacagggactgctttgaaagacagtactcagttgagtatatatattctctcttaagggctaaaagtttataatcatcccttaaacactctgtgatgggatcttcaggatcatcttttgaagtaaactatattttacaatgtgatataaatcaagtgagttttttttttaattaggaattcccgtaagtataaagccattttaagatgtacattttagagactagctattgttaagtggtctgttacatttgtgtaaaccataaagatctttccagaggaagcaagtctctcataccagaatatgaaaacactagccccaggcttgagtaacctagatcacatgaagctgacttcctctgaggagtctaggacctcagatataggtgggagcacacaatcacccttctggaaacagctaagacttgtggctcaggcgtttgaccttgctgacaaaggaagaggtcagggttgacgagagctccaggaagaatgaaagtgcctctggaaggcaggaagaaagttactgtaatactttatccttagggtggaacaagagtctgggaaagctctgccctataaagtccccttccccattcctcccaggtcccaggtgtggtggtataaggagagttggcccaatctgggagctgagggatctgagacatccatctactgcatcagtgcactcagaagtgaggattttggcacagttattcatgagacatcagcccatcatataaaacatgcctccagtttggttaaactaggaagcactatataatattttaaaatcagttacatgtcactgataaaagacttagtattaccatgatgttatttttcttgaggcaacatgatgaaacccattgtctacaaaaaatccaaaaattagccaggtgaggtgtgcacctgtagtcccatcttctcaggaggctgaggtgggaagactacttgagccaaggtggtggaggttggagtgagcccagattacaccacttgcactccagcctgggcaacagagtgaggccttgtctcaaaaaaaaaaaaaaaaaaaaaaaacaacgatttttatgaaagttggagaaccaggattaagactgggtgggaactaagaatgacaggtacttttaacaatacagctgggatgctgttgatgacatgaatgaaccccactcttactgtagtcatttgctcaagattcaaagtcatgaaaaagagtagaatggaccaaacttaggtactaagagtccccagcctggcagtgaaaacagtatagttcctttgactttaatatggggaaacaggttcctggattgacgatctcaccaaaactatacacaatttttttttattttttctcagacctttcagggatgaatatatacaatttctgagaaagaaacctgagtacctttaggaagggaaaaggaatgctgaatatccccaaataacatgtcttacatgtttggtaagacttactgtaccctgtcctagaagatagaagatgccctgcccttagaagacaaagagactgtagagctatgccttctaaatcttaagccactcttcagataatggatcccttcatggtcagcccaaacatctcaagaacttttaatttgtaccgtttgtctttttttccatttatttaataccacaaattcactttattattatgaagccaatatctacatcttctcacaaagattctcttaagaaatgcagaactggccgggtgcagtggctcattcctgtaatcccagcactttgggaggccgaggcgggtggatcacctgag

SEQ ID NO: 3126 - protein, 74 aa, Homosapiens
MQFRGRNLCRGAGCNRQAVAGQLLPSTWSLHAHGLAKEAPILPVKKISRSCSVNNKVSKKTTKPPTLRSFLSPI

SEQ ID NO: 3127 - DNA, 3619 bp, Homosapiens
gccgcccaggcccgccggctagcaggcggaagaggcggcgccggcgggacgcggctcggggctcccggaggcggcggcggaggcggaggcccggagttgggccgggacgggatccgggaggcttctgagccggagcaggcagcgcctggaggccagaggccgttcgcccgcctcaggccggtcggccgccgctcccctcccctgcgccctgttcccggcagggccagagaggccgccgcctccgcccggtggttctcgggcgaagggaagccgcgaagcaggtcctggggaagagctcgcctgctcctgagggaagcagcgataagatggcgctttgaaggggagccgaggccgagtcactctgttcgtcgggacgccgcctttctaacgccgccgtcggctcgcaccactctgggcctgctgcccacactgactgcggggtccgggagagcgggatgctggccggccgcgcctggcttcttggaaagagcaggaaggagcgcgagaatgcagttccgcggcagaaacctctgtagaggagcaggatgcaaccgacaggctgtggccggacagctgctgcccagcacatggagcctgcacgcgcacggtttggccaaagaagcccccatactcccggtgaaaaagatggagtcttgctctgttgcccaggctggagtacaatgatgtgttctcagctcactgcaacctccctctcccaggttcaagtgatctcctgcctcagcctctggagtagctgggattacagatttccagaagctgttctgtcaataacaaagtctcaaagaaaaccacaaaaccaccaacactaagatcattcttgagtccaatttgaaaaactagggtcaagttctgcagaggcattgaaaggacaagaaaccaccctgatacccatcgtgtgagggaaaatgctctattcaccattcctcagcttctgcttctggtttcagagttctctctatattggagggtgttttaaagctagagtggtctttatccacttttattaacacatctgaatgtgaaggtcaagagaggaaagtgatatgtcctaagtcagagtagagtcaacaagaaaataagacaaacagcgactgagcccctggtgtatactgggcattggccagctactggggatatggagatgaagaaaacataacccttcttcaaggagcccaacctaccaaggtagacagacatatagacaaatagatacttgcatagaaaaaaagaggaaaaggggatcagtgtgacctgtgtaactaagtaccctataaaccctcctgcaacagatcatattgccctttatagtggggatggtaatcccatctgaattccacaggtactttgcagtcataccacacccatgtgtctgtcggtcctgactgtaccatttataaacagcttcactttcagcagttctcagccctcttaagctagggtcattgtcagtagggatactgcttcataagcaccagcagaacaccaaaggagaccatatgggtgaaagcaaccagcactgccctggcgcttcataggttcttagagtttttatcttttactttcagtctaacacagcactgcctgctttttgtttttgttgcttggtttgtttttttcttaccgtgttcaccaaacttgtgtccaaatagctttgggctgatgcaaaaatatctatgtggaagagaagagttgttctcatggagggccttcagatgagtgctatagactctctaggcaactccaagaggcttctcaagcagggtgggcagtgagagctgctatggaatcaatggacaaactgacagggactgctttgaaagacagtactcagttgagtatatatattctctcttaagggctaaaagtttataatcatcccttaaacactctgtgatgggatcttcaggatcatcttttgaagtaaactatattttacaatgtgatataaatcaagtgagttttttttttaattaggaattcccgtaagtataaagccattttaagatgtacattttagagactagctattgttaagtggtctgttacatttgtgtaaaccataaagatctttccagaggaagcaagtctctcataccagaatatgaaaacactagccccaggcttgagtaacctagatcacatgaagctgacttcctctgaggagtctaggacctcagatataggtgggagcacacaatcacccttctggaaacagctaagacttgtggctcaggcgtttgaccttgctgacaaaggaagaggtcagggttgacgagagctccaggaagaatgaaagtgcctctggaaggcaggaagaaagttactgtaatactttatccttagggtggaacaagagtctgggaaagctctgccctataaagtccccttccccattcctcccaggtcccaggtgtggtggtataaggagagttggcccaatctgggagctgagggatctgagacatccatctactgcatcagtgcactcagaagtgaggattttggcacagttattcatgagacatcagcccatcatataaaacatgcctccagtttggttaaactaggaagcactatataatattttaaaatcagttacatgtcactgataaaagacttagtattaccatgatgttatttttcttgaggcaacatgatgaaacccattgtctacaaaaaatccaaaaattagccaggtgaggtgtgcacctgtagtcccatcttctcaggaggctgaggtgggaagactacttgagccaaggtggtggaggttggagtgagcccagattacaccacttgcactccagcctgggcaacagagtgaggccttgtctcaaaaaaaaaaaaaaaaaaaaaaaacaacgatttttatgaaagttggagaaccaggattaagactgggtgggaactaagaatgacaggtacttttaacaatacagctgggatgctgttgatgacatgaatgaaccccactcttactgtagtcatttgctcaagattcaaagtcatgaaaaagagtagaatggaccaaacttaggtactaagagtccccagcctggcagtgaaaacagtatagttcctttgactttaatatggggaaacaggttcctggattgacgatctcaccaaaactatacacaatttttttttattttttctcagacctttcagggatgaatatatacaatttctgagaaagaaacctgagtacctttaggaagggaaaaggaatgctgaatatccccaaataacatgtcttacatgtttggtaagacttactgtaccctgtcctagaagatagaagatgccctgcccttagaagacaaagagactgtagagctatgccttctaaatcttaagccactcttcagataatggatcccttcatggtcagcccaaacatctcaagaacttttaatttgtaccgtttgtctttttttccatttatttaataccacaaattcactttattattatgaagccaatatctacatcttctcacaaagattctcttaagaaatgcagaactggccgggtgcagtggctcattcctgtaatcccagcactttgggaggccgaggcgggtggatcacctgag

SEQ ID NO: 3128 - protein, 94 aa, Homosapiens; identical to SEQ ID NO: 3120

SEQ ID NO: 3129 - DNA, 4420 bp, Homosapiens
gctatcattttaggcttaactaccaccatctcctcgcgggcagtgggggcaaccgcgaagacagaatttcacaaactttcagctccagcagtttcaaggaaatgtcaaatgacaagatggaagaccgagtgtcaagagctaagacaacaaaaaggcccccaaaatttgttttcaagaaaaccaatgaaaaaagcaagcaatcagaacgtgaagtccaggatcatggatgtgcttatcttcacagtcactgctgggtcctgaagttctcctctggcccagtgccagctgcgaagccctctgccaaagggccagaggaggccggtgatatagagctctgattacccacccgtcagggcaccgctgaaggtcactgaatacttactgtgcacccgaaaaataaatcctgcgagttcacgcccgcgtagttcgccccctgattttgagcgactcctttcgcatgggatctacaaaaccgaactgccttaaagacctctttcacacggacgtgaagtcacagaactgacaaaatcccatcctgtcaaagtgcacgggtctttgaaatctaacacaaaaagccatagaaagattctctaaacaccctgtactaagaggaacacggacagggcactgcgttctgaagtagaggccagggcactggcccttagacacgtctcgctgtcaccgggctaacaacattggcaagggcggcggcagcagcactgatatttgcagcccccaagggctctggcgaaaccccctctattactctgtatcctgcctgcttccaagatgaacctgttgctgggaaagaacaggctaaattagaaaagggagtattttgtcaaagttgaaggtgagtgatagcctgcccgcctcaaataggatgggaaaaactaaggatattggggatgatgacactgtcgcctccgaattctggtccggggctctctcccagccctcaagtgtccccacgcggccgcggaccccgaacagggacagctggagacgggcttgggcagcgcgcggcctgcacccgcggccatccatcttgcagcccggcccggccaggctatcccgggcaagggctgggggaactcgctgcccccagcgccgccacggccgggcgacattctgcgccctgggaagggggataggggtgcggcgcggccccggtccccggcccgcccggatccccggcctcaccttgacgtggaagcggatgagcgccaggcggatgcagtgggccatgcagacgggcggcaggaaccagacctttggcggcggggtgcccttgttctggacatggctgacgatctgctgtgccgtctggcgctcgttgccctgccgcttgacccactcgtgcagccgggccttctcgagcgcgccgttgaagaagacgaagagctcgatgttgccgccgaagcaggccttggccagcgccgccagaaacctctgtagaggagcaggatgcaaccgacaggctgtggccggacagctgctgcccagcacatggagcctgcacgcgcacggtttggccaaagaagcccccatactcccggtgaaaaagatttccagaagctgttctgtcaataacaaagtctcaaagaaaaccacaaaaccaccaacactaagatcattcttgagtccaatttgaaaaactagggtcaagttctgcagaggcattgaaaggacaagaaaccaccctgatacccatcgtgtgagggaaaatgctctattcaccattcctcagcttctgcttctggtttcagagttctctctatattggagggtgttttaaagctagagtggtctttatccacttttattaacacatctgaatgtgaaggtcaagagaggaaagtgatatgtcctaagtcagagtagagtcaacaagaaaataagacaaacagcgactgagcccctggtgtatactgggcattggccagctactggggatatggagatgaagaaaacataacccttcttcaaggagcccaacctaccaaggtagacagacatatagacaaatagatacttgcatagaaaaaaagaggaaaaggggatcagtgtgacctgtgtaactaagtaccctataaaccctcctgcaacagatcatattgccctttatagtggggatggtaatcccatctgaattccacaggtactttgcagtcataccacacccatgtgtctgtcggtcctgactgtaccatttataaacagcttcactttcagcagttctcagccctcttaagctagggtcattgtcagtagggatactgcttcataagcaccagcagaacaccaaaggagaccatatgggtgaaagcaaccagcactgccctggcgcttcataggttcttagagtttttatcttttactttcagtctaacacagcactgcctgctttttgtttttgttgcttggtttgtttttttcttaccgtgttcaccaaacttgtgtccaaatagctttgggctgatgcaaaaatatctatgtggaagagaagagttgttctcatggagggccttcagatgagtgctatagactctctaggcaactccaagaggcttctcaagcagggtgggcagtgagagctgctatggaatcaatggacaaactgacagggactgctttgaaagacagtactcagttgagtatatatattctctcttaagggctaaaagtttataatcatcccttaaacactctgtgatgggatcttcaggatcatcttttgaagtaaactatattttacaatgtgatataaatcaagtgagttttttttttaattaggaattcccgtaagtataaagccattttaagatgtacattttagagactagctattgttaagtggtctgttacatttgtgtaaaccataaagatctttccagaggaagcaagtctctcataccagaatatgaaaacactagccccaggcttgagtaacctagatcacatgaagctgacttcctctgaggagtctaggacctcagatataggtgggagcacacaatcacccttctggaaacagctaagacttgtggctcaggcgtttgaccttgctgacaaaggaagaggtcagggttgacgagagctccaggaagaatgaaagtgcctctggaaggcaggaagaaagttactgtaatactttatccttagggtggaacaagagtctgggaaagctctgccctataaagtccccttccccattcctcccaggtcccaggtgtggtggtataaggagagttggcccaatctgggagctgagggatctgagacatccatctactgcatcagtgcactcagaagtgaggattttggcacagttattcatgagacatcagcccatcatataaaacatgcctccagtttggttaaactaggaagcactatataatattttaaaatcagttacatgtcactgataaaagacttagtattaccatgatgttatttttcttgaggcaacatgatgaaacccattgtctacaaaaaatccaaaaattagccaggtgaggtgtgcacctgtagtcccatcttctcaggaggctgaggtgggaagactacttgagccaaggtggtggaggttggagtgagcccagattacaccacttgcactccagcctgggcaacagagtgaggccttgtctcaaaaaaaaaaaaaaaaaaaaaaaacaacgatttttatgaaagttggagaaccaggattaagactgggtgggaactaagaatgacaggtacttttaacaatacagctgggatgctgttgatgacatgaatgaaccccactcttactgtagtcatttgctcaagattcaaagtcatgaaaaagagtagaatggaccaaacttaggtactaagagtccccagcctggcagtgaaaacagtatagttcctttgactttaatatggggaaacaggttcctggattgacgatctcaccaaaactatacacaatttttttttattttttctcagacctttcagggatgaatatatacaatttctgagaaagaaacctgagtacctttaggaagggaaaaggaatgctgaatatccccaaataacatgtcttacatgtttggtaagacttactgtaccctgtcctagaagatagaagatgccctgcccttagaagacaaagagactgtagagctatgccttctaaatcttaagccactcttcagataatggatcccttcatggtcagcccaaacatctcaagaacttttaatttgtaccgtttgtctttttttccatttatttaataccacaaattcactttattattatgaagccaatatctacatcttctcacaaagattctcttaagaaatgcagaactggccgggtgcagtggctcattcctgtaatcccagcactttgggaggccgaggcgggtggatcacctgag

SEQ ID NO: 3130 - protein, 256 aa, Homosapiens
MGKTKDIGDDDTVASEFWSGALSQPSSVPTRPRTPNRDSWRRAWAARGLHPRPSILQPGPARLSRARAGGTRCPQRRHGRATFCALGRGIGVRRGPGPRPARIPGLTLTWKRMSARRMQWAMQTGGRNQTFGGGVPLFWTWLTICCAVWRSLPCRLTHSCSRAFSSAPLKKTKSSMLPPKQALASAARNLCRGAGCNRQAVAGQLLPSTWSLHAHGLAKEAPILPVKKISRSCSVNNKVSKKTTKPPTLRSFLSPI

SEQ ID NO: 3131 - DNA, 1272 bp, Homosapiens
tgctgcccagcacatggagcctgcacgcgcacggtttggccaaagaagcccccatactcccggtgaaaaagatttccagaagctgttctgtcaataacaaagtctcaaagaaaaccacaaaaccaccaacactaagatcattcttgagtccaatttgaaaaactagggtcaagttctgcagaggcattgaaaggacaagaaaccaccctgatacccatcgtgtgagggaaaatgctctattcaccattcctcagcttctgcttctggtttcagagttctctctatattggagggtgttttaaagctagagtggtctttatccacttttattaacacatctgaatgtgaaggtcaagagaggaaagtgatatgtcctaagtcagagtagagtcaacaagaaaataagacaaacagcgactgagcccctggtgtatactgggcattggccagctactggggatatggagatgaagaaaacataacccttcttcaaggagcccaacctaccaaggtagacagacatatagacaaatagatacttgcatagaaaaaaagaggaaaaggggatcagtgtgacctgtgtaactaagtaccctataaaccctcctgcaacagatcatattgccctttatagtggggatggtaatcccatctgaattccacaggtactttgcagtcataccacacccatgtgtctgtcggtcctgactgtaccatttataaacagcttcactttcagcagttctcagccctcttaagctagggtcattgtcagtagggatactgcttcataagcaccagcagaacaccaaaggagaccatatgggtgaaagcaaccagcactgccctggcgcttcataggttcttagagtttttatcttttactttcagtctaacacagcactgcctgctttttgtttttgttgcttggtttgtttttttcttaccgtgttcaccaaacttgtgtccaaatagctttgggctgatgcaaaaatatctatgtggaagagaagagttgttctcatggagggccttcagatgagtgctatagactctctaggcaactccaagaggcttctcaagcagggtgggcagtgagagctgctatggaatcaatggacaaactgacagggactgctttgaaagacagtactcagttgagtatatatattctctcttaagggctaaaagtttataatcatcccttaaacactctgtgatgggatcttcaggatcatcttttgaagtaaactatattttacaatgtgatat

SEQ ID NO: 3132 - protein, 33 aa, Homosapiens
MLYSPFLSFCFWFQSSLYIGGCFKARVVFIHFY

SEQ ID NO: 3133 - DNA, 1564 bp, Homosapiens
cgcctgctcgtcacggaagagactgtcttgagagcacaggtctgttgcagcgtgggaaagcctgcgttaccactgcgcaatggctagactgaaacgtgcgcctttgcagtggatctcccagctcttctgagggagagggatttgaatcttgttgctttagtagcatcttctggaaggaggtcgtttacgtaaattctgttccaaagctctgtcgtaactgcttctaaaatgaggttgatactaaacctctgtagaggagcaggatgcaaccgacaggctgtggccggacagctgctgcccagcacatggagcctgcacgcgcacggtttggccaaagaagcccccatactcccggtgaaaaagatttccagaagctgttctgtcaataacaaagtctcaaagaaaaccacaaaaccaccaacactaagatcattcttgagtccaatttgaaaaactagggtcaagttctgcagaggcattgaaaggacaagaaaccaccctgatacccatcgtgtgagggaaaatgctctattcaccattcctcagcttctgcttctggtttcagagttctctctatattggagggtgttttaaagctagagtggtctttatccacttttattaacacatctgaatgtgaaggtcaagagaggaaagtgatatgtcctaagtcagagtagagtcaacaagaaaataagacaaacagcgactgagcccctggtgtatactgggcattggccagctactggggatatggagatgaagaaaacataacccttcttcaaggagcccaacctaccaaggtagacagacatatagacaaatagatacttgcatagaaaaaaagaggaaaaggggatcagtgtgacctgtgtaactaagtaccctataaaccctcctgcaacagatcatattgccctttatagtggggatggtaatcccatctgaattccacaggtactttgcagtcataccacacccatgtgtctgtcggtcctgactgtaccatttataaacagcttcactttcagcagttctcagccctcttaagctagggtcattgtcagtagggatactgcttcataagcaccagcagaacaccaaaggagaccatatgggtgaaagcaaccagcactgccctggcgcttcataggttcttagagtttttatcttttactttcagtctaacacagcactgcctgctttttgtttttgttgcttggtttgtttttttcttaccgtgttcaccaaacttgtgtccaaatagctttgggctgatgcaaaaatatctatgtggaagagaagagttgttctcatggagggccttcagatgagtgctatagactctctaggcaactccaagaggcttctcaagcagggtgggcagtgagagctgctatggaatcaatggacaaactgacagggactgctttgaaagacagtactcagttgagtatatatattctctcttaagggctaaaagtttataatcatcccttaaacactctgtgatgggatcttcaggatcatcttttgaagtaaactatattttacaatgtgatat

SEQ ID NO: 3134 - protein, 73 aa, Homosapiens; identical to SEQ ID NO: 3118

SEQ ID NO: 3135 - DNA, 1580 bp, Homosapiens
gctcccggaggcggcggcggaggcggaggcccggagttgggccgggacgggatccgggaggcttctgagccggagcaggcagcgcctggcttcttggaaagagcaggaaggagcgcgagaatgcagttccgcggcagaaacctctgtagaggagcaggatgcaaccgacaggctgtggccggacagctgctgcccagcacatggagcctgcacgcgcacggtttggccaaagaagcccccatactcccggtgaaaaagatggagtcttgctctgttgcccaggctggagtacaatgatgtgttctcagctcactgcaacctccctctcccaggttcaagtgatctcctgcctcagcctctggagtagctgggattacagatttccagaagctgttctgtcaataacaaagtctcaaagaaaaccacaaaaccaccaacactaagatcattcttgagtccaatttgaaaaactagggtcaagttctgcagaggcattgaaaggacaagaaaccaccctgatacccatcgtgtgagggaaaatgctctattcaccattcctcagcttctgcttctggtttcagagttctctctatattggagggtgttttaaagctagagtggtctttatccacttttattaacacatctgaatgtgaaggtcaagagaggaaagtgatatgtcctaagtcagagtagagtcaacaagaaaataagacaaacagcgactgagcccctggtgtatactgggcattggccagctactggggatatggagatgaagaaaacataacccttcttcaaggagcccaacctaccaaggtagacagacatatagacaaatagatacttgcatagaaaaaaagaggaaaaggggatcagtgtgacctgtgtaactaagtaccctataaaccctcctgcaacagatcatattgccctttatagtggggatggtaatcccatctgaattccacaggtactttgcagtcataccacacccatgtgtctgtcggtcctgactgtaccatttataaacagcttcactttcagcagttctcagccctcttaagctagggtcattgtcagtagggatactgcttcataagcaccagcagaacaccaaaggagaccatatgggtgaaagcaaccagcactgccctggcgcttcataggttcttagagtttttatcttttactttcagtctaacacagcactgcctgctttttgtttttgttgcttggtttgtttttttcttaccgtgttcaccaaacttgtgtccaaatagctttgggctgatgcaaaaatatctatgtggaagagaagagttgttctcatggagggccttcagatgagtgctatagactctctaggcaactccaagaggcttctcaagcagggtgggcagtgagagctgctatggaatcaatggacaaactgacagggactgctttgaaagacagtactcagttgagtatatatattctctcttaagggctaaaagtttataatcatcccttaaacactctgtgatgggatcttcaggatcatcttttgaagtaaactatattttacaatgtgatat

SEQ ID NO: 3136 - protein, 94 aa, Homosapiens; identical to SEQ ID NO: 3120

SEQ ID NO: 3137 - DNA, 1989 bp, Homosapiens
gccgcccaggcccgccggctagcaggcggaagaggcggcgccggcgggacgcggctcggggctcccggaggcggcggcggaggcggaggcccggagttgggccgggacgggatccgggaggcttctgagccggagcaggcagcgcctggaggccagaggccgttcgcccgcctcaggccggtcggccgccgctcccctcccctgcgccctgttcccggcagggccagagaggccgccgcctccgcccggtggttctcgggcgaagggaagccgcgaagcaggtcctggggaagagctcgcctgctcctgagggaagcagcgataagatggcgctttgaaggggagccgaggccgagtcactctgttcgtcgggacgccgcctttctaacgccgccgtcggctcgcaccactctgggcctgctgcccacactgactgcggggtccgggagagcgggatgctggccggccgcgcctggcttcttggaaagagcaggaaggagcgcgagaatgcagttccgcggcaggtgctcatcccagcagcttcgggctctcggttgtggtttttacacctatgacaaatgacatggccaaacacaccataatgtctgaaggtacaggtagccctaagcgcctgctcgtcacggaagagactgtcttgagagcacagaaacctctgtagaggagcaggatgcaaccgacaggctgtggccggacagctgctgcccagcacatggagcctgcacgcgcacggtttggccaaagaagcccccatactcccggtgaaaaagatttccagaagctgttctgtcaataacaaagtctcaaagaaaaccacaaaaccaccaacactaagatcattcttgagtccaatttgaaaaactagggtcaagttctgcagaggcattgaaaggacaagaaaccaccctgatacccatcgtgtgagggaaaatgctctattcaccattcctcagcttctgcttctggtttcagagttctctctatattggagggtgttttaaagctagagtggtctttatccacttttattaacacatctgaatgtgaaggtcaagagaggaaagtgatatgtcctaagtcagagtagagtcaacaagaaaataagacaaacagcgactgagcccctggtgtatactgggcattggccagctactggggatatggagatgaagaaaacataacccttcttcaaggagcccaacctaccaaggtagacagacatatagacaaatagatacttgcatagaaaaaaagaggaaaaggggatcagtgtgacctgtgtaactaagtaccctataaaccctcctgcaacagatcatattgccctttatagtggggatggtaatcccatctgaattccacaggtactttgcagtcataccacacccatgtgtctgtcggtcctgactgtaccatttataaacagcttcactttcagcagttctcagccctcttaagctagggtcattgtcagtagggatactgcttcataagcaccagcagaacaccaaaggagaccatatgggtgaaagcaaccagcactgccctggcgcttcataggttcttagagtttttatcttttactttcagtctaacacagcactgcctgctttttgtttttgttgcttggtttgtttttttcttaccgtgttcaccaaacttgtgtccaaatagctttgggctgatgcaaaaatatctatgtggaagagaagagttgttctcatggagggccttcagatgagtgctatagactctctaggcaactccaagaggcttctcaagcagggtgggcagtgagagctgctatggaatcaatggacaaactgacagggactgctttgaaagacagtactcagttgagtatatatattctctcttaagggctaaaagtttataatcatcccttaaacactctgtgatgggatcttcaggatcatcttttgaagtaaactatattttacaatgtgatat

SEQ ID NO: 3138 - protein, 41 aa, Homosapiens; identical to SEQ ID NO: 3122

SEQ ID NO: 3139 - DNA, 2110 bp, Homosapiens
gccgcccaggcccgccggctagcaggcggaagaggcggcgccggcgggacgcggctcggggctcccggaggcggcggcggaggcggaggcccggagttgggccgggacgggatccgggaggcttctgagccggagcaggcagcgcctggaggccagaggccgttcgcccgcctcaggccggtcggccgccgctcccctcccctgcgccctgttcccggcagggccagagaggccgccgcctccgcccggtggttctcgggcgaagggaagccgcgaagcaggtcctggggaagagctcgcctgctcctgagggaagcagcgataagatggcgctttgaaggggagccgaggccgagtcactctgttcgtcgggacgccgcctttctaacgccgccgtcggctcgcaccactctgggcctgctgcccacactgactgcggggtccgggagagcgggatgctggccggccgcgcctggcttcttggaaagagcaggaaggagcgcgagaatgcagttccgcggcaggtgctcatcccagcagcttcgggctctcggttgtggtttttacacctatgacaaatgacatggccaaacacaccataatgtctgaaggtacaggtagccctaagcgcctgctcgtcacggaagagactgtcttgagagcacagaaacctctgtagaggagcaggatgcaaccgacaggctgtggccggacagctgctgcccagcacatggagcctgcacgcgcacggtttggccaaagaagcccccatactcccggtgaaaaagatggagtcttgctctgttgcccaggctggagtacaatgatgtgttctcagctcactgcaacctccctctcccaggttcaagtgatctcctgcctcagcctctggagtagctgggattacagatttccagaagctgttctgtcaataacaaagtctcaaagaaaaccacaaaaccaccaacactaagatcattcttgagtccaatttgaaaaactagggtcaagttctgcagaggcattgaaaggacaagaaaccaccctgatacccatcgtgtgagggaaaatgctctattcaccattcctcagcttctgcttctggtttcagagttctctctatattggagggtgttttaaagctagagtggtctttatccacttttattaacacatctgaatgtgaaggtcaagagaggaaagtgatatgtcctaagtcagagtagagtcaacaagaaaataagacaaacagcgactgagcccctggtgtatactgggcattggccagctactggggatatggagatgaagaaaacataacccttcttcaaggagcccaacctaccaaggtagacagacatatagacaaatagatacttgcatagaaaaaaagaggaaaaggggatcagtgtgacctgtgtaactaagtaccctataaaccctcctgcaacagatcatattgccctttatagtggggatggtaatcccatctgaattccacaggtactttgcagtcataccacacccatgtgtctgtcggtcctgactgtaccatttataaacagcttcactttcagcagttctcagccctcttaagctagggtcattgtcagtagggatactgcttcataagcaccagcagaacaccaaaggagaccatatgggtgaaagcaaccagcactgccctggcgcttcataggttcttagagtttttatcttttactttcagtctaacacagcactgcctgctttttgtttttgttgcttggtttgtttttttcttaccgtgttcaccaaacttgtgtccaaatagctttgggctgatgcaaaaatatctatgtggaagagaagagttgttctcatggagggccttcagatgagtgctatagactctctaggcaactccaagaggcttctcaagcagggtgggcagtgagagctgctatggaatcaatggacaaactgacagggactgctttgaaagacagtactcagttgagtatatatattctctcttaagggctaaaagtttataatcatcccttaaacactctgtgatgggatcttcaggatcatcttttgaagtaaactatattttacaatgtgatat

SEQ ID NO: 3140 - protein, 94 aa, Homosapiens; identical to SEQ ID NO: 3120

SEQ ID NO: 3141 - DNA, 1846 bp, Homosapiens
gccgcccaggcccgccggctagcaggcggaagaggcggcgccggcgggacgcggctcggggctcccggaggcggcggcggaggcggaggcccggagttgggccgggacgggatccgggaggcttctgagccggagcaggcagcgcctggaggccagaggccgttcgcccgcctcaggccggtcggccgccgctcccctcccctgcgccctgttcccggcagggccagagaggccgccgcctccgcccggtggttctcgggcgaagggaagccgcgaagcaggtcctggggaagagctcgcctgctcctgagggaagcagcgataagatggcgctttgaaggggagccgaggccgagtcactctgttcgtcgggacgccgcctttctaacgccgccgtcggctcgcaccactctgggcctgctgcccacactgactgcggggtccgggagagcgggatgctggccggccgcgcctggcttcttggaaagagcaggaaggagcgcgagaatgcagttccgcggcagaaacctctgtagaggagcaggatgcaaccgacaggctgtggccggacagctgctgcccagcacatggagcctgcacgcgcacggtttggccaaagaagcccccatactcccggtgaaaaagatttccagaagctgttctgtcaataacaaagtctcaaagaaaaccacaaaaccaccaacactaagatcattcttgagtccaatttgaaaaactagggtcaagttctgcagaggcattgaaaggacaagaaaccaccctgatacccatcgtgtgagggaaaatgctctattcaccattcctcagcttctgcttctggtttcagagttctctctatattggagggtgttttaaagctagagtggtctttatccacttttattaacacatctgaatgtgaaggtcaagagaggaaagtgatatgtcctaagtcagagtagagtcaacaagaaaataagacaaacagcgactgagcccctggtgtatactgggcattggccagctactggggatatggagatgaagaaaacataacccttcttcaaggagcccaacctaccaaggtagacagacatatagacaaatagatacttgcatagaaaaaaagaggaaaaggggatcagtgtgacctgtgtaactaagtaccctataaaccctcctgcaacagatcatattgccctttatagtggggatggtaatcccatctgaattccacaggtactttgcagtcataccacacccatgtgtctgtcggtcctgactgtaccatttataaacagcttcactttcagcagttctcagccctcttaagctagggtcattgtcagtagggatactgcttcataagcaccagcagaacaccaaaggagaccatatgggtgaaagcaaccagcactgccctggcgcttcataggttcttagagtttttatcttttactttcagtctaacacagcactgcctgctttttgtttttgttgcttggtttgtttttttcttaccgtgttcaccaaacttgtgtccaaatagctttgggctgatgcaaaaatatctatgtggaagagaagagttgttctcatggagggccttcagatgagtgctatagactctctaggcaactccaagaggcttctcaagcagggtgggcagtgagagctgctatggaatcaatggacaaactgacagggactgctttgaaagacagtactcagttgagtatatatattctctcttaagggctaaaagtttataatcatcccttaaacactctgtgatgggatcttcaggatcatcttttgaagtaaactatattttacaatgtgatat

SEQ ID NO: 3142 - protein, 74 aa, Homosapiens; identical to SEQ ID NO: 3126

SEQ ID NO: 3143 - DNA, 1967 bp, Homosapiens
gccgcccaggcccgccggctagcaggcggaagaggcggcgccggcgggacgcggctcggggctcccggaggcggcggcggaggcggaggcccggagttgggccgggacgggatccgggaggcttctgagccggagcaggcagcgcctggaggccagaggccgttcgcccgcctcaggccggtcggccgccgctcccctcccctgcgccctgttcccggcagggccagagaggccgccgcctccgcccggtggttctcgggcgaagggaagccgcgaagcaggtcctggggaagagctcgcctgctcctgagggaagcagcgataagatggcgctttgaaggggagccgaggccgagtcactctgttcgtcgggacgccgcctttctaacgccgccgtcggctcgcaccactctgggcctgctgcccacactgactgcggggtccgggagagcgggatgctggccggccgcgcctggcttcttggaaagagcaggaaggagcgcgagaatgcagttccgcggcagaaacctctgtagaggagcaggatgcaaccgacaggctgtggccggacagctgctgcccagcacatggagcctgcacgcgcacggtttggccaaagaagcccccatactcccggtgaaaaagatggagtcttgctctgttgcccaggctggagtacaatgatgtgttctcagctcactgcaacctccctctcccaggttcaagtgatctcctgcctcagcctctggagtagctgggattacagatttccagaagctgttctgtcaataacaaagtctcaaagaaaaccacaaaaccaccaacactaagatcattcttgagtccaatttgaaaaactagggtcaagttctgcagaggcattgaaaggacaagaaaccaccctgatacccatcgtgtgagggaaaatgctctattcaccattcctcagcttctgcttctggtttcagagttctctctatattggagggtgttttaaagctagagtggtctttatccacttttattaacacatctgaatgtgaaggtcaagagaggaaagtgatatgtcctaagtcagagtagagtcaacaagaaaataagacaaacagcgactgagcccctggtgtatactgggcattggccagctactggggatatggagatgaagaaaacataacccttcttcaaggagcccaacctaccaaggtagacagacatatagacaaatagatacttgcatagaaaaaaagaggaaaaggggatcagtgtgacctgtgtaactaagtaccctataaaccctcctgcaacagatcatattgccctttatagtggggatggtaatcccatctgaattccacaggtactttgcagtcataccacacccatgtgtctgtcggtcctgactgtaccatttataaacagcttcactttcagcagttctcagccctcttaagctagggtcattgtcagtagggatactgcttcataagcaccagcagaacaccaaaggagaccatatgggtgaaagcaaccagcactgccctggcgcttcataggttcttagagtttttatcttttactttcagtctaacacagcactgcctgctttttgtttttgttgcttggtttgtttttttcttaccgtgttcaccaaacttgtgtccaaatagctttgggctgatgcaaaaatatctatgtggaagagaagagttgttctcatggagggccttcagatgagtgctatagactctctaggcaactccaagaggcttctcaagcagggtgggcagtgagagctgctatggaatcaatggacaaactgacagggactgctttgaaagacagtactcagttgagtatatatattctctcttaagggctaaaagtttataatcatcccttaaacactctgtgatgggatcttcaggatcatcttttgaagtaaactatattttacaatgtgatat

SEQ ID NO: 3144 - protein, 94 aa, Homosapiens; identical to SEQ ID NO: 3120

SEQ ID NO: 3145 - DNA, 2768 bp, Homosapiens
gctatcattttaggcttaactaccaccatctcctcgcgggcagtgggggcaaccgcgaagacagaatttcacaaactttcagctccagcagtttcaaggaaatgtcaaatgacaagatggaagaccgagtgtcaagagctaagacaacaaaaaggcccccaaaatttgttttcaagaaaaccaatgaaaaaagcaagcaatcagaacgtgaagtccaggatcatggatgtgcttatcttcacagtcactgctgggtcctgaagttctcctctggcccagtgccagctgcgaagccctctgccaaagggccagaggaggccggtgatatagagctctgattacccacccgtcagggcaccgctgaaggtcactgaatacttactgtgcacccgaaaaataaatcctgcgagttcacgcccgcgtagttcgccccctgattttgagcgactcctttcgcatgggatctacaaaaccgaactgccttaaagacctctttcacacggacgtgaagtcacagaactgacaaaatcccatcctgtcaaagtgcacgggtctttgaaatctaacacaaaaagccatagaaagattctctaaacaccctgtactaagaggaacacggacagggcactgcgttctgaagtagaggccagggcactggcccttagacacgtctcgctgtcaccgggctaacaacattggcaagggcggcggcagcagcactgatatttgcagcccccaagggctctggcgaaaccccctctattactctgtatcctgcctgcttccaagatgaacctgttgctgggaaagaacaggctaaattagaaaagggagtattttgtcaaagttgaaggtgagtgatagcctgcccgcctcaaataggatgggaaaaactaaggatattggggatgatgacactgtcgcctccgaattctggtccggggctctctcccagccctcaagtgtccccacgcggccgcggaccccgaacagggacagctggagacgggcttgggcagcgcgcggcctgcacccgcggccatccatcttgcagcccggcccggccaggctatcccgggcaagggctgggggaactcgctgcccccagcgccgccacggccgggcgacattctgcgccctgggaagggggataggggtgcggcgcggccccggtccccggcccgcccggatccccggcctcaccttgacgtggaagcggatgagcgccaggcggatgcagtgggccatgcagacgggcggcaggaaccagacctttggcggcggggtgcccttgttctggacatggctgacgatctgctgtgccgtctggcgctcgttgccctgccgcttgacccactcgtgcagccgggccttctcgagcgcgccgttgaagaagacgaagagctcgatgttgccgccgaagcaggccttggccagcgccgccagaaacctctgtagaggagcaggatgcaaccgacaggctgtggccggacagctgctgcccagcacatggagcctgcacgcgcacggtttggccaaagaagcccccatactcccggtgaaaaagatttccagaagctgttctgtcaataacaaagtctcaaagaaaaccacaaaaccaccaacactaagatcattcttgagtccaatttgaaaaactagggtcaagttctgcagaggcattgaaaggacaagaaaccaccctgatacccatcgtgtgagggaaaatgctctattcaccattcctcagcttctgcttctggtttcagagttctctctatattggagggtgttttaaagctagagtggtctttatccacttttattaacacatctgaatgtgaaggtcaagagaggaaagtgatatgtcctaagtcagagtagagtcaacaagaaaataagacaaacagcgactgagcccctggtgtatactgggcattggccagctactggggatatggagatgaagaaaacataacccttcttcaaggagcccaacctaccaaggtagacagacatatagacaaatagatacttgcatagaaaaaaagaggaaaaggggatcagtgtgacctgtgtaactaagtaccctataaaccctcctgcaacagatcatattgccctttatagtggggatggtaatcccatctgaattccacaggtactttgcagtcataccacacccatgtgtctgtcggtcctgactgtaccatttataaacagcttcactttcagcagttctcagccctcttaagctagggtcattgtcagtagggatactgcttcataagcaccagcagaacaccaaaggagaccatatgggtgaaagcaaccagcactgccctggcgcttcataggttcttagagtttttatcttttactttcagtctaacacagcactgcctgctttttgtttttgttgcttggtttgtttttttcttaccgtgttcaccaaacttgtgtccaaatagctttgggctgatgcaaaaatatctatgtggaagagaagagttgttctcatggagggccttcagatgagtgctatagactctctaggcaactccaagaggcttctcaagcagggtgggcagtgagagctgctatggaatcaatggacaaactgacagggactgctttgaaagacagtactcagttgagtatatatattctctcttaagggctaaaagtttataatcatcccttaaacactctgtgatgggatcttcaggatcatcttttgaagtaaactatattttacaatgtgatat

SEQ ID NO: 3146 - protein, 256 aa, Homosapiens; identical to SEQ ID NO: 3130

SEQ ID NO: 3147 - DNA, 786 bp, Homosapiens
gccgcccaggcccgccggctagcaggcggaagaggcggcgccggcgggacgcggctcggggctcccggaggcggcggcggaggcggaggcccggagttgggccgggacgggatccgggaggcttctgagccggagcaggcagcgcctggaggccagaggccgttcgcccgcctcaggccggtcggccgccgctcccctcccctgcgccctgttcccggcagggccagagaggccgccgcctccgcccggtggttctcgggcgaagggaagccgcgaagcaggtcctggggaagagctcgcctgctcctgagggaagcagcgataagatggcgctttgaaggggagccgaggccgagtcactctgttcgtcgggacgccgcctttctaacgccgccgtcggctcgcaccactctgggcctgctgcccacactgactgcggggtccgggagagcgggatgctggccggccgcgcctggcttcttggaaagagcaggaaggagcgcgagaatgcagttccgcggcaggtgctcatcccagcagcttcgggctctcggttgtggtttttacacctatgacaaatgacatggccaaacacaccataatgtctgaaggtacaggtagccctaagcgcctgctcgtcacggaagagactgtcttgagagcacagaaacctctgtagaggagcaggatgcaaccgacaggctgtggccggacagctgctgcccagcacatggagcctgcacgcgcacggtttggccaaagaagcccccatactcccggtgaaaa

SEQ ID NO: 3148 - protein, 35 aa, Homosapiens
MTNDMAKHTIMSEGTGSPKRLLVTEETVLRAQKPL

SEQ ID NO: 3149 - DNA, 695 bp, Homosapiens
gccgcccaggcccgccggctagcaggcggaagaggcggcgccggcgggacgcggctcggggctcccggaggcggcggcggaggcggaggcccggagttgggccgggacgggatccgggaggcttctgagccggagcaggcagcgcctggaggccagaggccgttcgcccgcctcaggccggtcggccgccgctcccctcccctgcgccctgttcccggcagggccagagaggccgccgcctccgcccggtggttctcgggcgaagggaagccgcgaagcaggtcctggggaagagctcgcctgctcctgagggaagcagcgataagatggcgctttgaaggggagccgaggccgagtcactctgttcgtcgggacgccgcctttctaacgccgccgtcggctcgcaccactctgggcctgctgcccacactgactgcggggtccgggagagcgggatgctggccggccgcgcctggcttcttggaaagagcaggaaggagcgcgagaatgcagttccgcggcaggtgctcatcccagcagcttcgggctctcggttgtggtttttacacctatgacaaatgacatggccaaacacaccataatgtctgaagaaacctctgtagaggagcaggatgcaaccgacaggctgtggccggacagctgctgcccagcacatggagcctgcacgcgcacgg

SEQ ID NO: 3150 - protein, 40 aa, Homosapiens
MTNDMAKHTIMSEETSVEEQDATDRLWPDSCCPAHGACTR

SEQ ID NO: 3151 - DNA, 301 bp, Homosapiens
aagagactgtcttgagagcacaggtctgttgcagcgtgggaaagcctgcgttaccactgcgcaatggctagactgaaacgtgcgcctttgcagtggatctcccagctcttctgagggagagggatttgaatcttgttgctttagtagcatcttctggaaggaggtcgtttacgtaaattctgttccaaagctctgtcgtaactgcttctaaaatgaggttgatactaaacctctgtagaggagcaggatgcaaccgacaggctgtggccggacagctgctgcccagcacatggagcctgca

SEQ ID NO: 3152 - protein, 44 aa, Homosapiens
NVRLCSGSPSSSEGEGFESCCFSSIFWKEVVYVNSVPKLCRNCF

SEQ ID NO: 3153 - DNA, 3818 bp, Homosapiens
gccccggccctcagcctcggcctcggcctcggcctcgcagcggcggcagcggcggcggcggcaggtccctccccagacatggccctgggaggcggcagcacatggcggccgcggcggccatgagcgcgcccccgacccgccccagtcccccctagaggccgccgcccccgcccgccagcccgcccgcgcgccacggccccaccacccccggccccgccgccccccgcccgcacccgcgcccgcgcccccgccgccgccatgggcgtgcagggcttccaggactacatcgagaagcactgcccgagcgccgtggtgccggtggagctgcagaagctggcccggggcagcctggtgggcggcgggcggcagcggcccccgcagaccccgctgcgcctgctggtggacgccgacaactgcctgcaccgcctctacggcggcttctacaccgactgggtcagcggcggccagtggaaccacatgcttggctacctggcggcgctggccaaggcctgcttcggcggcaacatcgagctcttcgtcttcttcaacggcgcgctcgagaaggcccggctgcacgagtgggtcaagcggcagggcaacgagcgccagacggcacagcagatcgtcagccatgtccagaacaagggcaccccgccgccaaaggtctggttcctgccgcccgtctgcatggcccactgcatccgcctggcgctcatccgcttccacgtcaaggttgcacagagcattgaggatcaccatcaggaagtgattggtttctgcagagagaatggtttccatggcttggttgcgtatgactctgattatgcactgtgcaacatcccctactatttcagtgcccatgccctaaaactgagccggaacgggaaaagtctcaccacaagccaatatctgatgcatgaagttgccaagcaactggacctgaatccaaatcgttttcctatttttgctgctctcttaggaaatcacattctgcctgatgaagatctggcttcctttcactggagtttacttggtccagaacatccactagcctcactaaaggtccgggcccaccagctggtcttgccaccttgcgacgtagtgatcaaagccgttgctgactatgtacgcaacattcaggacacctctgacttggatgccatagctaaagatgttttccagcattcacagtctagaacagatgacaaagttattcgatttaagagagcaattggatattattcagcgactagtaagcctatgtcatttcatccaccacattacttagcagccagacccggtccgtttggaatgcctgggatggtgccgccgcatgttcctcctcagatgctcaacattccgcagacctctctgcaagcaaagcccgtggccccacaggtgcccagcccagggggcgccccgggccagggtccatacccgtacagcctctctgagccagcacctctcactttggacacgagcgggaagaatctgacggagcagaacagctacagcaacattcctcacgaagggaagcacacgccgctgtatgagcggtcctcgcccatcaacccggcccagagcggcagccccaaccacgtggattccgcctacttccctggctcttctacatcgtcatcttccgacaacgacgagggcagcggaggggcgacaaaccatatcagcgggaacaagattggctgggagaagacgggaagccactcagagcctcaggcacgaggagacccaggagaccaaacaaaggcagaaggctcgtccactgcctcttcaggaagccaactagccgaaggcaagggaagccagatgggcactgtccagccaatcccgtgcctcctgtcgatgcccaccaggaaccacatggacatcaccacacctcccctgccccccgtcgcacctgaggtgctgagagtggccgagcacaggcacaagaaggggctgatgtacccctacatcttccatgtcctgacgaaggtattatcaaaggggccctggagtggcttctgttatttgatgagtggccattcctatgggtgttttgtccttttgtccttttttgaaccatttttctgtcttactaatctacttgaaacaaagttcactttcccctttctaaacattgaatgaaagatgaacatttataactgtaaatagttttaaaataactcgtgaaaagtctcacttttttccttcaacttagtatagaatattttatacttctaatgaaataatgcatcacattattttatgacttgtaattttattctttttacttcaatttcagaattttcttaaaccatatttgtgctgtaatgtcaggtttaattctgatgtcagatacaatatctggttcctttatcatttgtgcttagaaaataatgtttccccctttgaatggctcatagtgcttcatgtgttttgacttgttcatgacctcattgagtgcagttttaatagtgctaagaacaaaaaatataatacaggattttgttaacatacgcatagtcagaaaatgaaactatcattttatacagtgtcataatttcactttattagtgtcttaatgtatgcttaaatatatacatatagtgtggcatcaattattttttaatcttggtgtctcaaatgtatctatgtgtatttaaatttcctcagtgatttgtagtctttatgttggcacttttaatcttagccccacaatttaacaagttacctcagttactagattaatcctgcagaactggtttattgctatcatgtattattaacatgaatacctatatgaccatatataaccagacttttctgtctattctctacaacccatctgtggtttgtaaaatggagtcaataaatgcaataatgaactcctgttctcaaatactcctgaggtggacttcaactgttaactgactaatccaaatattgcttacttttattaattaaaggacatggaaaacatgtagccagtactatttgctcagatcctttaatttattttttagttgtaatgcctccaaatctcatctattatttgatatgggtatgcatttatagtatcacttttcagattatggttgtaaggtgaacattttatttttcaggttcaacataaattataaagggtaagtgaaaagtaattgttgtggggaaaacattttgctaagtttaaggaaccaaagttttgggaagacatctttcaaaataaggtgtgaagaaacaacactcattcctcgtggggctgtttgaaatgtaaggtccccaggagctacctgttatgtccacactgctggatctgatgcgtggatagtcggttagatctatatgagggttgcaaattgtaccgacatgctttcttatttcttatgaatttcaagggcaaatactgataaaatgaccatggttgagaaaattgtcttttcacattttaaaatgctacttaagttttttcagtttatcctataagctgaatggctctggtattaattgcccaggctaagacatttacagtgagatgcatctttatggtaatgaagagaatttgcaaagcatcatattattgagataaatattccctagatgagagtgttagaacacatgtagctactggattaatgaatatgaaagtatggagggtaaggggaaagaccagtttttaaattaaacttatgtgaatgaaagaaacagcaaatattacaaaattattatttaaagcatatatatcaatgaacttcatagacattgaggtcataaatgcattgttgtgctctgagtataattaaataaaatttgttgcatga

SEQ ID NO: 3154 - protein, 628 aa, Homosapiens
MGVQGFQDYIEKHCPSAVVPVELQKLARGSLVGGGRQRPPQTPLRLLVDADNCLHRLYGGFYTDWVSGGQWNHMLGYLAALAKACFGGNIELFVFFNGALEKARLHEWVKRQGNERQTAQQIVSHVQNKGTPPPKVWFLPPVCMAHCIRLALIRFHVKVAQSIEDHHQEVIGFCRENGFHGLVAYDSDYALCNIPYYFSAHALKLSRNGKSLTTSQYLMHEVAKQLDLNPNRFPIFAALLGNHILPDEDLASFHWSLLGPEHPLASLKVRAHQLVLPPCDVVIKAVADYVRNIQDTSDLDAIAKDVFQHSQSRTDDKVIRFKRAIGYYSATSKPMSFHPPHYLAARPGPFGMPGMVPPHVPPQMLNIPQTSLQAKPVAPQVPSPGGAPGQGPYPYSLSEPAPLTLDTSGKNLTEQNSYSNIPHEGKHTPLYERSSPINPAQSGSPNHVDSAYFPGSSTSSSSDNDEGSGGATNHISGNKIGWEKTGSHSEPQARGDPGDQTKAEGSSTASSGSQLAEGKGSQMGTVQPIPCLLSMPTRNHMDITTPPLPPVAPEVLRVAEHRHKKGLMYPYIFHVLTKVLSKGPWSGFCYLMSGHSYGCFVLLSFFEPFFCLTNLLETKFTFPFLNIE

SEQ ID NO: 3155 - DNA, 5191 bp, Homosapiens
gccccggccctcagcctcggcctcggcctcggcctcgcagcggcggcagcggcggcggcggcaggtccctccccagacatggccctgggaggcggcagcacatggcggccgcggcggccatgagcgcgcccccgacccgccccagtcccccctagaggccgccgcccccgcccgccagcccgcccgcgcgccacggccccaccacccccggccccgccgccccccgcccgcacccgcgcccgcgcccccgccgccgccatgggcgtgcagggcttccaggactacatcgagaagcactgcccgagcgccgtggtgccggtggagctgcagaagctggcccggggcagcctggtgggcggcgggcggcagcggcccccgcagaccccgctgcgcctgctggtggacgccgacaactgcctgcaccgcctctacggcggcttctacaccgactgggtcagcggcggccagtggaaccacatgcttggctacctggcggcgctggccaaggcctgcttcggcggcaacatcgagctcttcgtcttcttcaacggcgcgctcgagaaggcccggctgcacgagtgggtcaagcggcagggcaacgagcgccagacggcacagcagatcgtcagccatgtccagaacaagggcaccccgccgccaaaggtctggttcctgccgcccgtctgcatggcccactgcatccgcctggcgctcatccgcttccacgtcaaggttgcacagagcattgaggatcaccatcaggaagtgattggtttctgcagagagaatggtttccatggcttggttgcgtatgactctgattatgcactgtgcaacatcccctactatttcagtgcccatgccctaaaactgagccggaacgggaaaagtctcaccacaagccaatatctgatgcatgaagttgccaagcaactggacctgaatccaaatcgttttcctatttttgctgctctcttaggaaatcacattctgcctgatgaagatctggcttcctttcactggagtttacttggtccagaacatccactagcctcactaaaggtccgggcccaccagctggtcttgccaccttgcgacgtagtgatcaaagccgttgctgactatgtacgcaacattcaggacacctctgacttggatgccatagctaaagatgttttccagcattcacagtctagaacagatgacaaagttattcgatttaagagagcaattggatattattcagcgactagtaagcctatgtcatttcatccaccacattacttagcagccagacccggtccgtttggaatgcctgggatggtgccgccgcatgttcctcctcagatgctcaacattccgcagacctctctgcaagcaaagcccgtggccccacaggtgcccagcccagggggcgccccgggccagggtccatacccgtacagcctctctgagccagcacctctcactttggacacgagcgggaagaatctgacggagcagaacagctacagcaacattcctcacgaagggaagcacacgccgctgtatgagcggtcctcgcccatcaacccggcccagagcggcagccccaaccacgtggattccgcctacttccctggctcttctacatcgtcatcttccgacaacgacgagggcagcggaggggcgacaaaccatatcagcgggaacaagattggctgggagaagacgggaagccactcagagcctcaggcacgaggagacccaggagaccaaacaaaggcagaaggctcgtccactgcctcttcaggaagccaactagccgaaggcaagggaagccagatgggcactgtccagccaatcccgtgcctcctgtcgatgcccaccaggaaccacatggacatcaccacacctcccctgccccccgtcgcacctgaggtgctgagagtggccgagcacaggcacaagaaggggctgatgtacccctacatcttccatgtcctgacgaagggtgaaatcaaaattgctgtttctattgaagatgaagccaacaaggacctgcctccggccgctctgctctataggccagttcgtcagtatgtttacggagtcctgtttagtttggcagaaagcagaaagaaaactgagagacttgcttttagaaagaacagacttccaccagaattttcaccagtgatcattaaagaatgggcagcttacaaaggaaagtctcctcaaaccccggaactggttgaagctcttgccttcagggagtggacctgccccaacctgaagaggctgtggttgggtaaggcggtagaggacaagaaccgcaggatgagggccttcctggcctgcatgaggtcggacaccccagccatgctcaaccctgccaacgtgcccactcacctcatggtgctctgctgcgtcttacggtacatggtgcagtggccgggagcacgcatccttcggcgtcaggagctagatgccttcctggctcaggcgctgtcccccaaactctacgagcctgatcagctccaggagctcaagattgagaacctagatccccgaggaattcagctatcagctctcttcatgagtggagtagacatggccttgtttgcaaatgatgcatgcggacagccaatcccctgggaacactgttgtccttggatgtattttgatgggaagctcttccaatccaaactcctcaaagccagccgggaaaagaccccactcattgacctctgtgatggtcaggctgatcaggctgccaaggtagagaagatgcgccagagcgtcctcgaggggctcagcttctccaggcagagccacacgctccctttcccgccgccacctgccctgcccttctaccctgcctctgcgtacccccggcactttgggcctgtcccaccctctcagggcaggggcagaggctttgcaggcgtctgtggctttggaggcccctatggggaaacggtagcaacaggcccttaccgtgccttccgtgtggcggcagcatcgggacactgcggagccttctcaggcagtgacagcagcaggactagcaagtcccagggcggagtccaacctataccttctcagggaggcaaactagaaatagctggcactgtggttggccattgggctgggagcaggcggggccgtgggggccgggggcctttccccctgcaggtggtttctgtcggaggaccagctagagggcgtccaagaggagttatttccaccccagtgattagaacatttggaagaggtggaaggtactatggcagaggttacaaaaaccaggcagcaattcagggcagacctccttatgctgcttcagcagaagaagtggccaaagaacttaagtcaaaatctggggaatcgaagtcctctgctatgtcttcagacgggtccctggctgaaaacggagtgatggccgaggagaagccggctccccagatgaacgggagcacgggtgacgccagggcccccagccactctgaaagtgccttgaataatgactctaaaacgtgcaatacaaatcctcatttaaatgcactaagtacagacagcgcttgccgcagagaagctgctctggaggcagctgtcttaaataaagaagagtaaacttattttttatagagggtgaaggatgctggaagggtaaggatttaggaatatctggagagaaagagagcctgcagttatgtacattttgtcctttccgtaagagaaaaatgaggactttggaaattcagatccctctttgatatcagagatttaaacaacacatttttagttttaaccagttgtagtcaaaatgctacaataaaacaaaaaagagaaagaaaatgaagagcatttgactcccgcacttaaaatgaagtacacataaagtttaaactggttatgacaaaagcctttagttgtgtttcttgaactataaagaaaacaaattttggcagtctttaagtatatatagcttaaaatataatttttagcatttggcaccatatgtatgccattatatttgattttgcattactgtttcacaatgaagctttctttaaggctttgatttttatgattatgaaagaaataaggcacaaccacagtttttctttcttaaatttcatcactgttgatgtggttcttttgtgttaaaaaaaaaaagtgcaactatcaaaactaaaaaattatagagtaatattgccgttctgctgattttaaatatacaatacatcatacatactttacaagcaagttaaatggagataaagttgaaatcatagaagatgcaaatgacctttcaaaatcaacacaatgtgttctgaaactttcgtgactaataccatgcatctgtgatcaatgaactatgtggttttgaatcggatgtagaccattagtactactacttgagctaaacttctgcatggttcataatttttaaagtgtgtagttaatatgcatgttatcgtcctttcttccattcttaacagtatgtgcccatttgcaaaacaaaaatgctaataatcagtaatagtcctataaaagatgttaactctgtttagtcattgactgatcttgctctaaccttaaaattttgtgattattgacctctgttgcatttattctaaagccccccaaaaattatctagccgtttcgaatatcaacattaccctggtgtattcactgctgtatgcattattgttctttgttgctgttttatgccttcatattagcaaatatgaaattctgtgaaaaaaaaccctttgatcttaaaaaaaaaaaaaccaccccccccttctgtagcaggaaacaaattgcttgttcttgagaactttcccatcaagaatttagtagaagcaggtatacttctatcattttgatgtttttgttaatgtttccaaacaatgtactttgaaatcagaatcacttcttatcgttttcatatacttctgatgctcttcatcacattagtgatcagaaatgaggtgtaattccccaacccctgcccgcaagagctaagtaggatcttactgtaagttgaagggagttttgccctaactcatggattgtgcaagaatgaactgctgttgggtttgattgactgtcgatggattgtggtgtggtgtatctgaaggctattgaatgcaacttacaatgcttaataaaaatctttattcttttagtataaagtat

SEQ ID NO: 3156 - protein, 1118 aa, Homosapiens; identical to SEQ ID NO: 416

SEQ ID NO: 3157 - DNA, 5476 bp, Homosapiens
gccccggccctcagcctcggcctcggcctcggcctcgcagcggcggcagcggcggcggcggcaggtccctccccagacatggccctgggaggcggcagcacatggcggccgcggcggccatgagcgcgcccccgacccgccccagtcccccctagaggccgccgcccccgcccgccagcccgcccgcgcgccacggccccaccacccccggccccgccgccccccgcccgcacccgcgcccgcgcccccgccgccgccatgggcgtgcagggcttccaggactacatcgagaagcactgcccgagcgccgtggtgccggtggagctgcagaagctggcccggggcagcctggtgggcggcgggcggcagcggcccccgcagaccccgctgcgcctgctggtggacgccgacaactgcctgcaccgcctctacggcggcttctacaccgactgggtcagcggcggccagtggaaccacatgcttggctacctggcggcgctggccaaggcctgcttcggcggcaacatcgagctcttcgtcttcttcaacggcgcgctcgagaaggcccggctgcacgagtgggtcaagcggcagggcaacgagcgccagacggcacagcagatcgtcagccatgtccagaacaagggcaccccgccgccaaaggtctggttcctgccgcccgtctgcatggcccactgcatccgcctggcgctcatccgcttccacgtcaaggttgcacagagcattgaggatcaccatcaggaagtgattggtttctgcagagagaatggtttccatggcttggttgcgtatgactctgattatgcactgtgcaacatcccctactatttcagtgcccatgccctaaaactgagccggaacgggaaaagtctcaccacaagccaatatctgatgcatgaagttgccaagcaactggacctgaatccaaatcgttttcctatttttgctgctctcttaggaaatcacattctgcctgatgaagatctggcttcctttcactggagtttacttggtccagaacatccactagcctcactaaaggtccgggcccaccagctggtcttgccaccttgcgacgtagtgatcaaagccgttgctgactatgtacgcaacattcaggacacctctgacttggatgccatagctaaagatgttttccagcattcacagtctagaacagatgacaaagttattcgatttaagagagcaattggatattattcagcgactagtaagcctatgtcatttcatccaccacattacttagcagccagacccggtccgtttggaatgcctgggatggtgccgccgcatgttcctcctcagatgctcaacattccgcagacctctctgcaagcaaagcccgtggccccacaggtgcccagcccagggggcgccccgggccagggtccatacccgtacagcctctctgagccagcacctctcactttggacacgagcgggaagaatctgacggagcagaacagctacagcaacattcctcacgaagggaagcacacgccgctgtatgagcggtcctcgcccatcaacccggcccagagcggcagccccaaccacgtggattccgcctacttccctggctcttctacatcgtcatcttccgacaacgacgagggcagcggaggggcgacaaaccatatcagcgggaacaagattggctgggagaagacgggaagccactcagagcctcaggcacgaggagacccaggagaccaaacaaaggcagaaggctcgtccactgcctcttcaggaagccaactagccgaaggcaagggaagccagatgggcactgtccagccaatcccgtgcctcctgtcgatgcccaccaggaaccacatggacatcaccacacctcccctgccccccgtcgcacctgaggtgctgagagtggccgagcacaggcacaagaaggggctgatgtacccctacatcttccatgtcctgacgaagggtgaaatcaaaattgctgtttctattgaagatgaagccaacaaggacctgcctccggccgctctgctctataggccagttcgtcagtatgtttacggagtcctgtttagtttggcagaaagcagaaagaaaactgagagacttgcttttagaaagaacagacttccaccagaattttcaccagtgatcattaaagaatgggcagcttacaaaggaaagtctcctcaaaccccggaactggttgaagctcttgccttcagggagtggacctgccccaacctgaagaggctgtggttgggtaaggcggtagaggacaagaaccgcaggatgagggccttcctggcctgcatgaggtcggacaccccagccatgctcaaccctgccaacgtgcccactcacctcatggtgctctgctgcgtcttacggtacatggtgcagtggccgggagcacgcatccttcggcgtcaggagctagatgccttcctggctcaggcgctgtcccccaaactctacgagcctgatcagctccaggagctcaagattgagaacctagatccccgaggaattcagctatcagctctcttcatgagtggagtagacatggccttgtttgcaaatgatgcatgcggacagccaatcccctgggaacactgttgtccttggatgtattttgatgggaagctcttccaatccaaactcctcaaagccagccgggaaaagaccccactcattgacctctgtgatggtcaggctgatcaggctgccaaggtagagaagatgcgccagagcgtcctcgaggggctcagcttctccaggcagagccacacgctccctttcccgccgccacctgccctgcccttctaccctgcctctgcgtacccccggcactttgggcctgtcccaccctctcagggcaggggcagaggctttgcaggcgtctgtggctttggaggcccctatggggaaacggtagcaacaggcccttaccgtgccttccgtgtggcggcagcatcgggacactgcggagccttctcaggcagtgacagcagcaggactagcaagtcccagggcggagtccaacctataccttctcagggaggcaaactagaaatagctggcactgtggttggccattgggctgggagcaggcggggccgtgggggccgggggcctttccccctgcaggtggtttctgtcggaggaccagctagagggcgtccaagaggagttatttccaccccagtgattagaacatttggaagaggtggaaggtactatggcagaggttacaaaaaccaggcagcaattcagggcagacctccttatgctgcttcagcagaagaagtggccaaagaacttaagtcaaaatctggggaatcgaagtcctctgctatgtcttcagacgggtccctggctgaaaacggagtgatggccgaggagaagccggctccccagatgaacgggagcacgggtgacgccagggcccccagccactctgaaagtgccttgaataatgactctaaaacgtgcaatacaaatcctcatttaaatgcactaagtacagacagcgcttgccgcagagaagctgctctggaggcagctgtcttaaataaagaagagtaaacttattttttatagagggtgaaggatgctggaagggtaaggatttaggaatatctggagagaaagagagcctgcagttatgtacattttgtcctttccgtaagagaaaaatgaggactttggaaattcagatccctctttgatatcagagatttaaacaacacatttttagttttaaccagttgtagtcaaaatgctacaataaaacaaaaaagagaaagaaaatgaagagcatttgactcccgcacttaaaatgaagtacacataaagtttaaactggttatgacaaaagcctttagttgtgtttcttgaactataaagaaaacaaattttggcagtctttaagtatatatagcttaaaatataatttttagcatttggcaccatatgtatgccattatatttgattttgcattactgtttcacaatgaagctttctttaaggctttgatttttatgattatgaaagaaataaggcacaaccacagtttttctttcttaaatttcatcactgttgatgtggttcttttgtgttaaaaaaaaaaagtgcaactatcaaaactaaaaaattatagagtaatattgccgttctgctgattttaaatatacaatacatcatacatactttacaagcaagttaaatggagataaagttgaaatcatagaagatgcaaatgacctttcaaaatcaacacaatgtgttctgaaactttcgtgactaataccatgcatctgtgatcaatgaactatgtggttttgaatcggatgtagaccattagtactactacttgagctaaacttctgcatggttcataatttttaaagtgtgtagttaatatgcatgttatcgtcctttcttccattcttaacagtatgtgcccatttgcaaaacaaaaatgctaataatcagtaatagtcctataaaagatgttaactctgtttagtcattgactgatcttgctctaaccttaaaattttgtgattattgacctctgttgcatttattctaaagccccccaaaaattatctagccgtttcgaatatcaacattaccctggtgtattcactgctgtatgcattattgttctttgttgctgttttatgccttcatattagcaaatatgaaattctgtgaaaaaaaaccctttgatcttaaaaaaaaaaaaaccaccccccccttctgtagcaggaaacaaattgcttgttcttgagaactttcccatcaagaatttagtagaagcaggtatacttctatcattttgatgtttttgttaatgtttccaaacaatgtactttgaaatcagaatcacttcttatcgttttcatatacttctgatgctcttcatcacattagtgatcagaaatgaggtgtaattccccaacccctgcccgcaagagctaagtaggatcttactgtaagttgaagggagttttgccctaactcatggattgtgcaagaatgaactgctgttgggtttgattgactgtcgatggattgtggtgtggtgtatctgaaggctattgaatgcaacttacaatgcttaataaaaatctttattcttttagtataaagtatggcgtggcttttaaattcacttgtaaaagctaattttatagaggtttaattcaaatcgaaacaactactgaaaagatcagaaaaccaaagttgaaaaatattttaccttttcaaagtaattccaggtttccggcttagagggacattaatatatgattaatttgtttgatagctcagtttcaagcaaccaaggggataaaaaaattctgtttgataaagcagacttacagaagaggtttttttaagccctgaggaagcaataaatttgactccaccacgttttaa

SEQ ID NO: 3158 - protein, 1118 aa, Homosapiens; identical to SEQ ID NO: 416

SEQ ID NO: 3159 - DNA, 280 bp, Homosapiens
aagtagcacattagctatgccaaaaaataatacgaagcaaggaatgctaaggaagaatcaatgtgcttatcatatggtcactcccttataaaatattttcacactgctccacctacctaagagagcagcaaaaataggaaaacgatttggattcaggtccagttgcttggcaacttcatgcatcagatattggcttgtggtgagacttttcccgttccggctcagttttagggcatgggcactgaaatagtaggggatgttgcacagtgcataatcagag

SEQ ID NO: 3160 - protein, 52 aa, Homosapiens
NIFTLLHLPKRAAKIGKRFGFRSSCLATSCIRYWLVVRLFPFRLSFRAWALK

SEQ ID NO: 3161 - DNA, 695 bp, Homosapiens
gaaggggtgctttctgtaaggaaaatgcgttataaatttagcctccacctgggtgacagagcgagaccctgtcttaaaaaaaaaaaaatcttgactacatgttgaaatagtattattttggatacattgagttaaataaatacatttttaaaacttctttcctctgtttctttgtacatttttcatgtggctacaaaaaaatataagcttgttgtaggtttctgttggacagtgctgaattgccacagctaacaccaagatgatagttgtttattatccattctcactgtcagaaaacaagatgcttggggctctggttttgtttgcttatttttttgtttttaaacagaagttttgctgccaattagcaattagagaattttcttaggtcagaaaacttacaatttgcagtaatcaaaagaagttagtaaattctatttgtgactctgcttatggaaattctaatttaaaaacacagtaagaaatacaggctagatttattgattctatgatgttcagttaaggtagtaaacctagaagtattcgcctaaagagaaaaacattcttgagtttgcagattgccatcttggtaatatagaaggcatgccatatgcacctgatgacactttattgtatctgtttctatctaaaaagccttgcacatttgcagttgtaacctaattcagttctcatgg

SEQ ID NO: 3162 - protein, 42 aa, Homosapiens
MIVVYYPFSLSENKMLGALVLFAYFFVFKQKFCCQLAIREFS

SEQ ID NO: 3163 - DNA, 5349 bp, Homosapiens
gtgcgcccccgtccccgtcccctcccggccgcggcgccgcctgcgccccgccgcccccgccgcccccgcgcggcccggcccccggcccggcccggaccgacccgggcagcgcagcggcggggccgagcggcggcgcggcgcggcaacatggcgacggtgcccgtgtactgcgtctgccggctcccctacgacgttacccgcttcatgatcgagtgcgacgcctgcaaggactggttccacggcagctgtgttggggtggaagaggaggaggcgcccgacatcgacatataccactgcccaaactgtgagaaaacccatgggaagtccaccttaaagaagaagcggacctggcacaaacacggcccggggcaagcgcctgacgtcaagcccgtgcagaatggcagccagctcttcatcaaggagctgcggagccggacctttcccagtgctgaagacgtggtggcccgtgtgccaggaagtcagctcacgctgggctacatggaggagcacggcttcaccgagcccatcctcgtccctaagaaagacgggctgggtctggctgtcccggcccccacgttctatgtcagtgacgtcgagaactacgtggggccggaacggagtgtggatgtgacagatgtcaccaagcagaaggactgcaagatgaagctgaaggagtttgtggactattactacagcaccaaccgcaagcgggtcctcaacgtcaccaacctcgagttctctgacacccgaatgtccagcttcgtggagccacctgacattgtaaagaaactgtcatgggtagaaaactactggccagatgatgcattgctggccaagcccaaagtgaccaagtactgcctaatctgcgtgaaggacagttacaccgacttccacatcgactctgggggcgcctctgcctggtaccacgtgctcaagggggagaagaccttctatctcatcaggccggcctcggccaacatctccctgtatgagcgctggcggtctgcctctaaccacagcgagatgttctttgctgaccaggtcgacaaatgctacaagtgcatcgtcaagcagggccagaccctcttcatcccctcaggctggatctacgccacactcacccctgtggactgcctggccttcgcgggacatttcctccacagcctgagtgtggagatgcagatgagagcatatgaagtggaaaggaggttgaaactgggcagcctgactcagtttcccaactttgaaactgcgtgctggtacatggggaagcacctgctggaggcattcaaaggctctcacaaatctgggaagcagctgccccctcatctagtccaaggagctaaaattctcaatggtgctttccgatcgtggacgaagaagcaggctttggcagagcatgaggacgagctcccggagcacttcaaaccttcacagctaatcaaagacctggccaaagagatccggctcagtgagaatgcctccaaagccgtccgaccggaagtgaatactgtcgcctcgtcagatgaggtgtgtgacggggaccgggagaaggaggagcccccgtctcccattgaggccaccccgcctcaatccctcctggagaaagtgtccaaaaaaaagactcccaaaactgtgaagatgcccaagccatccaaaatccccaagcccccgaagccccctaagcccccaaggccccccaaaacgctgaagctcaaagatggaggcaagaagaaagggaagaagtcccgggagtcagcctcacccaccatccccaacctggacctgctcgaagcccacaccaaggaggcactgaccaagatggagccgcccaagaagggcaaggccacaaagagtgtcctgagtgtgcccaacaaagatgtggttcacatgcagaatgatgtggagaggctggaaattcgagagcaaaccaagagcaagtcagaggccaagtggaagtacaagaacagcaaacctgactccttactgaagatggaagaggagcagaagctagagaagtcgcctctagctggaaacaaagacaataagttctctttttctttctccaacaagaaactcctcggctccaaggctctcaggcccccgacgagccctggtgtgttcggggccttgcagaacttcaaggaggacaagcccaagcccgtgcgggatgagtatgagtacgtgtcggatgacggtgagctcaagatcgacgagtttcccatcaggaggaagaaaaacgccccgaaaagggacttgtccttcttgttggataagaaggctgtgctgcccacgcctgtcacgaagccaaagctggactcggcagcgtacaagagtgatgactcctcggacgagggttcgctgcacatcgacacagacaccaagcccggccgcaatgccagagtcaagaaggagagtgggagctcggcagctggcatcttggacctgctgcaggccagtgaggaggttggcgcgctggagtacaaccccagcagccagcccccggcctcccccagcacacaggaagccattcagggaatgctgtccatggccaacctgcaggcctccgactcctgcctgcagaccacgtggggagctggccaggccaaggggagctcgctggctgcccatggtgcccggaagaatgggggtggcagtggcaagagtgcaggcaaacgactgctgaagagggctgccaagaacagtgtcgacctggacgactacgaggaagagcaggaccacctggatgcctgcttcaaggactcagactacgtttacccctcactggagtcagatgaagacaaccccatctttaagtcccggtcgaagaaaaggaaaggctcagacgacgctccctacagcccaacagcaagggtcggcccatcggtgccaagacaggacaggcctgtgcgtgagggtacacgggtggcttccatcgagaccgggctggcggctgctgcagctaagttgtcccagcaggaggagcagaaaagcaagaaaaaaaagagtgccaagaggaagctgactcctaacaccacctccccttccacctccacctccatctctgccggcaccacctccacctccaccacgccagcctctaccaccccggcctccaccaccccggcctccaccagcacggccagcagccaggcctcgcaggagggcagctcgccagagcccccgcctgagtcgcatagcagcagcctggcggaccatgagtacacagccgctggcaccttcaccggggcccaggctggccgcacctcccagcccatggcccctggggtctttctcacacagaggcggccctccgcatcgtctccaaacaacaacaccgctgccaaaggaaaacgtacgaaaaagggcatggcgaccgccaagcagaggcttgggaaaattttgaaaattcatcggaacgggaaactactcctttaagatttggaaagccaggatccttctgctccgctcaggacccccggagccccgcgaaaacatctgcctcccaggagggtgccgagctgcctcaccagggagggccttgcctcttcccggctgccatctccccaacaagcgtctgtcccttcagccggcagagcgagcccagcgtggcccctcaatttgaaaatggacgtcttttctcaagttgctaagagtgatctgtcccagaaaagcggccctgcaagtttgaggaccgcttattccactttaaggacagccttcaggccccctgagcgtgggtgtgattgcagggcctctgcagctctgctgagagcatgagtccttcaaggaagacagagtgagccaatgctcaccagccccagagtcagagctggccacaggctggcagcctccaggggcttaaaaaaaaaggcaaagaacacagaaagaggaggagcaagtgggatgtttatgtccccccttctcttcctgagtgattctcagccaagtccagacagtgctcggcgggtgaggaagggtctgccccgagctttctggttggcaggtggcagcaggatggtgggtgttcagcctgaatgcccaggagcatttctggggggcagctaagactggcagctgggttggtgtgttagcgggcaggggagccattgtggggtccccaggaaagggcaagggctcagccacatcttggggtctgggaggcccaggctaagccatgtggcagggaccgtcttgccctgctggccacactctggagaagcacttctcagccaaggcacccctgccctgggactggcagggcaggggcaggggcagggacagtggccaggcggcccgaggacttacggtcggcacttctctgttctcccgtgtcagcgtgtggtgtcgcctgcatgggtcgtacctggatggtgtgtccaccatcgacacggaggggctggatttgtttctcaggcaatcctgtattttaattttagatgtatttcctgaagcatatttttcatagaatgtagcgtgtaaatagctttttaaataacttcttttttataagagtaaaagtatctttaggaatttctttctatagagttcttcattaacatttatacgagttttttgctgagtcagatggacagttgggttctgatgctttttccttctcctttccttttattattattatttttttcttttaagaactaaggtattgcctgaaaaacaagtgatgtctgtgcagccttacactctgtctttacagaagcaaatagtacacaaaagatctatttcagacacattttgaagatgaatcttcaactttaataccagctctttgttttccttgtatgatgaggggattgggggatacagttattttactagcaccttgtgaagtgtttccgtgttttgtgatgctgtaatttattaatgtttgtagctttttatatttgtacatttcttatgagctttgtttatatacccattacctggatgtttttgtccactgggagaggcagcttggtggaggccttatccactcccacttgtcctgtttggagggacgcagtccctagggcccgagactgggtgggagagggggagtctcacggggccccaggcttattcagaactggtgtttttaaagtttcctttaccctgcccttgttgaacatttatataatctaacctggacatcaagctgttctctctctctcttttttttaattttattattattattttggcaacatgtacatttctaacaaagtttatcgtggctattaaagtgttttatttcccaattcatattactcttgtatcgagtccatgaggtctaaggcaacttagatcaaagttttaaaaaagtaaaaatatttcaggttttgtacagaa

SEQ ID NO: 3164 - protein, 1096 aa, Homosapiens
MATVPVYCVCRLPYDVTRFMIECDACKDWFHGSCVGVEEEEAPDIDIYHCPNCEKTHGKSTLKKKRTWHKHGPGQAPDVKPVQNGSQLFIKELRSRTFPSAEDVVARVPGSQLTLGYMEEHGFTEPILVPKKDGLGLAVPAPTFYVSDVENYVGPERSVDVTDVTKQKDCKMKLKEFVDYYYSTNRKRVLNVTNLEFSDTRMSSFVEPPDIVKKLSWVENYWPDDALLAKPKVTKYCLICVKDSYTDFHIDSGGASAWYHVLKGEKTFYLIRPASANISLYERWRSASNHSEMFFADQVDKCYKCIVKQGQTLFIPSGWIYATLTPVDCLAFAGHFLHSLSVEMQMRAYEVERRLKLGSLTQFPNFETACWYMGKHLLEAFKGSHKSGKQLPPHLVQGAKILNGAFRSWTKKQALAEHEDELPEHFKPSQLIKDLAKEIRLSENASKAVRPEVNTVASSDEVCDGDREKEEPPSPIEATPPQSLLEKVSKKKTPKTVKMPKPSKIPKPPKPPKPPRPPKTLKLKDGGKKKGKKSRESASPTIPNLDLLEAHTKEALTKMEPPKKGKATKSVLSVPNKDVVHMQNDVERLEIREQTKSKSEAKWKYKNSKPDSLLKMEEEQKLEKSPLAGNKDNKFSFSFSNKKLLGSKALRPPTSPGVFGALQNFKEDKPKPVRDEYEYVSDDGELKIDEFPIRRKKNAPKRDLSFLLDKKAVLPTPVTKPKLDSAAYKSDDSSDEGSLHIDTDTKPGRNARVKKESGSSAAGILDLLQASEEVGALEYNPSSQPPASPSTQEAIQGMLSMANLQASDSCLQTTWGAGQAKGSSLAAHGARKNGGGSGKSAGKRLLKRAAKNSVDLDDYEEEQDHLDACFKDSDYVYPSLESDEDNPIFKSRSKKRKGSDDAPYSPTARVGPSVPRQDRPVREGTRVASIETGLAAAAAKLSQQEEQKSKKKKSAKRKLTPNTTSPSTSTSISAGTTSTSTTPASTTPASTTPASTSTASSQASQEGSSPEPPPESHSSSLADHEYTAAGTFTGAQAGRTSQPMAPGVFLTQRRPSASSPNNNTAAKGKRTKKGMATAKQRLGKILKIHRNGKLLL

SEQ ID NO: 3165 - DNA, 2919 bp, Homosapiens
ggccgagcggcggcgcggcgcggcaacatggcgacggtgcccgtgtactgcgtctgccggctcccctacgacgttacccgcttcatgatcgagtgcgacgcctgcaaggactggttccacggcagctgtgttggggtggaagaggaggaggcgcccgacatcgacatataccactgcccaaactgtgagaaaacccatgggaagtccaccttaaagaagaagcggacctggcacaaacacggcccggggcaagcgcctgacgtcaagcccaacagtgtcgacctggacgactacgaggaagagcaggaccacctggatgcctgcttcaaggactcagactacgtttacccctcactggagtcagatgaagacaaccccatctttaagtcccggtcgaagaaaaggaaaggctcagacgacgctccctacagcccaacagcaagggtcggcccatcggtgccaagacaggacaggcctgtgcgtgagggtacacgggtggcttccatcgagaccgggctggcggctgctgcagctaagttgtcccagcaggaggagcagaaaagcaagaaaaaaaagagtgccaagaggaagctgactcctaacaccacctccccttccacctccacctccatctctgccggcaccacctccacctccaccacgccagcctctaccaccccggcctccaccaccccggcctccaccagcacggccagcagccaggcctcgcaggagggcagctcgccagagcccccgcctgagtcgcatagcagcagcctggcggaccatgagtacacagccgctggcaccttcaccggggcccaggctggccgcacctcccagcccatggcccctggggtctttctcacacagaggcggccctccgcatcgtctccaaacaacaacaccgctgccaaaggaaaacgtacgaaaaagggcatggcgaccgccaagcagaggcttgggaaaattttgaaaattcatcggaacgggaaactactcctttaagatttggaaagccaggatccttctgctccgctcaggacccccggagccccgcgaaaacatctgcctcccaggagggtgccgagctgcctcaccagggagggccttgcctcttcccggctgccatctccccaacaagcgtctgtcccttcagccggcagagcgagcccagcgtggcccctcaatttgaaaatggacgtcttttctcaagttgctaagagtgatctgtcccagaaaagcggccctgcaagtttgaggaccgcttattccactttaaggacagccttcaggccccctgagcgtgggtgtgattgcagggcctctgcagctctgctgagagcatgagtccttcaaggaagacagagtgagccaatgctcaccagccccagagtcagagctggccacaggctggcagcctccaggggcttaaaaaaaaaggcaaagaacacagaaagaggaggagcaagtgggatgtttatgtccccccttctcttcctgagtgattctcagccaagtccagacagtgctcggcgggtgaggaagggtctgccccgagctttctggttggcaggtggcagcaggatggtgggtgttcagcctgaatgcccaggagcatttctggggggcagctaagactggcagctgggttggtgtgttagcgggcaggggagccattgtggggtccccaggaaagggcaagggctcagccacatcttggggtctgggaggcccaggctaagccatgtggcagggaccgtcttgccctgctggccacactctggagaagcacttctcagccaaggcacccctgccctgggactggcagggcaggggcaggggcagggacagtggccaggcggcccgaggacttacggtcggcacttctctgttctcccgtgtcagcgtgtggtgtcgcctgcatgggtcgtacctggatggtgtgtccaccatcgacacggaggggctggatttgtttctcaggcaatcctgtattttaattttagatgtatttcctgaagcatatttttcatagaatgtagcgtgtaaatagctttttaaataacttcttttttataagagtaaaagtatctttaggaatttctttctatagagttcttcattaacatttatacgagttttttgctgagtcagatggacagttgggttctgatgctttttccttctcctttccttttattattattatttttttcttttaagaactaaggtattgcctgaaaaacaagtgatgtctgtgcagccttacactctgtctttacagaagcaaatagtacacaaaagatctatttcagacacattttgaagatgaatcttcaactttaataccagctctttgttttccttgtatgatgaggggattgggggatacagttattttactagcaccttgtgaagtgtttccgtgttttgtgatgctgtaatttattaatgtttgtagctttttatatttgtacatttcttatgagctttgtttatatacccattacctggatgtttttgtccactgggagaggcagcttggtggaggccttatccactcccacttgtcctgtttggagggacgcagtccctagggcccgagactgggtgggagagggggagtctcacggggccccaggcttattcagaactggtgtttttaaagtttcctttaccctgcccttgttgaacatttatataatctaacctggacatcaagctgttctctctctctcttttttttaattttattattattattttggcaacatgtacatttctaacaaagtttatcgtggctattaaagtgttttatttcccaattcatattactcttgtatcgagtccatgaggtctaaggcaacttagatcaaagttttaaaaaagtaaaaatatttcaggttttgtacagaa

SEQ ID NO: 3166 - protein, 326 aa, Homosapiens
MATVPVYCVCRLPYDVTRFMIECDACKDWFHGSCVGVEEEEAPDIDIYHCPNCEKTHGKSTLKKKRTWHKHGPGQAPDVKPNSVDLDDYEEEQDHLDACFKDSDYVYPSLESDEDNPIFKSRSKKRKGSDDAPYSPTARVGPSVPRQDRPVREGTRVASIETGLAAAAAKLSQQEEQKSKKKKSAKRKLTPNTTSPSTSTSISAGTTSTSTTPASTTPASTTPASTSTASSQASQEGSSPEPPPESHSSSLADHEYTAAGTFTGAQAGRTSQPMAPGVFLTQRRPSASSPNNNTAAKGKRTKKGMATAKQRLGKILKIHRNGKLLL

SEQ ID NO: 3167 - DNA, 5245 bp, Homosapiens
cgagcggcggcgcggcgcggcaacatggcgacggtgcccgtgtactgcgtctgccggctcccctacgacgttacccgcttcatgatcgagtgcgacgcctgcaaggactggttccacggcaggtgagcgcgcggcggctgctcggctcggcccggcccggcccggggcgcccgacatcgacatataccactgcccaaactgtgagaaaacccatgggaagtccaccttaaagaagaagcggacctggcacaaacacggcccggggcaagcgcctgacgtcaagcccgtgcagaatggcagccagctcttcatcaaggagctgcggagccggacctttcccagtgctgaagacgtggtggcccgtgtgccaggaagtcagctcacgctgggctacatggaggagcacggcttcaccgagcccatcctcgtccctaagaaagacgggctgggtctggctgtcccggcccccacgttctatgtcagtgacgtcgagaactacgtggggccggaacggagtgtggatgtgacagatgtcaccaagcagaaggactgcaagatgaagctgaaggagtttgtggactattactacagcaccaaccgcaagcgggtcctcaacgtcaccaacctcgagttctctgacacccgaatgtccagcttcgtggagccacctgacattgtaaagaaactgtcatgggtagaaaactactggccagatgatgcattgctggccaagcccaaagtgaccaagtactgcctaatctgcgtgaaggacagttacaccgacttccacatcgactctgggggcgcctctgcctggtaccacgtgctcaagggggagaagaccttctatctcatcaggccggcctcggccaacatctccctgtatgagcgctggcggtctgcctctaaccacagcgagatgttctttgctgaccaggtcgacaaatgctacaagtgcatcgtcaagcagggccagaccctcttcatcccctcaggctggatctacgccacactcacccctgtggactgcctggccttcgcgggacatttcctccacagcctgagtgtggagatgcagatgagagcatatgaagtggaaaggaggttgaaactgggcagcctgactcagtttcccaactttgaaactgcgtgctggtacatggggaagcacctgctggaggcattcaaaggctctcacaaatctgggaagcagctgccccctcatctagtccaaggagctaaaattctcaatggtgctttccgatcgtggacgaagaagcaggctttggcagagcatgaggacgagctcccggagcacttcaaaccttcacagctaatcaaagacctggccaaagagatccggctcagtgagaatgcctccaaagccgtccgaccggaagtgaatactgtcgcctcgtcagatgaggtgtgtgacggggaccgggagaaggaggagcccccgtctcccattgaggccaccccgcctcaatccctcctggagaaagtgtccaaaaaaaagactcccaaaactgtgaagatgcccaagccatccaaaatccccaagcccccgaagccccctaagcccccaaggccccccaaaacgctgaagctcaaagatggaggcaagaagaaagggaagaagtcccgggagtcagcctcacccaccatccccaacctggacctgctcgaagcccacaccaaggaggcactgaccaagatggagccgcccaagaagggcaaggccacaaagagtgtcctgagtgtgcccaacaaagatgtggttcacatgcagaatgatgtggagaggctggaaattcgagagcaaaccaagagcaagtcagaggccaagtggaagtacaagaacagcaaacctgactccttactgaagatggaagaggagcagaagctagagaagtcgcctctagctggaaacaaagacaataagttctctttttctttctccaacaagaaactcctcggctccaaggctctcaggcccccgacgagccctggtgtgttcggggccttgcagaacttcaaggaggacaagcccaagcccgtgcgggatgagtatgagtacgtgtcggatgacggtgagctcaagatcgacgagtttcccatcaggaggaagaaaaacgccccgaaaagggacttgtccttcttgttggataagaaggctgtgctgcccacgcctgtcacgaagccaaagctggactcggcagcgtacaagagtgatgactcctcggacgagggttcgctgcacatcgacacagacaccaagcccggccgcaatgccagagtcaagaaggagagtgggagctcggcagctggcatcttggacctgctgcaggccagtgaggaggttggcgcgctggagtacaaccccagcagccagcccccggcctcccccagcacacaggaagccattcagggaatgctgtccatggccaacctgcaggcctccgactcctgcctgcagaccacgtggggagctggccaggccaaggggagctcgctggctgcccatggtgcccggaagaatgggggtggcagtggcaagagtgcaggcaaacgactgctgaagagggctgccaagaacagtgtcgacctggacgactacgaggaagagcaggaccacctggatgcctgcttcaaggactcagactacgtttacccctcactggagtcagatgaagacaaccccatctttaagtcccggtcgaagaaaaggaaaggctcagacgacgctccctacagcccaacagcaagggtcggcccatcggtgccaagacaggacaggcctgtgcgtgagggtacacgggtggcttccatcgagaccgggctggcggctgctgcagctaagttgtcccagcaggaggagcagaaaagcaagaaaaaaaagagtgccaagaggaagctgactcctaacaccacctccccttccacctccacctccatctctgccggcaccacctccacctccaccacgccagcctctaccaccccggcctccaccaccccggcctccaccagcacggccagcagccaggcctcgcaggagggcagctcgccagagcccccgcctgagtcgcatagcagcagcctggcggaccatgagtacacagccgctggcaccttcaccggggcccaggctggccgcacctcccagcccatggcccctggggtctttctcacacagaggcggccctccgcatcgtctccaaacaacaacaccgctgccaaaggaaaacgtacgaaaaagggcatggcgaccgccaagcagaggcttgggaaaattttgaaaattcatcggaacgggaaactactcctttaagatttggaaagccaggatccttctgctccgctcaggacccccggagccccgcgaaaacatctgcctcccaggagggtgccgagctgcctcaccagggagggccttgcctcttcccggctgccatctccccaacaagcgtctgtcccttcagccggcagagcgagcccagcgtggcccctcaatttgaaaatggacgtcttttctcaagttgctaagagtgatctgtcccagaaaagcggccctgcaagtttgaggaccgcttattccactttaaggacagccttcaggccccctgagcgtgggtgtgattgcagggcctctgcagctctgctgagagcatgagtccttcaaggaagacagagtgagccaatgctcaccagccccagagtcagagctggccacaggctggcagcctccaggggcttaaaaaaaaaggcaaagaacacagaaagaggaggagcaagtgggatgtttatgtccccccttctcttcctgagtgattctcagccaagtccagacagtgctcggcgggtgaggaagggtctgccccgagctttctggttggcaggtggcagcaggatggtgggtgttcagcctgaatgcccaggagcatttctggggggcagctaagactggcagctgggttggtgtgttagcgggcaggggagccattgtggggtccccaggaaagggcaagggctcagccacatcttggggtctgggaggcccaggctaagccatgtggcagggaccgtcttgccctgctggccacactctggagaagcacttctcagccaaggcacccctgccctgggactggcagggcaggggcaggggcagggacagtggccaggcggcccgaggacttacggtcggcacttctctgttctcccgtgtcagcgtgtggtgtcgcctgcatgggtcgtacctggatggtgtgtccaccatcgacacggaggggctggatttgtttctcaggcaatcctgtattttaattttagatgtatttcctgaagcatatttttcatagaatgtagcgtgtaaatagctttttaaataacttcttttttataagagtaaaagtatctttaggaatttctttctatagagttcttcattaacatttatacgagttttttgctgagtcagatggacagttgggttctgatgctttttccttctcctttccttttattattattatttttttcttttaagaactaaggtattgcctgaaaaacaagtgatgtctgtgcagccttacactctgtctttacagaagcaaatagtacacaaaagatctatttcagacacattttgaagatgaatcttcaactttaataccagctctttgttttccttgtatgatgaggggattgggggatacagttattttactagcaccttgtgaagtgtttccgtgttttgtgatgctgtaatttattaatgtttgtagctttttatatttgtacatttcttatgagctttgtttatatacccattacctggatgtttttgtccactgggagaggcagcttggtggaggccttatccactcccacttgtcctgtttggagggacgcagtccctagggcccgagactgggtgggagagggggagtctcacggggccccaggcttattcagaactggtgtttttaaagtttcctttaccctgcccttgttgaacatttatataatctaacctggacatcaagctgttctctctctctcttttttttaattttattattattattttggcaacatgtacatttctaacaaagtttatcgtggctattaaagtgttttatttcccaattcatattactcttgtatcgagtccatgaggtctaaggcaacttagatcaaagttttaaaaaagtaaaaatatttcaggttttgtacagaa

SEQ ID NO: 3168 - protein, 979 aa, Homosapiens
MEEHGFTEPILVPKKDGLGLAVPAPTFYVSDVENYVGPERSVDVTDVTKQKDCKMKLKEFVDYYYSTNRKRVLNVTNLEFSDTRMSSFVEPPDIVKKLSWVENYWPDDALLAKPKVTKYCLICVKDSYTDFHIDSGGASAWYHVLKGEKTFYLIRPASANISLYERWRSASNHSEMFFADQVDKCYKCIVKQGQTLFIPSGWIYATLTPVDCLAFAGHFLHSLSVEMQMRAYEVERRLKLGSLTQFPNFETACWYMGKHLLEAFKGSHKSGKQLPPHLVQGAKILNGAFRSWTKKQALAEHEDELPEHFKPSQLIKDLAKEIRLSENASKAVRPEVNTVASSDEVCDGDREKEEPPSPIEATPPQSLLEKVSKKKTPKTVKMPKPSKIPKPPKPPKPPRPPKTLKLKDGGKKKGKKSRESASPTIPNLDLLEAHTKEALTKMEPPKKGKATKSVLSVPNKDVVHMQNDVERLEIREQTKSKSEAKWKYKNSKPDSLLKMEEEQKLEKSPLAGNKDNKFSFSFSNKKLLGSKALRPPTSPGVFGALQNFKEDKPKPVRDEYEYVSDDGELKIDEFPIRRKKNAPKRDLSFLLDKKAVLPTPVTKPKLDSAAYKSDDSSDEGSLHIDTDTKPGRNARVKKESGSSAAGILDLLQASEEVGALEYNPSSQPPASPSTQEAIQGMLSMANLQASDSCLQTTWGAGQAKGSSLAAHGARKNGGGSGKSAGKRLLKRAAKNSVDLDDYEEEQDHLDACFKDSDYVYPSLESDEDNPIFKSRSKKRKGSDDAPYSPTARVGPSVPRQDRPVREGTRVASIETGLAAAAAKLSQQEEQKSKKKKSAKRKLTPNTTSPSTSTSISAGTTSTSTTPASTTPASTTPASTSTASSQASQEGSSPEPPPESHSSSLADHEYTAAGTFTGAQAGRTSQPMAPGVFLTQRRPSASSPNNNTAAKGKRTKKGMATAKQRLGKILKIHRNGKLLL

SEQ ID NO: 3169 - DNA, 397 bp, Homosapiens
gcaggtgtggatgtaggtgtgggagtaggtacaggtgtagatgcagctgtgggtgtgggagtaggcacaggtgtagatgcagatgtgggtgtgggagtagggtcaggtgtagatgcagatgtgggtgtgggagtaggcacaggtgtagatgcaggtgtgggtgtgggagtaggtacaggtgtagatgcaggtgtgggtgtggatgtaggtacaggtgtagatgcaggtgtgggtgcggatgtaggtacaggtgtagatgcaggtgtgggtgtggatgtaggtacaggtgtagatgcagatgtgggtgtgggagtaggcacaggtgtagatgcaggtgtgggtgtggatgtaggtacaggtgtagatgcaggtgtgggtgtggatgtaggtacaggtg

SEQ ID NO: 3170 - protein, 131 aa, Homosapiens
AGVDVGVGVGTGVDAAVGVGVGTGVDADVGVGVGSGVDADVGVGVGTGVDAGVGVGVGTGVDAGVGVDVGTGVDAGVGADVGTGVDAGVGVDVGTGVDADVGVGVGTGVDAGVGVDVGTGVDAGVGVDVGT

SEQ ID NO: 3171 - DNA, 386 bp, Homosapiens
tgtgggtgtgggagtaggtacaggtgtagatgcaggtgtgggtgtggatgtaggtacaggtgtagatgcagatgtgggtgtgggagtagggtcaggtgtagatgcagatgtgggtgtgggagtaggcacaggtgtagatgcaggtgtgggtgtgggagtaggtacaggtgtagatgcaggtgtgggtgtggatgtaggtacaggtgtagatgcaggtgtgggtgcggatgtaggtacaggtgtagatgcaggtgtgggtgtggatgtaggtacaggtgtagatgcagatgtgggtgtgggagtaggcacaggtgtagatgcaggtgtgggtgtggatgtaggtacaggtgtagatgcaggtgtgggtgtggatgtaggtacaggtg

SEQ ID NO: 3172 - protein, 127 aa, Homosapiens
CGCGSRYRCRCRCGCGCRYRCRCRCGCGSRVRCRCRCGCGSRHRCRCRCGCGSRYRCRCRCGCGCRYRCRCRCGCGCRYRCRCRCGCGCRYRCRCRCGCGSRHRCRCRCGCGCRYRCRCRCGCGCRY

SEQ ID NO: 3173 - DNA, 361 bp, Homosapiens
gacgactacgaggaagagcaggaccacctggatgcctgcttcaaggactcagactacgtttacccctcactggagtcagatgaagacaaccccatctttaagtcccggtcgaagaaaaggaaaggctcagacgacgctccctacagcccaacagcaagggtcggcccatcggtgccaagacaggacaggcctgtgcgtgagggtacacgggtggcttccatcgagaccgggctggcggctgctgcagctaagttgtcccagcaggaggagcagaaaagcaagaaaaaaaagagtgccaagaggaagctgactcctaacaccacctccccttccacctccacctccatctctgccggcacca

SEQ ID NO: 3174 - protein, 92 aa, Homosapiens
MPASRTQTTFTPHWSQMKTTPSLSPGRRKGKAQTTLPTAQQQGSAHRCQDRTGLCVRVHGWLPSRPGWRLLQLSCPSRRSRKARKKRVPRGS

SEQ ID NO: 3175 - DNA, 2496 bp, Homosapiens
tggccagggggacaggctggggtgggggcagggtagccccaaaccaggaggggtggacaggctgtggcctacagcttgagggggctggcccttcttttccacagcaagggtcggcccatcggtgccaagacaggacaggcctgtgcgtgagggtacacgggtggcttccatcgagaccgggctggcggctgctgcagctaagttgtcccagcaggaggagcagaaaagcaagaaaaaaaagagtgccaagaggaagctgactcctaacaccacctccccttccacctccacctccatctctgccggcaccacctccacctccaccacgccagcctctaccaccccggcctccaccaccccggcctccaccagcacggccagcagccaggcctcgcaggagggcagctcgccagagcccccgcctgagtcgcatagcagcagcctggcggaccatgagtacacagccgctggcaccttcaccggggcccaggctggccgcacctcccagcccatggcccctggggtctttctcacacagaggcggccctccgcatcgtctccaaacaacaacaccgctgccaaaggaaaacgtacgaaaaagggcatggcgaccgccaagcagaggcttgggaaaattttgaaaattcatcggaacgggaaactactcctttaagatttggaaagccaggatccttctgctccgctcaggacccccggagccccgcgaaaacatctgcctcccaggagggtgccgagctgcctcaccagggagggccttgcctcttcccggctgccatctccccaacaagcgtctgtcccttcagccggcagagcgagcccagcgtggcccctcaatttgaaaatggacgtcttttctcaagttgctaagagtgatctgtcccagaaaagcggccctgcaagtttgaggaccgcttattccactttaaggacagccttcaggccccctgagcgtgggtgtgattgcagggcctctgcagctctgctgagagcatgagtccttcaaggaagacagagtgagccaatgctcaccagccccagagtcagagctggccacaggctggcagcctccaggggcttaaaaaaaaaggcaaagaacacagaaagaggaggagcaagtgggatgtttatgtccccccttctcttcctgagtgattctcagccaagtccagacagtgctcggcgggtgaggaagggtctgccccgagctttctggttggcaggtggcagcaggatggtgggtgttcagcctgaatgcccaggagcatttctggggggcagctaagactggcagctgggttggtgtgttagcgggcaggggagccattgtggggtccccaggaaagggcaagggctcagccacatcttggggtctgggaggcccaggctaagccatgtggcagggaccgtcttgccctgctggccacactctggagaagcacttctcagccaaggcacccctgccctgggactggcagggcaggggcaggggcagggacagtggccaggcggcccgaggacttacggtcggcacttctctgttctcccgtgtcagcgtgtggtgtcgcctgcatgggtcgtacctggatggtgtgtccaccatcgacacggaggggctggatttgtttctcaggcaatcctgtattttaattttagatgtatttcctgaagcatatttttcatagaatgtagcgtgtaaatagctttttaaataacttcttttttataagagtaaaagtatctttaggaatttctttctatagagttcttcattaacatttatacgagttttttgctgagtcagatggacagttgggttctgatgctttttccttctcctttccttttattattattatttttttcttttaagaactaaggtattgcctgaaaaacaagtgatgtctgtgcagccttacactctgtctttacagaagcaaatagtacacaaaagatctatttcagacacattttgaagatgaatcttcaactttaataccagctctttgttttccttgtatgatgaggggattgggggatacagttattttactagcaccttgtgaagtgtttccgtgttttgtgatgctgtaatttattaatgtttgtagctttttatatttgtacatttcttatgagctttgtttatatacccattacctggatgtttttgtccactgggagaggcagcttggtggaggccttatccactcccacttgtcctgtttggagggacgcagtccctagggcccgagactgggtgggagagggggagtctcacggggccccaggcttattcagaactggtgtttttaaagtttcctttaccctgcccttgttgaacatttatataatctaacctggacatcaagctgttctctctctctcttttttttaattttattattattattttggcaacatgtacatttctaacaaagtttatcgtggctattaaagtgttttatttcccaattc

SEQ ID NO: 3176 - protein, 62 aa, Homosapiens
MSTQPLAPSPGPRLAAPPSPWPLGSFSHRGGPPHRLQTTTPLPKENVRKRAWRPPSRGLGKF

SEQ ID NO: 3177 - DNA, 2584 bp, Homosapiens
tggccagggggacaggctggggtgggggcagggtagccccaaaccaggaggggtggacaggctgtggcctacagcttgagggggctggcccttcttttccacagcaagggtcggcccatcggtgccaagacaggacaggcctgtgcgtgagggtacacgggtggcttccatcgagaccgggctggcggctgctgcagctaagttgtcccagcaggaggagcagaaaagcaagaaaaaaaagagtgccaagaggaagctgactcctaacaccacctccccttccacctccacctccatctctgccggcaccacctccacctccaccacgccagcctctaccaccccggcctccaccaccccggcctccaccagcacggccagcagccaggcctcgcaggagggcagctcgccagagcccccgcctgagtcgcatagcagcagcctggcggaccatgagtacacagccgctggcaccttcaccggggcccaggctggccgcacctcccagcccatggcccctggggtctttctcacacagaggcggccctccgcatcgtctccaaacaacaacaccgctgccaaaggaaaacgtacgaaaaagggcatggcgaccgccaagcagaggcttgggaaaattttgaaaattcatcggaacgggaaactactcctttaagatttggaaagccaggatccttctgctccgctcaggacccccggagccccgcgaaaacatctgcctcccaggagggtgccgagctgcctcaccagggagggccttgcctcttcccggctgccatctccccaacaagcgtctgtcccttcagccggcagagcgagcccagcgtggcccctcaatttgaaaatggacgtcttttctcaagttgctaagagtgatctgtcccagaaaagcggccctgcaagtttgaggaccgcttattccactttaaggacagccttcaggccccctgagcgtgggtgtgattgcagggcctctgcagctctgctgagagcatgagtccttcaaggaagacagagtgagccaatgctcaccagccccagagtcagagctggccacaggctggcagcctccaggggcttaaaaaaaaaggcaaagaacacagaaagaggaggagcaagtgggatgtttatgtccccccttctcttcctgagtgattctcagccaagtccagacagtgctcggcgggtgaggaagggtctgccccgagctttctggttggcaggtggcagcaggatggtgggtgttcagcctgaatgcccaggagcatttctggggggcagctaagactggcagctgggttggtgtgttagcgggcaggggagccattgtggggtccccaggaaagggcaagggctcagccacatcttggggtctgggaggcccaggctaagccatgtggcagggaccgtcttgccctgctggccacactctggagaagcacttctcagccaaggcacccctgccctgggactggcagggcaggggcaggggcagggacagtggccaggcggcccgaggacttacggtcggcacttctctgttctcccgtgtcagcgtgtggtgtcgcctgcatgggtcgtacctggatggtgtgtccaccatcgacacggaggggctggatttgtttctcaggcaatcctgtattttaattttagatgtatttcctgaagcatatttttcatagaatgtagcgtgtaaatagctttttaaataacttcttttttataagagtaaaagtatctttaggaatttctttctatagagttcttcattaacatttatacgagttttttgctgagtcagatggacagttgggttctgatgctttttccttctcctttccttttattattattatttttttcttttaagaactaaggtattgcctgaaaaacaagtgatgtctgtgcagccttacactctgtctttacagaagcaaatagtacacaaaagatctatttcagacacattttgaagatgaatcttcaactttaataccagctctttgttttccttgtatgatgaggggattgggggatacagttattttactagcaccttgtgaagtgtttccgtgttttgtgatgctgtaatttattaatgtttgtagctttttatatttgtacatttcttatgagctttgtttatatacccattacctggatgtttttgtccactgggagaggcagcttggtggaggccttatccactcccacttgtcctgtttggagggacgcagtccctagggcccgagactgggtgggagagggggagtctcacggggccccaggcttattcagaactggtgtttttaaagtttcctttaccctgcccttgttgaacatttatataatctaacctggacatcaagctgttctctctctctcttttttttaattttattattattattttggcaacatgtacatttctaacaaagtttatcgtggctattaaagtgttttatttcccaattcatattactcttgtatcgagtccatgaggtctaaggcaacttagatcaaagttttaaaaaagtaaaaatatttcaggttttgtacagaa

SEQ ID NO: 3178 - protein, 62 aa, Homosapiens; identical to SEQ ID NO: 3176

SEQ ID NO: 3179 - DNA, 803 bp, Homosapiens
gtttcctgttgtttgtttgatgatctcaaatggagtccacaggctgcctgccaccacctcaacaccaagacgtgctgcacaagggagggggtgggacaagaacaggaggagagacatagacacagatccacagggggaaaaggccatgtgaccacagaggcagagatgaagtgctgcagccataagccaaggaactccaagattgcaggtcaccaccagaagctggaagaggcatgaaggatcttcccctggagacttcagagttggcttctggaaaagcccaaaaggatgtgtcttcttcatctctgaatcaaccaaacttcagttcccatggcctgcaagaactgtctccctgttctcagcaaattgtaccccattcttccaatcactcaaacccaaactctggaaatatctttgatccctttcttcattgacttcacatctcatccatcaccaatattctcttgcctctaacttcaaaacatatccagagtctctgcatatcatattcatattgctgaaaagcaattgtaacaggaaaaatctaagagaaaaaagaagcattgtatacagaagtacaaagataagaaaaacagctgacttcttctcagaatctatgcaagtcagaaaagagtggaggcaaaatgaaggtaaagacaacaccaaatgcaggtgagcagatcaacaggaactctcattcgttgctgatgggagtgcaaaatggtacagccactttggaagaaaatctggcagtttcttacaaagctaaacatcctcctgcaatacaatcctcaggtaattcc

SEQ ID NO: 3180 - protein, 66 aa, Homosapiens
MKDLPLETSELASGKAQKDVSSSSLNQPNFSSHGLQELSPCSQQIVPHSSNHSNPNSGNIFDPFLH

SEQ ID NO: 3181 - DNA, 450 bp, Homosapiens
cctttggtccagagcctgggatgttgccttttgcccactggaattcccatcttggaagagtaagcgcaggggattgtccagacagccaggaggccagcgaagccaagtccttcagtacagcctgggagcctccaggaagctgttaggagttgccatgatgggtgcatttggactcacagaatctgccttccaatctcagtgctgcttctactcctttgctaccttaggtctttgaagacaggtccataccttgggtgtttgtatttggacaaccacagacattgccaagaaatgtatctgttctacttgcacaccttcaccacctggatgctgcttgaggacacagatctggtccatcagatttctctctgtactcctctctatatttcgccatatttgatatagacccatcaatggctccctagaataaaatctcaactcttcactgtg

SEQ ID NO: 3182 - protein, 41 aa, Homosapiens
MLPFAHWNSHLGRVSAGDCPDSQEASEAKSFSTAWEPPGSC

SEQ ID NO: 3183 - DNA, 523 bp, Homosapiens
gcattttgggaggccgaggcaggtggattacttgagctcaggatttcaagaccaccatgttgcccaggctagtcttgaactcctgacctcaggtgatccacttgcctcagcctgagattacagacatgagccactgcacccagccttatattgtactactaagatgcaaaaagtacctttaagtgagcgttcgtgtatttatattctgcaaaaccaaaggcaagacttaagtcataacataaagatgacatatctacagggaggaaaaaagataataaagttcaggtttttacatttctaaggatcttatttaattcagagatcacctctggaaaccaggtaacaaattacgaagggctttcagactcattgtctcatttgatcttagcaaaagccctgtgagggacagtgaagggaaagactccctttgggatgatcagtttagggtctcaatgcaaccaataaagtatggaggggtggctaaatctcaggtcatctgagtttcatttcattgcaatcattg

SEQ ID NO: 3184 - protein, 45 aa, Homosapiens
MQKVPLSERSCIYILQNQRQDLSHNIKMTYLQGGKKIIKFRFLHF

SEQ ID NO: 3185 - DNA, 385 bp, Homosapiens
gtgtacggtgggacacatgaacatatgtaggatccatctacgttcaggcaagaagcatgctcactacaatctgatccaactgcacactcatcgacatcaaggcaggatggtgaaacgccgttccagctcccattatctgtacagaacatccttgagtcacccaatagatagtagccattgttgcactggtaggttactgtgctgccagcatagaagtcatcggctgaatggaagccattctccaaaggaggtggcaccccacagctaatgcgttcacagtgaggaagtggttgtgtccactgtccttgattcagacagtactgcacagggttcccgaccagctggaagcctggatcacagaacagattgactttggaacctggct

SEQ ID NO: 3186 - protein, 83 aa, Homosapiens
MNICRIHLRSGKKHAHYNLIQLHTHRHQGRMVKRRSSSHYLYRTSLSHPIDSSHCCTGRLLCCQHRSHRLNGSHSPKEVAPHS

SEQ ID NO: 3187 - DNA, 477 bp, Homosapiens
gtgtccactgtccttgattcagacagtactgcacagggttcccgaccagctggaagcctggatcacagaacagattgactttggaacctggctttaaatcttcagatgcagttctcagatgaggcactgaccctcctaagcgtgggcaatcagaacaaaatatgctcttagaatcgatcttcactttccccacaattcctgacaagaaatcaggccatgctaacacgtttcctttactgagttcctctgggcaggaggtagccagtgacttcacctgctgtggagacaggacatagtcccagaggttgagctggcttatggagcccacaaaagactcagctgggctgaatccctctccttttttgtcttgctcttgccccagaactaacgcaccaccaccaggtatgggcaaaccaacagagaggccagcaccaccgtcagataatttcccatcgatatagactttccagatgccat

SEQ ID NO: 3188 - protein, 47 aa, Homosapiens
MEPTKDSAGLNPSPFLSCSCPRTNAPPPGMGKPTERPAPPSDNFPSI

SEQ ID NO: 3189 - DNA, 381 bp, Homosapiens
cacggattaaaagaagtgccccattatctgactataaaattaagttaatttttaacatcacagctagtgtgccattacccgatgaaagaaatgatacccttgaatgggaaaatcagcaacgactccttcagacattggaaactatcacaaataaactgaaaaggactctcaacaaagaccccatgtattcctttcagcttgcatcagaaatacttatagccgacagcaattcattagaaacaaaaaaggcttcccccttctgcagaccaggctcagtgctgagagggcgtatgtgtggtaagactgttccctgtgatcaaaaatatttggtgcatactgggtcaaatgagatgggtgtagccattttacaactataaaggg

SEQ ID NO: 3190 - protein, 64 aa, Homosapiens
MYSFQLASEILIADSNSLETKKASPFCRPGSVLRGRMCGKTVPCDQKYLVHTGSNEMGVAILQL

SEQ ID NO: 3191 - DNA, 1962 bp, Homosapiens
cacagcttgcccatcggggacatacaaacctgaaggctcaccaggaggaatcagcagttgcattccatgtcctgatgaaaatcacacctctccacctggaagcacatcccctgaagactgtgtctgcagagagggatacagggcatctggccagacctgtgaacttgtccactgccctgccctgaagcctcccgaaaatggttactttatccaaaacacttgcaacaaccacttcaatgcagcctgtggggtccgatgtcaccctggatttgatcttgtgggaagcagcatcatcttatgtctacccaatggtttgtggtccggttcagagagctactgcagagtaagaacatgtcctcatctccgccagccgaaacatggccacatcagctgttctacaagggaaatgttatataagacaacatgtttggttgcctgtgatgaagggtacagactagaaggcagtgataagcttacttgtcaaggaaacagccagtgggatgggccagaaccccggtgtgtggagcgccactgttccacctttcagatgcccaaagatgtcatcatatccccccacaactgtggcaagcagccagccaaatttgggacgatctgctatgtaagttgccgccaagggttcattttatctggagtcaaagaaatgctgagatgtaccacttctggaaaatggaatgtcggagttcaggcagctgtgtgtaaagacgtggaggctcctcaaatcaactgtcctaaggacatagaggctaagactctggaacagcaagattctgccaatgttacctggcagattccaacagctaaagacaactctggtgaaaaggtgtcagtccacgttcatccagctttcaccccaccttaccttttcccaattggagatgttgctatcgtatacacggcaactgacctatccggcaaccaggccagctgcattttccatatcaaggttattgatgcagaaccacctgtcatagactggtgcagatctccacctcccgtccaggtctcggagaaggtacatgccgcaagctgggatgagcctcagttctcagacaactcaggggctgaattggtcattaccagaagtcatacacaaggagaccttttccctcaaggggagactatagtacagtatacagccactgacccctcaggcaataacaggacatgtgatatccatattgtcataaaaggttctccctgtgaaattccattcacacctgtaaatggggattttatatgcactccagataatactggagtcaactgtacattaacttgcttggagggctatgatttcacagaagggtctactgacaagtattattgtgcttatgaagatggcgtctggaaaccaacatataccactgaatggccagactgtgccaaaaaacgttttgcaaaccacgggttcaagtcctttgagatgttctacaaagcagctcgttgtgatgacacagatctgatgaagaagttttctgaagcatttgagacgaccctgggaaaaatggtcccatcattttgtagtgatgcagaggacattgactgcagactggaggagaacctgaccaaaaaatattgcctagaatataattatgactatgaaaatggctttgcaattggtaattaaattctgtggcatcggtagttggcaagactaatctgcaaaataagaataattccagaaaagtgaggcaaactagaaacattaacttctattaatttattcatcaagtattttaggatggctaaataatttgataatgtgctgaaagatcattaaggttatatcaaattttagtaacaaataaattatttaaaattatttgccaggattcttaaaaatgacaaaaactaagaaaactaagtcacatatgctggtaaaattcaaatgttgatgtatcctaaaagagaatagtaataaagtcctaacagcaactttta

SEQ ID NO: 3192 - protein, 413 aa, Homosapiens
MLYKTTCLVACDEGYRLEGSDKLTCQGNSQWDGPEPRCVERHCSTFQMPKDVIISPHNCGKQPAKFGTICYVSCRQGFILSGVKEMLRCTTSGKWNVGVQAAVCKDVEAPQINCPKDIEAKTLEQQDSANVTWQIPTAKDNSGEKVSVHVHPAFTPPYLFPIGDVAIVYTATDLSGNQASCIFHIKVIDAEPPVIDWCRSPPPVQVSEKVHAASWDEPQFSDNSGAELVITRSHTQGDLFPQGETIVQYTATDPSGNNRTCDIHIVIKGSPCEIPFTPVNGDFICTPDNTGVNCTLTCLEGYDFTEGSTDKYYCAYEDGVWKPTYTTEWPDCAKKRFANHGFKSFEMFYKAARCDDTDLMKKFSEAFETTLGKMVPSFCSDAEDIDCRLEENLTKKYCLEYNYDYENGFAIGN

SEQ ID NO: 3193 - DNA, 3258 bp, Homosapiens
agggagagaaggagggaagcgggagatttttcttgactgccccctttccttcaaacattttataggcttcagggagagagaggaggaggagagagggaagaaaaaaagaggagagcgagaggggtagagagcgcgcgccgttccctccggagttcccgagctgctgaggagtctggattgtgtctgtccccagtgtcagatgaaagggcgctgaggctcttggccgctgccccgcgcccagctccgcgcacgcccctctgcgagtccggccgcccagcgcctcttcccgcccgagccgccgcctgcgctccggggcagccgctctgtctccagcgcgatgtggcctcgcctggccttttgttgctggggtctggcgctcgtttcgggctgggcgacctttcagcagatgtccccgtcgcgcaatttcagcttccgcctcttccccgagaccgcgcccggggcccccgggagtatccccgcgccgcccgctcctggcgacgaagcggcggggagcagagtggagcggctgggccaggcgttccggcgacgcgtgcggctgctgcgggagctcagcgagcgcctggagcttgtcttcctggtggatgattcgtccagcgtgggcgaagtcaacttccgcagcgagctcatgttcgtccgcaagctgctgtccgacttccccgtggtgcccacggccacgcgcgtggccatcgtgaccttctcgtccaagaactacgtggtgccgcgcgtcgattacatctccacccgccgcgcgcgccagcacaagtgcgcgctgctcctccaagagatccctgccatctcctaccgaggtggcggcacctacaccaagggcgccttccagcaagccgcgcaaattcttcttcatgctagagaaaactcaacaaaagttgtatttctcatcactgatggatattccaatgggggagaccctagaccaattgcagcgtcactgcgagattcaggagtggagatcttcacttttggcatatggcaagggaacattcgagagctgaatgacatggcttccaccccaaaggaggagcactgttacctgctacacagttttgaagaatttgaggctttagctcgccgggcattgcatgaagatctaccttctgggagttttattcaagatgatatggtccactgctcatatctttgtgatgaaggcaaggactgctgtgaccgaatgggaagctgcaaatgtgggacacacacaggccattttgagtgcatctgtgaaaaggggtattacgggaaaggtctgcagtatgaatgcacagcttgcccatcggggacatacaaacctgaaggctcaccaggaggaatcagcagttgcattccatgtcctgatgaaaatcacacctctccacctggaagcacatcccctgaagactgtgtctgcagagagggatacagggcatctggccagacctgtgaacttgtccactgccctgccctgaagcctcccgaaaatggttactttatccaaaacacttgcaacaaccacttcaatgcagcctgtggggtccgatgtcaccctggatttgatcttgtgggaagcagcatcatcttatgtctacccaatggtttgtggtccggttcagagagctactgcagagtaagaacatgtcctcatctccgccagccgaaacatggccacatcagctgttctacaagggaaatgttatataagacaacatgtttggttgcctgtgatgaagggtacagactagaaggcagtgataagcttacttgtcaaggaaacagccagtgggatgggccagaaccccggtgtgtggagcgccactgttccacctttcagatgcccaaagatgtcatcatatccccccacaactgtggcaagcagccagccaaatttgggacgatctgctatgtaagttgccgccaagggttcattttatctggagtcaaagaaatgctgagatgtaccacttctggaaaatggaatgtcggagttcaggcagctgtgtgtaaagacgtggaggctcctcaaatcaactgtcctaaggacatagaggctaagactctggaacagcaagattctgccaatgttacctggcagattccaacagctaaagacaactctggtgaaaaggtgtcagtccacgttcatccagctttcaccccaccttaccttttcccaattggagatgttgctatcgtatacacggcaactgacctatccggcaaccaggccagctgcattttccatatcaaggttattgatgcagaaccacctgtcatagactggtgcagatctccacctcccgtccaggtctcggagaaggtacatgccgcaagctgggatgagcctcagttctcagacaactcaggggctgaattggtcattaccagaagtcatacacaaggagaccttttccctcaaggggagactatagtacagtatacagccactgacccctcaggcaataacaggacatgtgatatccatattgtcataaaaggttctccctgtgaaattccattcacacctgtaaatggggattttatatgcactccagataatactggagtcaactgtacattaacttgcttggagggctatgatttcacagaagggtctactgacaagtattattgtgcttatgaagatggcgtctggaaaccaacatataccactgaatggccagactgtgccaaaaaacgttttgcaaaccacgggttcaagtcctttgagatgttctacaaagcagctcgttgtgatgacacagatctgatgaagaagttttctgaagcatttgagacgaccctgggaaaaatggtcccatcattttgtagtgatgcagaggacattgactgcagactggaggagaacctgaccaaaaaatattgcctagaatataattatgactatgaaaatggctttgcaattggtaattaaattctgtggcatcggtagttggcaagactaatctgcaaaataagaataattccagaaaagtgaggcaaactagaaacattaacttctattaatttattcatcaagtattttaggatggctaaataatttgataatgtgctgaaagatcattaaggttatatcaaattttagtaacaaataaattatttaaaattatttgccaggattcttaaaaatgacaaaaactaagaaaactaagtcacatatgctggtaaaattcaaatgttgatgtatcctaaaagagaatagtaataaagtcctaacagcaactttta

SEQ ID NO: 3194 - protein, 868 aa, Homosapiens; identical to SEQ ID NO: 749

SEQ ID NO: 3195 - DNA, 2051 bp, Homosapiens
atgagctcgctgcggaagttgacttcgcccacgctggacgaatcatccaccaggaagacaagctccaggcgctcgctgagctcccgcagcagccgcacgcgtcgccggaacgcctggcccagccgctccactctgctccccgccgcttcgtcgccaggagcgggcggcgcggggatactcccgggggccccgggcgcggtctcggggaagaggcggaagctgaaattgcgcgacggggacatctgctgaaaggtcgcccagcccgaaacgagcgccagaccccagcaacaaaaggccaggcgaggccacatcgcgctggagacagacggccaagagcctcagcgccctttcatctgacactggggacagacacaatccagactcctcagcagctcgggaactccggagggaacggcgcgcgctctctacccctctcgctctcctctttttttcttccctctctcctcctcctctctctccctgaagcctataaaatgtttgaaggaaagggggcagtcaagaaaaatctcccgcttccctccttctctccctctctccctctccccgctcctgtctactttctgtatctgtgactctatctccctcctccccctctcattctcctcccgggatcaagccaaaggctcggagattccatgacaccagaaccccgcgtctgtcaggctgtcaacattcccgcagcaagcgcaccagcgccgaagccctgattgatcccatatgtctggcaggagctgcagaggaattcactggagatggatccagataccgagagtgccacagtaattggaaacactttgtagacgaaaacatacacgcggactggccagggagttgaaagcatcctttgaaaactgcttgctcaccttttgtgtttcttttcccccattcagtgtcccaaagccctcgccaaatagatgattgtacaattttcctgatggggatttctaatcagtggtgtgtgtgagcgtgcagattaagcccttaagggccccctcagatcacaccataaaggagttgcatctaaccttatgcgttccacaggaatgatttgtcatggtacttcagtcgtgcatttattcattcatctgtttgttcattctttcctgattttaacaaatattttttgaatacccattgtgtgccaggaactatgtgaggcactgcaaatataaggaacaaaaattgacagggattctatcctcaatgaacttaaagggtaacaagtgaggtgaccattaaccagatattaacatacaaaatatatgtaattacaagtgaccatgctaaataaaggagagcttaggtagacagacttgaccttggagaggccagagaagccttctctgaggacagaaagtttgtgctgaagtctgaagtgtaagtagggggtccccagtcccctttcatgtgttcttgatctatttcaacagataagatccacctggctttaagtggtacctggcatatatctgctttgaaacaagttgctacctggggtggtttttccaaagcaagacctccaaaggggagagcgcacgtgtaaagaaaaggtgcactttgcatgagggtggggcctttggttaaaagattccagctgggagtcaggaacaccgtgtaggtaagcctacggttatgtaaaccacctgaactgagtcacttccaatccttggctcagcatcagtatctatttcatgatggaattcagtgatctcagtttcctctgtttctaatagtgaatgatttaactccgtctgtatttaacaaaatactttcagtgacaagtatcacaatgtattgtgtaacatgttagggctctggcatcagttttcctggacgaaatcatgactctgccatttattagttgtacagccttgactcagtttgttcatttgtaaaatggagtaataacgataacatattaagggctgtcataaggattaagtcataaaaaagtaaaattcttaggacaatgcttggagcatagcgtgtactcaataaatgctggctggttgctcttattgccaccttta

SEQ ID NO: 3196 - protein, 82 aa, Homosapiens
MSSLRKLTSPTLDESSTRKTSSRRSLSSRSSRTRRRNAWPSRSTLLPAASSPGAGGAGILPGAPGAVSGKRRKLKLRDGDIC

SEQ ID NO: 3197 - DNA, 629 bp, Homosapiens
gtgaagcccacagaccgacgctgcttggctccctggattcagcctccttcctagggagtgaccaatctgagaaacccaggagctgtgctcctccgagaaaaagagaagctgaagagccctcactgacatccaaggcacatggacataccacagtacaggtccctgctgaaaacacagaaaatgcagaagaatccccggaacacaagtgaccaccagagcgctgtactgcactttttctagccctgcaccaagacagaggcttaatttagtccagagattcagaagggaaatccagaataagctaaacctaatggagtgaaaaaagagaacattctcatctctttagctttggcaagatgccagacaacctgtgccaatatcccagaatccatcacctgtcgagcttttactagaaacatcaggtttcccacatcctggggtacaaaattcatcctcaatgctggttacctgccccatgcagatgctggcatttaaaatgttttgtcggtgggtcacgcctgaaatcccagcactttgggaggccaaggtgggcagatcatgaggtcaggagatcaagaccatcctggctaacatggtgaaactccatctctactaaaaaaaaaaaaaaa

SEQ ID NO: 3198 - protein, 34 aa, Homosapiens
MLVTCPMQMLAFKMFCRWVTPEIPALWEAKVGRS

SEQ ID NO: 3199 - DNA, 2754 bp, Homosapiens
gtggagctgctgacacaaacagtcattagcagacaacccttttgcaacaaagtatgctttaaaatgtaaactgtggagccattttccttgcgttgtccagaaggaacttcgtcctgcgtgagcctggattaatcatgagagagctcgtcaacattccactggtacatattcttactctggttgccttcagcggaactgagaaacttccaaaagctcctgtcatcaccactcctcttgaaacagtggatgccttagttgaagaagtggctactttcatgtgtgcagtggaatcctacccccagcctgagatttcctggactagaaataaaattctcattaaactctttgacacccggtacagcatccgggagaatgggcagctcctcaccatcctgagtgtggaagacagtgatgatggcatttactgctgcacggccaacaatggtgtgggaggagctgtggagagttgtggagccctgcaagtgaagatgaaacctaaaataactcgtcctcccataaatgtgaaaataatagagggattaaaagcagtcctaccatgtactacaatgggtaatcccaaaccatcagtgtcttggataaagggagacagccctctcagggaaaattcccgaattgcagttcttgaatctgggagcttgaggattcataacgtacaaaaggaagatgcaggacagtatcgatgtgtggcaaaaaacagcctcgggacagcatattccaaagtggtgaagctggaagttgaggtttttgccaggatcctgcgggctcctgaatcccacaatgtcacctttggctcctttgtgaccctgcactgtacagcaacaggcattcctgtccccaccatcacctggattgaaaacggaaatgctgtttcttctgggtccattcaagagagtgtgaaagaccgagtgattgactcaagactgcagctgtttatcaccaagccaggactctacacatgcatagctaccaataagcatggggagaagttcagtactgccaaggctgcagccaccatcagcatagcaggtaggattaaaccacagaaagataacaaaggctactgcgcccagtacagaggggaggtgtgtaatgcagtcctggcaaaagatgctcttgtttttctcaacacctcctatgcggaccctgaggaggcccaagagctactggtccacacggcctggaatgaactgaaagtagtgagcccagtctgccggccagctgctgaggctttgttgtgtaaccacatcttccaggagtgcagtcctggagtagtgcctactcctattcccatttgcagagagtactgcttggcagtaaaggagctcttctgcgcaaaagaatggctggtaatggaagagaagacccacagaggactctacagatccgagatgcatttgctgtccgtgccagaatgcagcaagcttcccagcatgcattgggaccccacggcctgtgccagactgccacatctagattataacaaagaaaacctaaaaacattcccaccaatgacgtcctcaaagccaagtgtggacattccaaatctgccttcctcctcctcttcttccttctctgtctcacctacatactccatgactgtaataatctccatcatgtccagctttgcaatatttgtgcttcttaccataactactctctattgctgccgaagaagaaaacaatggaaaaataagaaaagagaatcagcagcagtaaccctcaccacactgccttctgagctcttactagatagacttcatcccaaccccatgtaccagaggatgccgctccttctgaaccccaaattgctcagcctggagtatccaaggaataacattgaatatgtgagagacatcggagagggagcgtttggaagggtgtttcaagcaagggcaccaggcttacttccctatgaacctttcactatggtggcagtaaagatgctcaaagaagaagcctcggcagatatgcaagcggactttcagagggaggcagccctcatggcagaatttgacaaccctaacattgtgaagctattaggagtgtgtgctgtcgggaagccaatgtgcctgctctttgaatacatggcctatggtgacctcaatgagttcctccgcagcatgtcccctcacaccgtgtgcagcctcagtcacagtgacttgtctatgagggctcaggtctccagccctgggcccccacccctctcctgtgctgagcagctttgcattgccaggcaggtggcagctggcatggcttacctctcagaacgtaagtttgttcaccgagatttagccaccaggaactgcctggtgggcgagaacatggtggtgaaaattgccgactttggcctctccaggaacatctactcagcagactactacaaagctaatgaaaacgacgctatccctatccgttggatgccaccagagtccattttttataaccgctacactacagagtctgatgtgtgggcctatggcgtggtcctctgggagatcttctcctatggcctgcagccctactatgggatggcccatgaggaggtcatttactacgtgcgagatggcaacatcctctcctgccctgagaactgccccgtggagctgtacaatctcatgcgtctatgttggagcaagctgcctgcagacagacccagtttcaccagtattcaccgaattctggaacgcatgtgtgagagggcagagggaactgtgagtgtctaaggttgaagac

SEQ ID NO: 3200 - protein, 869 aa, Homosapiens
MRELVNIPLVHILTLVAFSGTEKLPKAPVITTPLETVDALVEEVATFMCAVESYPQPEISWTRNKILIKLFDTRYSIRENGQLLTILSVEDSDDGIYCCTANNGVGGAVESCGALQVKMKPKITRPPINVKIIEGLKAVLPCTTMGNPKPSVSWIKGDSPLRENSRIAVLESGSLRIHNVQKEDAGQYRCVAKNSLGTAYSKVVKLEVEVFARILRAPESHNVTFGSFVTLHCTATGIPVPTITWIENGNAVSSGSIQESVKDRVIDSRLQLFITKPGLYTCIATNKHGEKFSTAKAAATISIAGRIKPQKDNKGYCAQYRGEVCNAVLAKDALVFLNTSYADPEEAQELLVHTAWNELKVVSPVCRPAAEALLCNHIFQECSPGVVPTPIPICREYCLAVKELFCAKEWLVMEEKTHRGLYRSEMHLLSVPECSKLPSMHWDPTACARLPHLDYNKENLKTFPPMTSSKPSVDIPNLPSSSSSSFSVSPTYSMTVIISIMSSFAIFVLLTITTLYCCRRRKQWKNKKRESAAVTLTTLPSELLLDRLHPNPMYQRMPLLLNPKLLSLEYPRNNIEYVRDIGEGAFGRVFQARAPGLLPYEPFTMVAVKMLKEEASADMQADFQREAALMAEFDNPNIVKLLGVCAVGKPMCLLFEYMAYGDLNEFLRSMSPHTVCSLSHSDLSMRAQVSSPGPPPLSCAEQLCIARQVAAGMAYLSERKFVHRDLATRNCLVGENMVVKIADFGLSRNIYSADYYKANENDAIPIRWMPPESIFYNRYTTESDVWAYGVVLWEIFSYGLQPYYGMAHEEVIYYVRDGNILSCPENCPVELYNLMRLCWSKLPADRPSFTSIHRILERMCERAEGTVSV

SEQ ID NO: 3201 - DNA, 781 bp, Homosapiens
gagagtactgcttggcagtaaaggagctcttctgcgcaaaagaatggctggtaatggaagagaagacccacagaggactctacagatccgagatgcatttgctgtccgtgccagaatgcagcaagcttcccagcatgcattgggaccccacggcctgtgccagactgccacatctagagaatcagcagcagtaaccctcaccacactgccttctgagctcttactagatagacttcatcccaaccccatgtaccagaggatgccgctccttctgaaccccaaattgctcagcctggagtatccaaggaataacattgaatatgtgagagacatcggagagggagcgtttggaagggtgtttcaagcaagggcaccaggcttacttccctatgaacctttcactatggtggcagtaaagatgctcaaagaagaagcctcggcagatatgcaagcggactttcagagggaggcagccctcatggcagaatttgacaaccctaacattgtgaagctattaggtatgaaaatacaagtgaggatatgtatttcatcagaaaacagaggctttccaagtttttctccccttgttcgtgctttttccttttctccttgatcagtgagacgtttcagttccttttcaaatttagcttcttcaccttggtctatcccaaccctataggacattcatggcttaatggattatccctctttaaattcatcacttcaatttgtctctgtctttgctgcctcctatttataaaaatgtttaaaatgtccccat

SEQ ID NO: 3202 - protein, 189 aa, Homosapiens [sequence omitted]

SEQ ID NO: 3203 - DNA, 3659 bp, Homosapiens
gcggacgggctttgtggttgggggcgcgcgtgcgagtgccagtgagagtgtgggtgcgcgctgtgggccgcggcgcgggtgggtggccgtgcgttcttgcgagccggcctgcaggaggcgaggctcccctggcctcccgcacccagcggcggaccgagcccctggagggaagttgccgcagccgcccgggccgccggccctcctgtcccgcgccaggtggacgtctgatttatgaagctccccatccacctatctgagtacctgacttctcaggactgacacctacagcatcaggtacacagcttctcctagcatgacttcgatctgatcagcaaacaagaaaatttgtctcccgtagttctggggcgtgttcaccacctacaaccacagagctgtcatggctgccatctctacttccatccctgtaatttcacagccccagttcacagccatgaatgaaccacagtgcttctacaacgagtccattgccttcttttataaccgaagtggaaagcatcttgccacagaatggaacacagtcagcaagctggtgatgggacttggaatcactgtttgtatcttcatcatgttggccaacctattggtcatggtggcaatctatgtcaaccgccgcttccattttcctatttattacctaatggctaatctggctgctgcagacttctttgctgggttggcctacttctatctcatgttcaacacaggacccaatactcggagactgactgttagcacatggctccttcgtcagggcctcattgacaccagcctgacggcatctgtggccaacttactggctattgcaatcgagaggcacattacggttttccgcatgcagctccacacacggatgagcaaccggcgggtagtggtggtcattgtggtcatctggactatggccatcgttatgggtgctatacccagtgtgggctggaactgtatctgtgatattgaaaattgttccaacatggcacccctctacagtgactcttacttagtcttctgggccattttcaacttggtgacctttgtggtaatggtggttctctatgctcacatctttggctatgttcgccagaggactatgagaatgtctcggcatagttctggaccccggcggaatcgggataccatgatgagtcttctgaagactgtggtcattgtgcttggggcctttatcatctgctggactcctggattggttttgttacttctagacgtgtgctgtccacagtgcgacgtgctggcctatgagaaattcttccttctccttgctgaattcaactctgccatgaaccccatcatttactcctaccgcgacaaagaaatgagcgccacctttaggcagatcctctgctgccagcgcagtgagaaccccaccggccccacagaaggctcagaccgctcggcttcctccctcaaccacaccatcttggctggagttcacagcaatgaccactctgtggtttagaacggaaactgagatgaggaaccagccgtcctctcttggaggataaacagcctccccctacccaattgccagggcaaggtggggtgtgagagaggagaaaagtcaactcatgtacttaaacactaaccaatgacagtatttgttcctggaccccacaagacttgatatatattgaaaattagcttatgtgacaaccctcatcttgatccccatcccttctgaaagtaggaagttggagctcttgcaatggaattcaagaacagactctggagtgtccatttagactacactaactagacttttaaaagattttgtgtggtttggtgcaagtcagaataaattctggctagttgaatccacaacttcatttatatacaggcttcccttttttatttttaaaggatacgtttcacttaataaacacgtttatgcctatcagcatgtttgtgatggatgagactatggactgcttttaaactaccataattccattttttcccttacataggaaaactgtaagttggaattatcttttgtttagaaagcatgcatgtaatgtatgtatgcagtatgccttacttaaaaagattaaaaggatactaatgttaaatcttctaggaaatagaacctagacttcaaagccagtatttgtttaggtcatgaagcaaacaatgctctaatcacaatattaactgtttaattaaaatgttgtaacaagtataaaacagggaatgtaagtttattaccaaagtgatatgtattccaaaaaagtcatagaagatgaagcactataatattgttcccatatatttaaaatacccaagtacattctaattaccagtatatcagaggaaaattttcgtagtctttgtaaaataatatactcatcatagaaaacttgaaaaatgcagaaatgtataaaaaagcaaaaatgattactgataatatcacaacccagaagtaaccacctttaaaaagcaacccccatgtatgcctatatgtgtattgtatactttttttacataattggagtcatactgtaaacagttttataagtagatctttttcattgcaaaattgccacattttcttatggcattaaaaattttacaaaaacataattttaatggctatattatattccatttaatggatgcaactcagtttatttaaccattcccatgttgttaactatttaggttgtttctaattttcattattataaagttgcagaaatttggtgtacataaaactgtctccatataattgattattaggatatattcccatgaaggattctttttttaaaaaaatgtgaaatgtcatcttgtacttacacctttcatgaaaagggatttcctgcttttgtactgcatgggtggcagttgtgaggaaaagccagtcaaatgacctttttacaaaagaaatgcagtggtcacttcagttgagagtgactttttaatacaacaagatcaactagaagaattcaactgtctcaagaatcaaggtaccccaatatatctcgcaattccaaactttgtttgagggactcgttatccagctcttggtagccacacctgcaatgtaaaatggaagaaaatgcaaagaaaccaaatgtgccgagtgaataaaggattgtcatatcaattagtgtgggtccatctgtagcaaatgggttgagtgtgtcagtatgtggttggttactgtgtattcgccaggaatcaccccgataggctgccaccctattaggtgatacctgtttaatatgttgtccaggtagactagtagttgcatcagtttgctgtaacaagtaaccagtgaggtaacacagtggtgaagcaggtcaggggaggtcaggaggatgtctgagagaaagaagtccgggagatgaatggctgtctaggaaggaggatgtcagtgcacggttagtgtttgagcagagggcagacttgtaaagtacctgtagtgaaaagaatgtggggacccgattagcagaaaggtgtttgcacgtactttatacaaaatacagaatactttatattggaagtgaaagaaatgaacgtggacttttacacatgtgcatatttttctggaggctatatggattatttgaaatgaaaagcatactaattggactttaataaatcattttcaatcagcgtttggt

SEQ ID NO: 3204 - protein, 364 aa, Homosapiens; identical to SEQ ID NO: 424

SEQ ID NO: 3205 - DNA, 3610 bp, Homosapiens
acggcgcgctgggctcacactgtcccgccgcggacgggctttgtggttgggggcgcgcgtgcgagtgccagtgagagtgtgggtgcgcgctgtgggccgcggcgcgggtgggtggccgtgcgttcttgcgagccggcctgcaggaggcgaggctcccctggcctcccgcacccagcggcggaccgagcccctggagggaagttgccgcagccgcccgggccgccggccctcctgtcccgcgccaggtacacagcttctcctagcatgacttcgatctgatcagcaaacaagaaaatttgtctcccgtagttctggggcgtgttcaccacctacaaccacagagctgtcatggctgccatctctacttccatccctgtaatttcacagccccagttcacagccatgaatgaaccacagtgcttctacaacgagtccattgccttcttttataaccgaagtggaaagcatcttgccacagaatggaacacagtcagcaagctggtgatgggacttggaatcactgtttgtatcttcatcatgttggccaacctattggtcatggtggcaatctatgtcaaccgccgcttccattttcctatttattacctaatggctaatctggctgctgcagacttctttgctgggttggcctacttctatctcatgttcaacacaggacccaatactcggagactgactgttagcacatggctccttcgtcagggcctcattgacaccagcctgacggcatctgtggccaacttactggctattgcaatcgagaggcacattacggttttccgcatgcagctccacacacggatgagcaaccggcgggtagtggtggtcattgtggtcatctggactatggccatcgttatgggtgctatacccagtgtgggctggaactgtatctgtgatattgaaaattgttccaacatggcacccctctacagtgactcttacttagtcttctgggccattttcaacttggtgacctttgtggtaatggtggttctctatgctcacatctttggctatgttcgccagaggactatgagaatgtctcggcatagttctggaccccggcggaatcgggataccatgatgagtcttctgaagactgtggtcattgtgcttggggcctttatcatctgctggactcctggattggttttgttacttctagacgtgtgctgtccacagtgcgacgtgctggcctatgagaaattcttccttctccttgctgaattcaactctgccatgaaccccatcatttactcctaccgcgacaaagaaatgagcgccacctttaggcagatcctctgctgccagcgcagtgagaaccccaccggccccacagaaggctcagaccgctcggcttcctccctcaaccacaccatcttggctggagttcacagcaatgaccactctgtggtttagaacggaaactgagatgaggaaccagccgtcctctcttggaggataaacagcctccccctacccaattgccagggcaaggtggggtgtgagagaggagaaaagtcaactcatgtacttaaacactaaccaatgacagtatttgttcctggaccccacaagacttgatatatattgaaaattagcttatgtgacaaccctcatcttgatccccatcccttctgaaagtaggaagttggagctcttgcaatggaattcaagaacagactctggagtgtccatttagactacactaactagacttttaaaagattttgtgtggtttggtgcaagtcagaataaattctggctagttgaatccacaacttcatttatatacaggcttcccttttttatttttaaaggatacgtttcacttaataaacacgtttatgcctatcagcatgtttgtgatggatgagactatggactgcttttaaactaccataattccattttttcccttacataggaaaactgtaagttggaattatcttttgtttagaaagcatgcatgtaatgtatgtatgcagtatgccttacttaaaaagattaaaaggatactaatgttaaatcttctaggaaatagaacctagacttcaaagccagtatttgtttaggtcatgaagcaaacaatgctctaatcacaatattaactgtttaattaaaatgttgtaacaagtataaaacagggaatgtaagtttattaccaaagtgatatgtattccaaaaaagtcatagaagatgaagcactataatattgttcccatatatttaaaatacccaagtacattctaattaccagtatatcagaggaaaattttcgtagtctttgtaaaataatatactcatcatagaaaacttgaaaaatgcagaaatgtataaaaaagcaaaaatgattactgataatatcacaacccagaagtaaccacctttaaaaagcaacccccatgtatgcctatatgtgtattgtatactttttttacataattggagtcatactgtaaacagttttataagtagatctttttcattgcaaaattgccacattttcttatggcattaaaaattttacaaaaacataattttaatggctatattatattccatttaatggatgcaactcagtttatttaaccattcccatgttgttaactatttaggttgtttctaattttcattattataaagttgcagaaatttggtgtacataaaactgtctccatataattgattattaggatatattcccatgaaggattctttttttaaaaaaatgtgaaatgtcatcttgtacttacacctttcatgaaaagggatttcctgcttttgtactgcatgggtggcagttgtgaggaaaagccagtcaaatgacctttttacaaaagaaatgcagtggtcacttcagttgagagtgactttttaatacaacaagatcaactagaagaattcaactgtctcaagaatcaaggtaccccaatatatctcgcaattccaaactttgtttgagggactcgttatccagctcttggtagccacacctgcaatgtaaaatggaagaaaatgcaaagaaaccaaatgtgccgagtgaataaaggattgtcatatcaattagtgtgggtccatctgtagcaaatgggttgagtgtgtcagtatgtggttggttactgtgtattcgccaggaatcaccccgataggctgccaccctattaggtgatacctgtttaatatgttgtccaggtagactagtagttgcatcagtttgctgtaacaagtaaccagtgaggtaacacagtggtgaagcaggtcaggggaggtcaggaggatgtctgagagaaagaagtccgggagatgaatggctgtctaggaaggaggatgtcagtgcacggttagtgtttgagcagagggcagacttgtaaagtacctgtagtgaaaagaatgtggggacccgattagcagaaaggtgtttgcacgtactttatacaaaatacagaatactttatattggaagtgaaagaaatgaacgtggacttttacacatgtgcatatttttctggaggctatatggattatttgaaatgaaaagcatactaattggactttaataaatcattttcaatcagcgtttggt

SEQ ID NO: 3206 - protein, 364 aa, Homosapiens; identical to SEQ ID NO: 424

SEQ ID NO: 3207 - DNA, 2995 bp, Homosapiens
agaaagcagggctgcatggtgtggggatgctgctgctactcattcctgctcattccagtgttctggaaaatgaggtggacgtctgatttatgaagctccccatccacctatctgagtacctgacttctcaggactgacacctacagcatcaggtacacagcttctcctagcatgacttcgatctgatcagcaaacaagaaaatttgtctcccgtagttctggggcgtgttcaccacctacaaccacagagctgtcatggctgccatctctacttccatccctgtaatttcacagccccagttcacagccatgaatgaaccacagtgcttctacaacgagtccattgccttcttttataaccgaagtggaaagcatcttgccacagaatggaacacagtcagcaagctggtgatgggacttggaatcactgtttgtatcttcatcatgttggccaacctattggtcatggtggcaatctatgtcaaccgccgcttccattttcctatttattacctaatggctaatctggctgctgcagacttctttgctgggttggcctacttctatctcatgttcaacacaggacccaatactcggagactgactgttagcacatggctccttcgtcagggcctcattgacaccagcctgacggcatctgtggccaacttactggctattgcaatcgagaggcacattacggttttccgcatgcagctccacacacggatgagcaaccggcgggtagtggtggtcattgtggtcatctggactatggccatcgttatgggtgctatacccagtgtgggctggaactgtatctgtgatattgaaaattgttccaacatggcacccctctacagtgactcttacttagtcttctgggccattttcaacttggtgacctttgtggtaatggtggttctctatgctcacatctttggctatgttcgccagaggactatgagaatgtctcggcatagttctggaccccggcggaatcgggataccatgatgagtcttctgaagactgtggtcattgtgcttggggcctttatcatctgctggactcctggattggttttgttacttctagacgtgtgctgtccacagtgcgacgtgctggcctatgagaaattcttccttctccttgctgaattcaactctgccatgaaccccatcatttactcctaccgcgacaaagaaatgagcgccacctttaggcagatcctctgctgccagcgcagtgagaaccccaccggccccacagaaggctcagaccgctcggcttcctccctcaaccacaccatcttggctggagttcacagcaatgaccactctgtggtttagaacggaaactgagatgaggaaccagccgtcctctcttggaggataaacagcctccccctacccaattgccagggcaaggtggggtgtgagagaggagaaaagtcaactcatgtacttaaacactaaccaatgacagtatttgttcctggaccccacaagacttgatatatattgaaaattagcttatgtgacaaccctcatcttgatccccatcccttctgaaagtaggaagttggagctcttgcaatggaattcaagaacagactctggagtgtccatttagactacactaactagacttttaaaagattttgtgtggtttggtgcaagtcagaataaattctggctagttgaatccacaacttcatttatatacaggcttcccttttttatttttaaaggatacgtttcacttaataaacacgtttatgcctatcagcatgtttgtgatggatgagactatggactgcttttaaactaccataattccattttttcccttacataggaaaactgtaagttggaattatcttttgtttagaaagcatgcatgtaatgtatgtatgcagtatgccttacttaaaaagattaaaaggatactaatgttaaatcttctaggaaatagaacctagacttcaaagccagtatttgtttaggtcatgaagcaaacaatgctctaatcacaatattaactgtttaattaaaatgttgtaacaagtataaaacagggaatgtaagtttattaccaaagtgatatgtattccaaaaaagtcatagaagatgaagcactataatattgttcccatatatttaaaatacccaagtacattctaattaccagtatatcagaggaaaattttcgtagtctttgtaaaataatatactcatcatagaaaacttgaaaaatgcagaaatgtataaaaaagcaaaaatgattactgataatatcacaacccagaagtaaccacctttaaaaagcaacccccatgtatgcctatatgtgtattgtatactttttttacataattggagtcatactgtaaacagttttataagtagatctttttcattgcaaaattgccacattttcttatggcattaaaaattttacaaaaacataattttaatggctatattatattccatttaatggatgcaactcagtttatttaaccattcccatgttgttaactatttaggttgtttctaattttcattattataaagttgcagaaatttggtgtacataaaactgtctccatataattgattattaggatatattcccatgaaggattctttttttaaaaaaatgtgaaatgtcatcttgtacttacacctttcatgaaaagggatttcctgcttttgtactgcatgggtggcagttgtgaggaaaagccagtcaaatgacctttttacaaaagaaatgcagtggtcacttcagttgagagtgactttttaatacaacaagatcaactagaagaattcaactgtctcaagaatcaaggtaccccaatatatctcgcaattccaaactttgtttgagggactcgttatccagctcttggtagccacacctgcaatgtaaaatggaagaaaatgcaaagaaaccaaatgtgccgagtgaataaaggattgtcatatc

SEQ ID NO: 3208 - protein, 364 aa, Homosapiens; identical to SEQ ID NO: 424

SEQ ID NO: 3209 - DNA, 3166 bp, Homosapiens
acggcgcgctgggctcacactgtcccgccgcggacgggctttgtggttgggggcgcgcgtgcgagtgccagtgagagtgtgggtgcgcgctgtgggccgcggcgcgggtgggtggccgtgcgttcttgcgagccggcctgcaggaggcgaggctcccctggcctcccgcacccagcggcggaccgagcccctggagggaagttgccgcagccgcccgggccgccggccctcctgtcccgcgccaggtggacgtctgatttatgaagctccccatccacctatctgagtacctgacttctcaggactgacacctacagcatcaggtacacagcttctcctagcatgacttcgatctgatcagcaaacaagaaaatttgtctcccgtagttctggggcgtgttcaccacctacaaccacagagctgtcatggctgccatctctacttccatccctgtaatttcacagccccagttcacagccatgaatgaaccacagtgcttctacaacgagtccattgccttcttttataaccgaagtggaaagcatcttgccacagaatggaacacagtcagcaagctggtgatgggacttggaatcactgtttgtatcttcatcatgttggccaacctattggtcatggtggcaatctatgtcaaccgccgcttccattttcctatttattacctaatggctaatctggctgctgcagacttctttgctgggttggcctacttctatctcatgttcaacacaggacccaatactcggagactgactgttagcacatggctccttcgtcagggcctcattgacaccagcctgacggcatctgtggccaacttactggctattgcaatcgagaggcacattacggttttccgcatgcagctccacacacggatgagcaaccggcgggtagtggtggtcattgtggtcatctggactatggccatcgttatgggtgctatacccagtgtgggctggaactgtatctgtgatattgaaaattgttccaacatggcacccctctacagtgactcttacttagtcttctgggccattttcaacttggtgacctttgtggtaatggtggttctctatgctcacatctttggctatgttcgccagaggactatgagaatgtctcggcatagttctggaccccggcggaatcgggataccatgatgagtcttctgaagactgtggtcattgtgcttggggcctttatcatctgctggactcctggattggttttgttacttctagacgtgtgctgtccacagtgcgacgtgctggcctatgagaaattcttccttctccttgctgaattcaactctgccatgaaccccatcatttactcctaccgcgacaaagaaatgagcgccacctttaggcagatcctctgctgccagcgcagtgagaaccccaccggccccacagaaggctcagaccgctcggcttcctccctcaaccacaccatcttggctggagttcacagcaatgaccactctgtggtttagaacggaaactgagatgaggaaccagccgtcctctcttggaggataaacagcctccccctacccaattgccagggcaaggtggggtgtgagagaggagaaaagtcaactcatgtacttaaacactaaccaatgacagtatttgttcctggaccccacaagacttgatatatattgaaaattagcttatgtgacaaccctcatcttgatccccatcccttctgaaagtaggaagttggagctcttgcaatggaattcaagaacagactctggagtgtccatttagactacactaactagacttttaaaagattttgtgtggtttggtgcaagtcagaataaattctggctagttgaatccacaacttcatttatatacaggcttcccttttttatttttaaaggatacgtttcacttaataaacacgtttatgcctatcagcatgtttgtgatggatgagactatggactgcttttaaactaccataattccattttttcccttacataggaaaactgtaagttggaattatcttttgtttagaaagcatgcatgtaatgtatgtatgcagtatgccttacttaaaaagattaaaaggatactaatgttaaatcttctaggaaatagaacctagacttcaaagccagtatttgtttaggtcatgaagcaaacaatgctctaatcacaatattaactgtttaattaaaatgttgtaacaagtataaaacagggaatgtaagtttattaccaaagtgatatgtattccaaaaaagtcatagaagatgaagcactataatattgttcccatatatttaaaatacccaagtacattctaattaccagtatatcagaggaaaattttcgtagtctttgtaaaataatatactcatcatagaaaacttgaaaaatgcagaaatgtataaaaaagcaaaaatgattactgataatatcacaacccagaagtaaccacctttaaaaagcaacccccatgtatgcctatatgtgtattgtatactttttttacataattggagtcatactgtaaacagttttataagtagatctttttcattgcaaaattgccacattttcttatggcattaaaaattttacaaaaacataattttaatggctatattatattccatttaatggatgcaactcagtttatttaaccattcccatgttgttaactatttaggttgtttctaattttcattattataaagttgcagaaatttggtgtacataaaactgtctccatataattgattattaggatatattcccatgaaggattctttttttaaaaaaatgtgaaatgtcatcttgtacttacacctttcatgaaaagggatttcctgcttttgtactgcatgggtggcagttgtgaggaaaagccagtcaaatgacctttttacaaaagaaatgcagtggtcacttcagttgagagtgactttttaatacaacaagatcaactagaagaattcaactgtctcaagaatcaaggtaccccaatatatctcgcaattccaaactttgtttgagggactcgttatccagctcttggtagccacacctgcaatgtaaaatggaagaaaatgcaaagaaaccaaatgtgccgagtgaataaaggattgtcatatc

SEQ ID NO: 3210 - protein, 364 aa, Homosapiens; identical to SEQ ID NO: 424

SEQ ID NO: 3211 - DNA, 3088 bp, Homosapiens
acggcgcgctgggctcacactgtcccgccgcggacgggctttgtggttgggggcgcgcgtgcgagtgccagtgagagtgtgggtgcgcgctgtgggccgcggcgcgggtgggtggccgtgcgttcttgcgagccggcctgcaggaggcgaggctcccctggcctcccgcacccagcggcggaccgagcccctggagggaagttgccgcagccgcccgggccgccggccctcctgtcccgcgccaggtacacagcttctcctagcatgacttcgatctgatcagcaaacaagaaaatttgtctcccgtagttctggggcgtgttcaccacctacaaccacagagctgtcatggctgccatctctacttccatccctgtaatttcacagccccagttcacagccatgaatgaaccacagtgcttctacaacgagtccattgccttcttttataaccgaagtggaaagcatcttgccacagaatggaacacagtcagcaagctggtgatgggacttggaatcactgtttgtatcttcatcatgttggccaacctattggtcatggtggcaatctatgtcaaccgccgcttccattttcctatttattacctaatggctaatctggctgctgcagacttctttgctgggttggcctacttctatctcatgttcaacacaggacccaatactcggagactgactgttagcacatggctccttcgtcagggcctcattgacaccagcctgacggcatctgtggccaacttactggctattgcaatcgagaggcacattacggttttccgcatgcagctccacacacggatgagcaaccggcgggtagtggtggtcattgtggtcatctggactatggccatcgttatgggtgctatacccagtgtgggctggaactgtatctgtgatattgaaaattgttccaacatggcacccctctacagtgactcttacttagtcttctgggccattttcaacttggtgacctttgtggtaatggtggttctctatgctcacatctttggctatgttcgccagaggactatgagaatgtctcggcatagttctggaccccggcggaatcgggataccatgatgagtcttctgaagactgtggtcattgtgcttggggcctttatcatctgctggactcctggattggttttgttacttctagacgtgtgctgtccacagtgcgacgtgctggcctatgagaaattcttccttctccttgctgaattcaactctgccatgaaccccatcatttactcctaccgcgacaaagaaatgagcgccacctttaggcagatcctctgctgccagcgcagtgagaaccccaccggccccacagaaggctcagaccgctcggcttcctccctcaaccacaccatcttggctggagttcacagcaatgaccactctgtggtttagaacggaaactgagatgaggaaccagccgtcctctcttggaggataaacagcctccccctacccaattgccagggcaaggtggggtgtgagagaggagaaaagtcaactcatgtacttaaacactaaccaatgacagtatttgttcctggaccccacaagacttgatatatattgaaaattagcttatgtgacaaccctcatcttgatccccatcccttctgaaagtaggaagttggagctcttgcaatggaattcaagaacagactctggagtgtccatttagactacactaactagacttttaaaagattttgtgtggtttggtgcaagtcagaataaattctggctagttgaatccacaacttcatttatatacaggcttcccttttttatttttaaaggatacgtttcacttaataaacacgtttatgcctatcagcatgtttgtgatggatgagactatggactgcttttaaactaccataattccattttttcccttacataggaaaactgtaagttggaattatcttttgtttagaaagcatgcatgtaatgtatgtatgcagtatgccttacttaaaaagattaaaaggatactaatgttaaatcttctaggaaatagaacctagacttcaaagccagtatttgtttaggtcatgaagcaaacaatgctctaatcacaatattaactgtttaattaaaatgttgtaacaagtataaaacagggaatgtaagtttattaccaaagtgatatgtattccaaaaaagtcatagaagatgaagcactataatattgttcccatatatttaaaatacccaagtacattctaattaccagtatatcagaggaaaattttcgtagtctttgtaaaataatatactcatcatagaaaacttgaaaaatgcagaaatgtataaaaaagcaaaaatgattactgataatatcacaacccagaagtaaccacctttaaaaagcaacccccatgtatgcctatatgtgtattgtatactttttttacataattggagtcatactgtaaacagttttataagtagatctttttcattgcaaaattgccacattttcttatggcattaaaaattttacaaaaacataattttaatggctatattatattccatttaatggatgcaactcagtttatttaaccattcccatgttgttaactatttaggttgtttctaattttcattattataaagttgcagaaatttggtgtacataaaactgtctccatataattgattattaggatatattcccatgaaggattctttttttaaaaaaatgtgaaatgtcatcttgtacttacacctttcatgaaaagggatttcctgcttttgtactgcatgggtggcagttgtgaggaaaagccagtcaaatgacctttttacaaaagaaatgcagtggtcacttcagttgagagtgactttttaatacaacaagatcaactagaagaattcaactgtctcaagaatcaaggtaccccaatatatctcgcaattccaaactttgtttgagggactcgttatccagctcttggtagccacacctgcaatgtaaaatggaagaaaatgcaaagaaaccaaatgtgccgagtgaataaaggattgtcatatc

SEQ ID NO: 3212 - protein, 364 aa, Homosapiens; identical to SEQ ID NO: 424

SEQ ID NO: 3213 - DNA, 4740 bp, Homosapiens
atgggacacaattgcaaaatgccaagaactggagctcaggatggagcatggatccaaaagcaggttgtttttgaaggtcaaatggcttcaacgtatgaacaggatgaagtcattgctattgatgatatatctttcagttcaggctgcttgcctgccaatgatggaattttactgtgtcaagaagcattgaatgctgagcgggagctatgccatccagatacagatctctgcagatttgatgctacagatgaagagttgagattgtgtcaggcctgtgggtttgaatttgacatgtgtgagtggacgtcagaagcatctgctggccaaatttcctggatgcgcacaaaagcgagagagatccctgcattcgaatccacacctcagcaggatcaaggaggtgatgatgaaggttattatgtatgggtaggcgctaagcatggtttcactcttaaccatttagacagcagggcttacctaaatagctctgtgtgtcattgcctgggcaagagctgtcatcttcaattctattatgcaatggaaagcagtgtcctgagagtaagactgtataataataaggaagaagaaatattttggacatacaacatatcaactcacagccaatgggtgaaagcagatgtgttaataccagaagatctgaagacatttaagacccaatccagaaagctttgctctgcagacgaattcccttgcactagtggccagtgcatcgccaaagaatctgtctgtgactctcggcaggactgctccgatgagagtgatgaagacccagcaacttgctcaaagcatctcacctgtgactttgagtcgggtttctgcggttgggagccatttctcacagaagattcacactggaagctgatgaaaggattgaataatggagagcaccactttcctgcagctgatcacacagcaaacataaatcatgtttccaagtgtgactttgaagcaaacagctgtgattggtttgaagcaattagtggtgaccattttgactggatacggagctctcagagtgaactttctgctgattttgagcaccaggctccacctcgggatcatagtctcaacgcatctcaagggcattttatgttcattctgaagaaaagcagcagcttgtggcaagttgctaagcttcagagcccaactttcagccagacaggacctggatgcatactttccttctggttctataactatggcctgtcagtgggagcagctgagctgcagctacatatggaaaattctcatgactcaacagtgatttggagagtattatacaatcagggcaaacaatggttggaggcaaccattcagctagggcgcctttcgcagcccttccatttgtcactagataaagtcagtctgggcatttatgatggggtctcagctattgatgacatccgatttgaaaattgtactctccctcttcctgctgagagctgtgaagggctggatcatttctggtgtcgccacaccagggcttgcatagaaaagcttcggttatgtgatctggtggatgactgtggtgatcgtactgatgaagtcaactgtgcacctgagctgcagtgtaactttgaaactggaatctgtaactgggaacaagatgcaaaagatgactttgattggaccaggagccagggtccaactccaacacttaacacagggccaatgaaagataacactctgggcacagctaaaggacactatctctacatagaatcttcagagccacaggcttttcaagacagtgctgccttactcagcccaatccttaatgccactgatacaaaaggctgcaccttccgcttctattaccacatgtttggaaagcgcatttataggttggcaatctaccaacgaatctggagtgactcaaggggacagctgctgtggcagatatttgggaatcaaggcaacagatggattaggaaacacctcaacatttccagcaggcagccctttcagatattggtggaggcttcagtgggagatggcttcactggagatattgcgattgatgatctgtcatttatggactgcaccctctaccctggtaatttgccagcagacctcccaactccaccagaaacgtcagttcctgtaacattacctccacacaactgcacagacaatgaatttatctgcaggtctgatggtcactgcattgaaaaaatgcagaaatgtgattttaaatatgactgccctgacaaatcagatgaagcatcctgtgttatggaagtttgcagctttgagaaaagaagcctgtgtaaatggtatcaaccaatcccagtacatttgcttcaagattcaaacacattcaggtgggggcttgggaacgggatcagcattcatcatggggaagaaaaccacaggccatcagtggatcatacacaaaataccactgatggctggtacctgtatgctgacagttctaatgggaaatttggtgacacggctgacattctcactcctatcatttcactcacgggaccaaaatgtaccttggtgttctggacacatatgaatggggccaccgttggttctctccaggtgctcatcaagaaagataacgttacttctaaattgtgggctcaaactggacagcaaggtgcacagtggaagagagcagaagtgtttttaggcattcgttcacatacacagattgtcttcagagccaaacgtggtatcagttacataggagatgtagcagtggatgatatttccttccaagattgctcccctttgcttagcccagagagaaagtgtactgatcatgaattcatgtgtgctaataagcactgcattgccaaagacaagctgtgtgattttgtgaatgattgtgctgataattcagatgagactactttcatttgccgtacctccagtgggcgctgtgatttcgaatttgatctttgttcctggaagcaggagaaagatgaggactttgactggaacctgaaagctagcagcatccctgcagcaggcacagagccagcagcagatcacactttgggaaattcatctggtcattacatctttataaagagtttgtttcctcagcagcccatgagagctgccagaatttcaagtccagttataagtaagagaagcaaaaactgcaagattatttttcattatcacatgtatggaaatggcattggggcactcaccttaatgcaggtgtcagtcacaaaccaaacgaaggttctacttaacctcactgtagaacaaggcaatttctggcggagagaagaactgtcactgtttggtgatgaagacttccaactcaaatttgaaggtagagttgggaaaggtcagcgtggagacattgcacttgatgacattgtgcttacagaaaattgtctatcactccatgattccgtgcaagaagaactggcagtgcctcttccaacagggcacttcatgtatctggaagctactgcagtgggccttcggggtgacaaagcacacttcaggagtaccatgtggcgagaatccagtgcagcctgcaccatgagcttctggtatttcgtatctgcaaaggccacaggatccattcagattctcatcaaggtggcatgtggcctgagggagttgacttggctagagaaggccccctgtttttcaaaggtgccatctcctgtggctgaaatgatctatggggtttgggtagtagcaaatgtgatagacatttccagaaattccattaatgtttttgcttccccagcacattatacaagcacaacaggaagctgcaattttgaaacaagttcaggaaactggaccacagcctgcagtcttactcaagactctgaggatgacttggactgggccattggcagcagaattcctgccaaagcattaattccagactctgatcacacgccaggtagtggtcagcacttcctgtacgtcaactcatctggctccaaggaaggatccgttgccagaattactacttccaaatccttcccagcaagccttggaatgtgtactgttcggttctggttctacatgattgatcccaggagtatgggaatattaaaggtgtataccattgaagaatcggggctaaacatcctggtgtggtcagtgattggaaataaaagaacgggatggacatatggctctgtgcctctctccagtaacagtccgtttaaggtggcatttgaagctgatttggatggaaatgaggacatctttattgctcttgatgacatctcttttaccccagagtgtgtgactggaggtcctgtcccagtgcagccatcaccctgtgaagctgatcagttttcttgtatctacacactccaatgtgtccctctctcagggaaatgtgatggacatgaagactgcatagatggatctgatgaaatggattgtcctctcagccccacccctccactctgtagtaacatggagttcccgtgctctacagacgagtgtataccttccctcctgctatgcgatggagtgcccgactgccactttaatgaagatgagctcatctgctccaacaaaagctgttctaatggagctctggtgtgtgcctcctccaacagctgtatcccagcccaccagcgctgtgatggttttgccgactgcatggatttccagcttgatgagtccagctgctccggtaccccatttccattcagatattcttgtgatatgaaccagcaacttaacctgcaacacaatgaaaatattaaaacttga

SEQ ID NO: 3214 - protein, 1579 aa, Homosapiens
MGHNCKMPRTGAQDGAWIQKQVVFEGQMASTYEQDEVIAIDDISFSSGCLPANDGILLCQEALNAERELCHPDTDLCRFDATDEELRLCQACGFEFDMCEWTSEASAGQISWMRTKAREIPAFESTPQQDQGGDDEGYYVWVGAKHGFTLNHLDSRAYLNSSVCHCLGKSCHLQFYYAMESSVLRVRLYNNKEEEIFWTYNISTHSQWVKADVLIPEDLKTFKTQSRKLCSADEFPCTSGQCIAKESVCDSRQDCSDESDEDPATCSKHLTCDFESGFCGWEPFLTEDSHWKLMKGLNNGEHHFPAADHTANINHVSKCDFEANSCDWFEAISGDHFDWIRSSQSELSADFEHQAPPRDHSLNASQGHFMFILKKSSSLWQVAKLQSPTFSQTGPGCILSFWFYNYGLSVGAAELQLHMENSHDSTVIWRVLYNQGKQWLEATIQLGRLSQPFHLSLDKVSLGIYDGVSAIDDIRFENCTLPLPAESCEGLDHFWCRHTRACIEKLRLCDLVDDCGDRTDEVNCAPELQCNFETGICNWEQDAKDDFDWTRSQGPTPTLNTGPMKDNTLGTAKGHYLYIESSEPQAFQDSAALLSPILNATDTKGCTFRFYYHMFGKRIYRLAIYQRIWSDSRGQLLWQIFGNQGNRWIRKHLNISSRQPFQILVEASVGDGFTGDIAIDDLSFMDCTLYPGNLPADLPTPPETSVPVTLPPHNCTDNEFICRSDGHCIEKMQKCDFKYDCPDKSDEASCVMEVCSFEKRSLCKWYQPIPVHLLQDSNTFRWGLGNGISIHHGEENHRPSVDHTQNTTDGWYLYADSSNGKFGDTADILTPIISLTGPKCTLVFWTHMNGATVGSLQVLIKKDNVTSKLWAQTGQQGAQWKRAEVFLGIRSHTQIVFRAKRGISYIGDVAVDDISFQDCSPLLSPERKCTDHEFMCANKHCIAKDKLCDFVNDCADNSDETTFICRTSSGRCDFEFDLCSWKQEKDEDFDWNLKASSIPAAGTEPAADHTLGNSSGHYIFIKSLFPQQPMRAARISSPVISKRSKNCKIIFHYHMYGNGIGALTLMQVSVTNQTKVLLNLTVEQGNFWRREELSLFGDEDFQLKFEGRVGKGQRGDIALDDIVLTENCLSLHDSVQEELAVPLPTGHFMYLEATAVGLRGDKAHFRSTMWRESSAACTMSFWYFVSAKATGSIQILIKVACGLRELTWLEKAPCFSKVPSPVAEMIYGVWVVANVIDISRNSINVFASPAHYTSTTGSCNFETSSGNWTTACSLTQDSEDDLDWAIGSRIPAKALIPDSDHTPGSGQHFLYVNSSGSKEGSVARITTSKSFPASLGMCTVRFWFYMIDPRSMGILKVYTIEESGLNILVWSVIGNKRTGWTYGSVPLSSNSPFKVAFEADLDGNEDIFIALDDISFTPECVTGGPVPVQPSPCEADQFSCIYTLQCVPLSGKCDGHEDCIDGSDEMDCPLSPTPPLCSNMEFPCSTDECIPSLLLCDGVPDCHFNEDELICSNKSCSNGALVCASSNSCIPAHQRCDGFADCMDFQLDESSCSGTPFPFRYSCDMNQQLNLQHNENIKT

SEQ ID NO: 3215 - DNA, 456 bp, Homosapiens
atgcttgcggaatatggagacttagatcttcagctcggcattgttctggattctgttggaaaaccgagggaagtggtaactgtgcctttgtcaatccagtttacgggaactggagcaacccagagaaaacagagagttctgtctattccttctcaaacccattatatggcacaacatcaggaagcctggagaccctgtcacatcatctcaaatagcagcatcgagaccaagtctgatccaacatgtgtagtttctagaaaattgaagtctccacaatctgatagaaactcatcttctacaatggtaaaaagagaaaggattgtaaatgccagtgtaattataacatttatgaatgaattttcttgcagaatatagagaatgtttatatggaatcagaatcagtaccttatcttcactgaacatctgaatattttaataaaatttctatttaatcaa

SEQ ID NO: 3216 - protein, 124 aa, Homosapiens
MLAEYGDLDLQLGIVLDSVGKPREVVTVPLSIQFTGTGATQRKQRVLSIPSQTHYMAQHQEAWRPCHIISNSSIETKSDPTCVVSRKLKSPQSDRNSSSTMVKRERIVNASVIITFMNEFSCRI

SEQ ID NO: 3217 - DNA, 414 bp, Homosapiens
tgccatatcaagtttaatcctcctgctacagacttcacatacgctcagaataatacatggactctcctgggtattggattagcattcctgatgactcacatcacagttgcagtcttgtgttttcttgcaaacagaaaggtaccaataagaggagaaatgtgatgctcagagggtgtggctgacaagctccaggacacaggtaataagtaaaatctagatctcgggtctttcaattgaaactagaaacataggaaacaacaacagaagtcacaacaatttaacagttatttagaggtgtcagtgatttgggatttaaaaatatggaatttaacatttctggtttcaaagtcaatacacagcttccatatgacactatagagtaagtaaaaaataaaagataatttatctgatgta

SEQ ID NO: 3218 - protein, 41 aa, Homosapiens
MDSPGYWISIPDDSHHSCSLVFSCKQKGTNKRRNVMLRGCG

SEQ ID NO: 3219 - DNA, 474 bp, Homosapiens
ttggattagcattcctgatgactcacatcacagttgcagtcttgtgttttcttgcaaacagaaaggtaccaataaggaaaaccgagggaagtggtaactgtgcctttgtcaatccagtttacgggaactggagcaacccagagaaaacagagagttctgtctattccttctcaaacccattatatggcacaacatcaggaagcctggagaccctgtcacatcatctcaaatagcagcatcgagaccaagtctgatccaacatgtgtagtttctagaaaattgaagtctccacaatctgatagaaactcatcttctacaatggtaaaaagagaaaggattgtaaatgccagtgtaattataacatttatgaatgaattttcttgcagaatatagagaatgtttatatggaatcagaatcagtaccttatcttcactgaacatctgaatattttaataaaatttctatttaatcaa

SEQ ID NO: 3220 - protein, 71 aa, Homosapiens
MTHITVAVLCFLANRKVPIRKTEGSGNCAFVNPVYGNWSNPEKTESSVYSFSNPLYGTTSGSLETLSHHLK

SEQ ID NO: 3221 - DNA, 1399 bp, Homosapiens
aggagctgaagggaccagcttggccgtcagttgcaagggtgtgaggcagaagcaacacaaaagatcttgatatgaagcaattatttttggtcttaaactgctgggactccagatgacccagaccacggtcagcaggcagaagccagagatgacatctcactatattgcccaggctggtcttgaacttctagcctcaagcaatcctcccacctcagcctctgaacgtactggaattacagatggagcaactgagattcttccccaactagactataagttctctgagggataaggaacatgtctggtttcctcatctctctgtcacagcaccctgtgaatgcctagaagacaaatgaaatgggtcagcatctgacatactgcataaatcactgaaccaatattttctaaatgtaacatgcatgatggtacaaaatcacacatagatgaaaatcaactggtctttgaagaactttgattcattagtgagcttgaaaacccaacacaataaacagatagtggaagtggaaggagtatccctaaggatgcatttaaggagaaatgatgtgacagaagatttgaaagcaaaaaagaatctatcaggaagataagaaagcaattattaaacaaaaattaagaagccaatcgccctcccaagtttctaccccttggtaacattactgattcacactagtcaaaagtgctgaataatttgctacatgccattggaaaactatataacttactactaataaaacacctcacttctttttactgtctttcttcatttacccaagtcacctcttttaagagccatctttgatttgcctacaacacattcatctacactgattgcttgtacaagaaaacaatgcaacccagcaatgtcagagactgaaaggttgtcttcttgctgtgtaagatttactgtgaatagagggaggatgtggaaaaacgctacaaccattgctccagggactatctctgccaaacagagatattatactgacgaaatgataatggtgaaatagctgtcagaccaaataattagaatatggagccgtaatacagtaaagtagtcttcatatattttatacagtttgtattgttctataggttgcttggagtttgtgtccagtgaaaatggatttagaacaacctgggatacttagtaataacaacgcacaaacatgtgtatacacaccaaagaagtgtgcattattcaataaatgtgttcctgatatgttgcatgtaaactgattttgtatggtcaaataatatcttaaatgatcaaggaattgattaaagaaatatgagatattagttacaaaaggaaatcattttgaaatacacgtgaaattttaaatcatgtttcatcaataaatatgattattactttttt

SEQ ID NO: 3222 - protein, 59 aa, Homosapiens
MTQTTVSRQKPEMTSHYIAQAGLELLASSNPPTSASERTGITDGATEILPQLDYKFSEG

SEQ ID NO: 3223 - DNA, 904 bp, Homosapiens
agttgcaagggtgtgaggcagaagcaacacaaaagatcttgatatgaagcaattatttttggtcttaaactgctgggactccagatgacccagaccacggtcagcaggcagaagccagatgctattgtcaacagaattgccttcaagattccttttctgattgttcattgctgagatgacatctcactatattgcccaggctggtcttgaacttctagcctcaagcaatcctcccacctcagcctctgaacgtactggaattacagatggagcaactgagattcttccccaactagactataagttctctgagggataaggaacatgtctggtttcctcatctctctgtcacagcaccctgtgaatgcctagaagacagtaagaatcaactgaatgtttgtagaaagaataacgatacttacctatagtctaaaggtttagtgatgaaatgaagtccactaacttctctctgcttacttccaccctcaataacatatttcctcaaaccccacagaggaaagacaattcattttttactattgtttaatagagccatgtttgtatgtagcttcctgttccgcttagcccaagacattaagtgggtcaggagtaaactctgccctctgtttttttccattcctttgtcacctgctcaagtggcagcccagagccgcttggcggcttccctgaagatgagcagagtgcagtagattaggcatggcctttctatctatttctactatggagaagctgaaaaagctatatggctggaaaaaaatcaccttggtactaatttgctattttacaatatttgaaaataaagacctgtggtcttcctatgtatttctttttaaacaatgaggggtatggaacatctatgaataaacatcaaggtcttcaagtg

SEQ ID NO: 3224 - protein, 47 aa, Homosapiens
MTSHYIAQAGLELLASSNPPTSASERTGITDGATEILPQLDYKFSEG

SEQ ID NO: 3225 - DNA, 877 bp, Homosapiens
aggagctgaagggaccagcttggccgtcagttgcaagggtgtgaggcagaagcaacacaaaagatcttgatatgaagcaattatttttggtcttaaactgctgggactccagatgacccagaccacggtcagcaggcagaagccagagatgacatctcactatattgcccaggctggtcttgaacttctagcctcaagcaatcctcccacctcagcctctgaacgtactggaattacagatggagcaactgagattcttccccaactagactataagttctctgagggataaggaacatgtctggtttcctcatctctctgtcacagcaccctgtgaatgcctagaagacagtaagaatcaactgaatgtttgtagaaagaataacgatacttacctatagtctaaaggtttagtgatgaaatgaagtccactaacttctctctgcttacttccaccctcaataacatatttcctcaaaccccacagaggaaagacaattcattttttactattgtttaatagagccatgtttgtatgtagcttcctgttccgcttagcccaagacattaagtgggtcaggagtaaactctgccctctgtttttttccattcctttgtcacctgctcaagtggcagcccagagccgcttggcggcttccctgaagatgagcagagtgcagtagattaggcatggcctttctatctatttctactatggagaagctgaaaaagctatatggctggaaaaaaatcaccttggtactaatttgctattttacaatatttgaaaataaagacctgtggtcttcctatgtatttctttttaaacaatgaggggtatggaacatctatgaataaacatcaaggtcttcaagtg

SEQ ID NO: 3226 - protein, 59 aa, Homosapiens; identical to SEQ ID NO: 3222

SEQ ID NO: 3227 - DNA, 685 bp, Homosapiens
agcagaaagaaatgggcctttctctgcctctgaactttactgcgaacacaacgatgctgcagctcatggagccctcatctaacctgtaggaaagctaacctgagagcacaggctgggaagtgaaactcatcaaccaatgagaagatgagtttctatcagattgtggagacttcaattttctagaaactacacatgttggatcagacttggtctcgatgctgctatttgagatgatgtgacagggtctccaggcttcctgatgttgtgccatataatgggtttgagaaggaatagacagaactctgacgaagaaaaacacatttgaaagggtggaattttaggcattaagataagaaaactctttaaagatcacgcagaatgcagcaaaggtcccaatggattttcactggagtaataactagaacatccctgactcttcttccagcacctacagcccacactgcttgagtttctgacacaagcctagattccatgtatcctggggtcctcaggacttaggcaccactgcctcacctctggtcgggtggggaaatgcaatgaccaatatttcgactactgctttctctggtgctggtttcactaagccttctgtattgaatatagttaggttagacaaaacaaaacaaaaccaatgcctttaagtaaataaaagcattttatataa

SEQ ID NO: 3228 - protein, 34 aa, Homosapiens
MTNISTTAFSGAGFTKPSVLNIVRLDKTKQNQCL

SEQ ID NO: 3229 - DNA, 2625 bp, Homosapiens
tggcttcggacctcagactgctgcagccctaaccttcccagggctcagctctttggagctgcccattcctccggctgcgagaaaggacgcgcgccctgcgtcgggcgaagaaaagaagcaaaacttgtcgggagggtttcgtcatcaacctccttcccgcaaacctaaacctcctgccggggccatccctagacagaggaaagttcctgcagagccgaccagccctagtggatctggggcaggcagcggcgctggctgtggaattagatctgttttgaacccagtggagcgcatcgctggggctcggaagtcaccgtccgcgggcaccgggttggcgctgcccgagtggaaccgacagtttgcgagcctcggctgcaagtggcctctcctccccgcggttgttgttcagtgtcgggtgagggctgcgagtgtggcaagttgcaaagagagcctcagaggtccgaagagcgctgcgctcctactcgcgttcgcttcttcctcttctcggttccctactgtgaaatcgcagcgacatttacaaaggcctccgggtcctaccgagaccgatccgcagcgtttggcccggtcgtgcctattgcatcgggagcccccgagcaccggcgaaggactggcgggtggggtagggaggtggcggcggcggcatggcgaggttcccgaaggccgacctggccgctgcaggagttatgttactttgccacttcttcacggaccagtttcagttcgccgatgggaaacccggagaccaaatccttgattggcagtatggagttactcaggccttccctcacacagaggaggaggtggaagttgattcacacgcgtacagccacaggtggaaaagaaacttggactttctcaaggcggtagacacgaaccgagcaagcgtcggccaagactctcctgagcccagaagcttcacagacctgctgctggatgatgggcaggacaataacactcagatcgaggaggatacagaccacaattactatatatctcgaatatatggtccatctgattctgccagccgggatttatgggtgaacatagaccaaatggaaaaagataaagtgaagattcatggaatattgtccaatactcatcggcaagctgcaagagtgaatctgtccttcgattttccattttatggccacttcctacgtgaaatcactgtggcaaccgggggtttcatatacactggagaagtcgtacatcgaatgctaacagccacacagtacatagcacctttaatggcaaatttcgatcccagtgtatccagaaattcaactgtcagatattttgataatggcacagcacttgtggtccagtgggaccatgtacatctccaggataattataacctgggaagcttcacattccaggcaaccctgctcatggatggacgaatcatctttggatacaaagaaattcctgtcttggtcacacagataagttcaaccaatcatccagtgaaagtcggactgtccgatgcatttgtcgttgtccacaggatccaacaaattcccaatgttcgaagaagaacaatttatgaataccaccgagtagagctacaaatgtcaaaaattaccaacatttcggctgtggagatgaccccattacccacatgcctccagtttaacagatgtggcccctgtgtatcttctcagattggcttcaactgcagttggtgtagtaaacttcaaagatgttccagtggatttgatcgtcatcggcaggactgggtggacagtggatgccctgaagagtcaaaagagaagatgtgtgagaatacagaaccagtggaaacttcttctcgaaccaccacaaccgtaggagcgacaaccacccagttcagggtcctaactaccaccagaagagcagtgacttctcagtttcccaccagcctccctacagaagatgataccaagatagcactacatctaaaagataatggagcttctacagatgacagtgcagctgagaagaaagggggaaccctccacgctggcctcatcattggaatcctcatcctggtcctcattgtagccacagccattcttgtgacagtctatatgtatcaccacccaacatcagcagccagcatcttctttattgagagacgcccaagcagatggcctgcgatgaagtttagaagaggctctggacatcctgcctatgctgaagttgaaccagttggagagaaagaaggctttattgtatcagagcagtgctaaaatttctaggacagaacaacaccagtactggtttacaggtgttaagactaaaattttgcctatacctttaagacaaacaaacaaacacacacacaaacaagctctaagctgctgtagcctgaagaagacaagatttctggacaagctcagcccaggaaacaaagggtaaacaaaaaactaaaacttatacaagataccatttacactgaacatagaattccctagtggaatgtcatctatagttcactcggaacatctcccgtggacttatctgaagtatgacaagattataatgcttttggcttaggtgcagggttgcaaagggatcagaaaaaaaaaatcataataaagctttagttcatgagggatcgac

SEQ ID NO: 3230 - protein, 529 aa, Homosapiens; identical to SEQ ID NO: 430

SEQ ID NO: 3231 - DNA, 2478 bp, Homosapiens
tggcttcggacctcagactgctgcagccctaaccttcccagggctcagctctttggagctgcccattcctccggctgcgagaaaggacgcgcgccctgcgtcgggcgaagaaaagaagcaaaacttgtcgggagggtttcgtcatcaacctccttcccgcaaacctaaacctcctgccggggccatccctagacagaggaaagttcctgcagagccgaccagccctagtggatctggggcaggcagcggcgctggctgtggaattagatctgttttgaacccagtggagcgcatcgctggggctcggaagtcaccgtccgcgggcaccgggttggcgctgcccgagtggaaccgacagtttgcgagcctcggctgcaagtggcctctcctccccgcggttgttgttcagtgtcgggtgagggctgcgagtgtggcaagttgcaaagagagcctcagaggtccgaagagcgctgcgctcctactcgcgttcgcttcttcctcttctcggttccctactgtgaaatcgcagcgacatttacaaaggcctccgggtcctaccgagaccgatccgcagcgtttggcccggtcgtgcctattgcatcgggagcccccgagcaccggcgaaggactggcgggtggggtagggaggtggcggcggcggcatggcgaggttcccgaaggccgacctggccgctgcaggagttatgttactttgccacttcttcacggaccagtttcagttcgccgatgggaaacccggagaccaaatccttgattggcagtatggagttactcaggccttccctcacacagaggaggaggtggaagttgattcacacgcgtacagccacaggtggaaaagaaacttggactttctcaaggcggtagacacgaaccgagcaagcgtcggccaagactctcctgagcccagaagcttcacagacctgctgctggatgatgggcaggacaataacactcagatcgagagagtgaatctgtccttcgattttccattttatggccacttcctacgtgaaatcactgtggcaaccgggggtttcatatacactggagaagtcgtacatcgaatgctaacagccacacagtacatagcacctttaatggcaaatttcgatcccagtgtatccagaaattcaactgtcagatattttgataatggcacagcacttgtggtccagtgggaccatgtacatctccaggataattataacctgggaagcttcacattccaggcaaccctgctcatggatggacgaatcatctttggatacaaagaaattcctgtcttggtcacacagataagttcaaccaatcatccagtgaaagtcggactgtccgatgcatttgtcgttgtccacaggatccaacaaattcccaatgttcgaagaagaacaatttatgaataccaccgagtagagctacaaatgtcaaaaattaccaacatttcggctgtggagatgaccccattacccacatgcctccagtttaacagatgtggcccctgtgtatcttctcagattggcttcaactgcagttggtgtagtaaacttcaaagatgttccagtggatttgatcgtcatcggcaggactgggtggacagtggatgccctgaagagtcaaaagagaagatgtgtgagaatacagaaccagtggaaacttcttctcgaaccaccacaaccgtaggagcgacaaccacccagttcagggtcctaactaccaccagaagagcagtgacttctcagtttcccaccagcctccctacagaagatgataccaagatagcactacatctaaaagataatggagcttctacagatgacagtgcagctgagaagaaagggggaaccctccacgctggcctcatcattggaatcctcatcctggtcctcattgtagccacagccattcttgtgacagtctatatgtatcaccacccaacatcagcagccagcatcttctttattgagagacgcccaagcagatggcctgcgatgaagtttagaagaggctctggacatcctgcctatgctgaagttgaaccagttggagagaaagaaggctttattgtatcagagcagtgctaaaatttctaggacagaacaacaccagtactggtttacaggtgttaagactaaaattttgcctatacctttaagacaaacaaacaaacacacacacaaacaagctctaagctgctgtagcctgaagaagacaagatttctggacaagctcagcccaggaaacaaagggtaaacaaaaaactaaaacttatacaagataccatttacactgaacatagaattccctagtggaatgtcatctatagttcactcggaacatctcccgtggacttatctgaagtatgacaagattataatgcttttggcttaggtgcagggttgcaaagggatcagaaaaaaaaaatcataataaagctttagttcatgagggatcgac

SEQ ID NO: 3232 - protein, 480 aa, Homosapiens
MARFPKADLAAAGVMLLCHFFTDQFQFADGKPGDQILDWQYGVTQAFPHTEEEVEVDSHAYSHRWKRNLDFLKAVDTNRASVGQDSPEPRSFTDLLLDDGQDNNTQIERVNLSFDFPFYGHFLREITVATGGFIYTGEVVHRMLTATQYIAPLMANFDPSVSRNSTVRYFDNGTALVVQWDHVHLQDNYNLGSFTFQATLLMDGRIIFGYKEIPVLVTQISSTNHPVKVGLSDAFVVVHRIQQIPNVRRRTIYEYHRVELQMSKITNISAVEMTPLPTCLQFNRCGPCVSSQIGFNCSWCSKLQRCSSGFDRHRQDWVDSGCPEESKEKMCENTEPVETSSRTTTTVGATTTQFRVLTTTRRAVTSQFPTSLPTEDDTKIALHLKDNGASTDDSAAEKKGGTLHAGLIIGILILVLIVATAILVTVYMYHHPTSAASIFFIERRPSRWPAMKFRRGSGHPAYAEVEPVGEKEGFIVSEQC

SEQ ID NO: 3233 - DNA, 2786 bp, Homosapiens
tggcttcggacctcagactgctgcagccctaaccttcccagggctcagctctttggagctgcccattcctccggctgcgagaaaggacgcgcgccctgcgtcgggcgaagaaaagaagcaaaacttgtcgggagggtttcgtcatcaacctccttcccgcaaacctaaacctcctgccggggccatccctagacagaggaaagttcctgcagagccgaccagccctagtggatctggggcaggcagcggcgctggctgtggaattagatctgttttgaacccagtggagcgcatcgctggggctcggaagtcaccgtccgcgggcaccgggttggcgctgcccgagtggaaccgacagtttgcgagcctcggctgcaagtggcctctcctccccgcggttgttgttcagtgtcgggtgagggctgcgagtgtggcaagttgcaaagagagcctcagaggtccgaagagcgctgcgctcctactcgcgttcgcttcttcctcttctcggttccctactgtgaaatcgcagcgacatttacaaaggcctccgggtcctaccgagaccgatccgcagcgtttggcccggtcgtgcctattgcatcgggagcccccgagcaccggcgaaggactggcgggtggggtagggaggtggcggcggcggcatggcgaggttcccgaaggccgacctggccgctgcaggagttatgttactttgccacttcttcacggaccagtttcagttcgccgatgggaaacccggagaccaaatccttgattggcagtatggagttactcaggccttccctcacacagaggaggaggtggaagttgattcacacgcgtacagccacaggtggaaaagaaacttggactttctcaaggcggtagacacgaaccgagcaagcgtcggccaagactctcctgagcccagaagcttcacagacctgctgctggatgatgggcaggacaataacactcagatcgaggaggatacagaccacaattactatatatctcgaatatatggtccatctgattctgccagccgggatttatgggtgaacatagaccaaatggaaaaagataaagtgaagattcatggaatattgtccaatactcatcggcaagctgcaagagtgaatctgtccttcgattttccattttatggccacttcctacgtgaaatcactgtggcaaccgggggtttcatatacactggagaagtcgtacatcgaatgctaacagccacacagtacatagcacctttaatggcaaatttcgatcccagtgtatccagaaattcaactgtcagatattttgataatggcacagcacttgtggtccagtgggaccatgtacatctccaggataattataacctgggaagcttcacattccaggcaaccctgctcatggatggacgaatcatctttggatacaaagaaattcctgtcttggtcacacagataagttcaaccaatcatccagtgaaagtcggactgtccgatgcatttgtcgttgtccacaggatccaacaaattcccaatgttcgaagaagaacaatttatgaataccaccgagtagagctacaaatgtcaaaaattaccaacatttcggctgtggagatgaccccattacccacatgcctccagtttaacagatgtggcccctgtgtatcttctcagattggcttcaactgcagttggtgtagtaaacttcaaagatgttccagtggatttgatcgtcatcggcaggactgggtggacagtggatgccctgaagagtcaaaagagaagatgtgtgagaatacagaaccagtggaaacttcttctcgaaccaccacaaccgtaggagcgacaaccacccagttcagggtcctaactaccaccagaagagcagtgacttctcagtttcccaccagcctccctacagaagatgataccaagatagcactacatctaaaagataatggagcttctacagatgacagtgcagctgagaagaaagggggaaccctccacgctggcctcatcattggaatcctcatcctggtcctcattgtagccacagccattcttgtgacagtctatatgtatcaccacccaacatcagcagccagcatcttctttattgagagacgcccaagcagatggcctgcgatgaagtttagaagaggctctggacatcctgcctatgctgaagttgaaccagttggagagaaagaaggctttattgtatcagagcagtgctaaaatttctaggacagaacaacaccagtactggtttacaggtgttaagactaaaattttgcctatacctttaagacaaacaaacaaacacacacacaaacaagctctaagctgctgtagcctgaagaagacaagatttctggacaagctcagcccaggaaacaaagggtaaacaaaaaactaaaacttatacaagataccatttacactgaacatagaattccctagtggaatgtcatctatagttcactcggaacatctcccgtggacttatctgaagtatgacaagattataatgcttttggcttaggtgcagggttgcaaagggatcagaaaaaaaaaatcataataaagctttagttcatgagggatcgacacctttggttcaaatgttctctgatgtctcaaagataactgttttccaaagcctgaaccctttcactcaaaagagcaatgatgaatgtctcaagattgctaagaaaaacagcccatgcaagagtgagaacaaacacaaaataagagattttctacattttc

SEQ ID NO: 3234 - protein, 529 aa, Homosapiens; identical to SEQ ID NO: 430

SEQ ID NO: 3235 - DNA, 4105 bp, Homosapiens
tggcttcggacctcagactgctgcagccctaaccttcccagggctcagctctttggagctgcccattcctccggctgcgagaaaggacgcgcgccctgcgtcgggcgaagaaaagaagcaaaacttgtcgggagggtttcgtcatcaacctccttcccgcaaacctaaacctcctgccggggccatccctagacagaggaaagttcctgcagagccgaccagccctagtggatctggggcaggcagcggcgctggctgtggaattagatctgttttgaacccagtggagcgcatcgctggggctcggaagtcaccgtccgcgggcaccgggttggcgctgcccgagtggaaccgacagtttgcgagcctcggctgcaagtggcctctcctccccgcggttgttgttcagtgtcgggtgagggctgcgagtgtggcaagttgcaaagagagcctcagaggtccgaagagcgctgcgctcctactcgcgttcgcttcttcctcttctcggttccctactgtgaaatcgcagcgacatttacaaaggcctccgggtcctaccgagaccgatccgcagcgtttggcccggtcgtgcctattgcatcgggagcccccgagcaccggcgaaggactggcgggtggggtagggaggtggcggcggcggcatggcgaggttcccgaaggccgacctggccgctgcaggagttatgttactttgccacttcttcacggaccagtttcagttcgccgatgggaaacccggagaccaaatccttgattggcagtatggagttactcaggccttccctcacacagaggaggaggtggaagttgattcacacgcgtacagccacaggtggaaaagaaacttggactttctcaaggcggtagacacgaaccgagcaagcgtcggccaagactctcctgagcccagaagcttcacagacctgctgctggatgatgggcaggacaataacactcagatcgaggaggatacagaccacaattactatatatctcgaatatatggtccatctgattctgccagccgggatttatgggtgaacatagaccaaatggaaaaagataaagtgaagattcatggaatattgtccaatactcatcggcaagctgcaagagtgaatctgtccttcgattttccattttatggccacttcctacgtgaaatcactgtggcaaccgggggtttcatatacactggagaagtcgtacatcgaatgctaacagccacacagtacatagcacctttaatggcaaatttcgatcccagtgtatccagaaattcaactgtcagatattttgataatggcacagcacttgtggtccagtgggaccatgtacatctccaggataattataacctgggaagcttcacattccaggcaaccctgctcatggatggacgaatcatctttggatacaaagaaattcctgtcttggtcacacagataagttcaaccaatcatccagtgaaagtcggactgtccgatgcatttgtcgttgtccacaggatccaacaaattcccaatgttcgaagaagaacaatttatgaataccaccgagtagagctacaaatgtcaaaaattaccaacatttcggctgtggagatgaccccattacccacatgcctccagtttaacagatgtggcccctgtgtatcttctcagattggcttcaactgcagttggtgtagtaaacttcaaagatgttccagtggatttgatcgtcatcggcaggactgggtggacagtggatgccctgaagagtcaaaagagaagatgtgtgagaatacagaaccagtggaaacttcttctcgaaccaccacaaccgtaggagcgacaaccacccagttcagggtcctaactaccaccagaagagcagtgacttctcagtttcccaccagcctccctacagaagatgataccaagatagcactacatctaaaagataatggagcttctacagatgacagtgcagctgagaagaaagggggaaccctccacgctggcctcatcattggaatcctcatcctggtcctcattgtagccacagccattcttgtgacagtctatatgtatcaccacccaacatcagcagccagcatcttctttattgagagacgcccaagcagatggcctgcgatgaagtttagaagaggctctggacatcctgcctatgctgaagttgaaccagttggagagaaagaaggctttattgtatcagagcagtgctaaaatttctaggacagaacaacaccagtactggtttacaggtgttaagactaaaattttgcctatacctttaagacaaacaaacaaacacacacacaaacaagctctaagctgctgtagcctgaagaagacaagatttctggacaagctcagcccaggaaacaaagggtaaacaaaaaactaaaacttatacaagataccatttacactgaacatagaattccctagtggaatgtcatctatagttcactcggaacatctcccgtggacttatctgaagtatgacaagattataatgcttttggcttaggtgcagggttgcaaagggatcagaaaaaaaaaatcataataaagctttagttcatgagggatcgacacctttggttcaaatgttctctgatgtctcaaagataactgttttccaaagcctgaaccctttcactcaaaagagcaatgatgaatgtctcaagattgctaagaaaaacagcccatgcaagagtgagaacaaacacaaaataagagattttctacattttcaaaacagatgtgtggcaaaaggatgttgtttttctggtctagatccatctgtaccaacaagttcatcactttacagaacgaatctttttatccgtacaggaggttcaaaccatgtctgcctcttcctttgtaatgaatgacctttctatgagctgtgacaaaatttccgaacaattaactaaggatttgggaagagggggtggcaaacggggctttctgttttcctgcctcagcatgaaaacatctgatttatgctttatggaagccttacctccaatccccaactgttaagtcccatgaaaccacagttgctctgggctgatggaaacaaaaggaaacagtatgaagagttccttaatcatttttgaaacaaaaatgttaagggattttaaacatatgattatttttaattttatgccttttcagtactaaacacccatttcattgctgattcctgtctaagaagccattcacgtcagcatggcgatagaaagaatgaaaaaaccctgctgaatcatacagtaattttctttaaagcacatagtagttacataaatatatatatataaatatatttttgtttataactaacacaaggcaggatcttgtgactctaagagtgcgttttgtcatcaaggcaaaacagatgcaagatgcatcactgcattacttccatagagttgtaaaataatccttaatattagaatatttttctgtcacttagcaaaagtggttcagttcattgccgcgcccatcatgttcttgactatttgatccactttttcgtttatgtcaaccccttccctctctggctaaataaagtggatgcagaaagctccttaaatggagatatcgattgccttggaatcacaatcctgattttgaaaattcctcatgaatgaagaaaggaatggcatcccttgagaaggaaagtggttaatatacatactgagctcctaaagtttaaattcaggtactgagtgtacaatttcaccaacattctaacccatgaaacttttacactctgtgccaagaaactgttggcttttgtaaggtacagtgctcaacatttgcagattcaggtctcaagaagcagagatgtctcataagcagcattttcccaacagtttagcatctgtacacatctgccttggtcatcagtccactcacagagtaccatactttatcatcacaagtgtctgacgtgaacgaatgccattttctattccatatattttgctttacaattttaagtatttgatgaagatggtaactttttcctaacttagttaactattaaaaaaaattttgaaaagcaa

SEQ ID NO: 3236 - protein, 529 aa, Homosapiens; identical to SEQ ID NO: 430

SEQ ID NO: 3237 - DNA, 495 bp, Homosapiens
tgtgcagaagtgcatcaagctgaggccctaggacctgcagggataatccaggggctcaagaaacactgattgaatgaaatgaacaaagaaagagcaagcaagctatgtattttgctggaaccttttacatgagactcaggtttcattttgaagacacccaggtcaatgtgtagattatcttgactctgcctctttaaatagagcacagattgttatatgcaagttgcgtgctagtgtgttttaagtagagaaacaaaaggagtgtctttacattagtgttttcttcaaagaagatagagatcattcaggatgctaggttttttttttttcacttattttgaggatctttacaaaggaaaatggcactttgaaatcgcaaggatgatgtagctatctggttgggtttgatcctgccagttccgctaggagaaatcttacttcatattggctgaattgctgacatgagttttaaagataaaacaatttgagaaattg

SEQ ID NO: 3238 - protein, 30 aa, Homosapiens
RHPGQCVDYLDSASLNRAQIVICKLRASVF

SEQ ID NO: 3239 - DNA, 3421 bp, Homosapiens
gcggagacggcggaagcggagagcaacagcgcgccgagacttccagtgtcctactattgaagcctgcacctgctgcattgctgttttcctgagacggagttttgccatgttgtccaggctggtgtcgaaatcctgagctcaagtggtctgcctgcctcggcttcccaaagtgctgggattacaggtgaggctgctgtcagaaaggaacttttacacagtttgccttcagagacagtctatcggcatgttgtagagttttattactaagaaaataaatgttacttacatgattgtggtggtgccatgcagcaagaatcagagagatgcagagttagagccagaaggcctgacatggcactttatgtacctaaagctcgtaggggtgcagtactccttaagacaggtgatgaagaagaaagctgtggttcacctaactctgtggtgaaagaaaagcaaaaagaaagttctctctcccaaaaagaagtctttaaagacaaaccggaggctcgaagactaaatatcaatcctgatagaaaggagcataattgtagagaagaaaagaaatcttcaacaaaattaagaatggacacatgccttcaaaaaacaaatagagtttgttctaagagaggaaccactgaatccaaagaagtattatcccaaggacaacagcagggagccccaaatgctggggttataactaatgcacctttgcagagacattttaaaccaaagaaggtggagtgtttggaagttgaaactacggatgtgacaggacatgagaggatacttctttcacaggcctgtttagaaatcagcgaggctcaagttccaagcaaaccattccaaaatgtggaattctgtgacttcagtaggcatgaacctgatggggaagcatttgaagacaaagatttggaaggcagaattgaaactgataccaaggttttggagatactatatgagtttcctagagtttttagttctgtcatgaaacctgagaatatgattgtaccaataaaactaagctctgattctgaaattgtacaacaaagcatgcaaacatcagatggaatattgaatcccagcagcggaggcatcaccactacttctgttcctggaagtccagatggtgtctttgatcaaacttgcgtagattttgaagttgagagtgtaggtggtatagccaatagtacaggtttcatcttagatcaaaaagatacagattccattcctgcaactatgggtcacatctctctgtcagagagcacaaatgacactgttagtccagtaatgattagagaatgtgagaagaatgacagcactgctgatgagttacatgtaaagcacgaacctcctgatacagctgtccttgctcatgaaacacatagagatagtggatttaagaatgtaggtgacattaccaataaagcatgtatgatggacactacaggtatgtcctgtagtgatcatgtaactgttgatagcccttatgtagttgcagttagaatagctgatgagacctctattaatacacgaagtttctcaaagtttgtaggaatgagtgcagatgcaacccctcttcatgtagctagaagtgggaatgacactgaagatttcagcaacccttctgcttgctcagatatttatggtgagagtatttcatctcattttacagagtcaacaggaaagttgatagagagcttgtcagattgtgcttcctccttacctataaaaaagattgctggtagtaattataacacttttttggactctgaactcagtatgttaaatgggacaaaagttctttcagacagtgccgtgggcattgacctgggtagtactggtgatacaacagaagcattgcacgaactaagaactgccgaagagttcaaaacagaagagcaagatgactcagggagtatagaatttggtgtatcttttcctgatagggaatcatcatctatggaaacatccatcgaaccaaaagcaactgaaacttctcacacagagggaattactgccattgaggagagctgggagtctatgtttaacgatgatggtgactgcctggatccacgtcttctacaagaggggattctgatgcacataaagcccgagaaccactgctcaaagttatcagggaataccaagagcagagagagcatccaggaacctagatctgattactacaatcatgaagttcctgatattgacctcagtgattgtgaattcccacatgtcattgaaatttatgactttccccaagaatttcatactgaagaccttctacgggttttctgcagttatcaaaagaaaggatttgatattaaatgggtggatgatacacatgccctaggagtattctccagtccaattacagctcgtgatgcgttgggtattaaacacaccatggtgaagattcgtcccttgtcacaggccacaagagcagccaaggccaaagctagagcttatgctgagttcctccagccagcaaaggagcgtcctgagacttcagcagccctagccagaaggttagtcatcagtgcccttggggttcgaagtaagcagagcaaaaccgaacgagaagcagagctcaagaaactgcaagaagccagagagagaaagcggttggaagccaagcaacgggaagacatctgggaaggcagagaccagtctacagtttgaacatcactcaatgaaagggataattccatgaatcagaaaatgtttccatagccttcagataagatgatccttccagagctctatgtacatgcagatgtgcatgttaaagagataaagtgatcgagacaaggactgactgggtatagaaggaagacagactcctgtcttcactcctaaatgcagttctttggaatcaccctactgtggtgggcgtagtagggagccatcagctaggaagaaacgtgggagatgtgaattccaagagttgcctggacagggcaagtcatgttagcgtgggtcacacttccaagatatttaaagcaaatacaaaacagaacagaggattcaaaccgcaagtatgggagatttaggccctgcagaggcagaccattccttagtatctcacaaagcagagtaatactggaggcagagtagggggtggttggagagcagttagtacaaagaggcagaacagtgtctggtttacttggcatacacagaatctgcactgccggttccagaactgcaaagttggtgaactacaggagatgtgggtatttagactccaaagtttatactgagctcagtgcctgggaccgctccagctgcactgcagccaggggggataccagcttcattcctcagagtaaaccaaccttgggagctgtgtgccagttccagtgtaagcagtaataccatgttgtaagagggaacattaaagcccattttatgacatata

SEQ ID NO: 3240 - protein, 792 aa, Homosapiens
MQQESERCRVRARRPDMALYVPKARRGAVLLKTGDEEESCGSPNSVVKEKQKESSLSQKEVFKDKPEARRLNINPDRKEHNCREEKKSSTKLRMDTCLQKTNRVCSKRGTTESKEVLSQGQQQGAPNAGVITNAPLQRHFKPKKVECLEVETTDVTGHERILLSQACLEISEAQVPSKPFQNVEFCDFSRHEPDGEAFEDKDLEGRIETDTKVLEILYEFPRVFSSVMKPENMIVPIKLSSDSEIVQQSMQTSDGILNPSSGGITTTSVPGSPDGVFDQTCVDFEVESVGGIANSTGFILDQKDTDSIPATMGHISLSESTNDTVSPVMIRECEKNDSTADELHVKHEPPDTAVLAHETHRDSGFKNVGDITNKACMMDTTGMSCSDHVTVDSPYVVAVRIADETSINTRSFSKFVGMSADATPLHVARSGNDTEDFSNPSACSDIYGESISSHFTESTGKLIESLSDCASSLPIKKIAGSNYNTFLDSELSMLNGTKVLSDSAVGIDLGSTGDTTEALHELRTAEEFKTEEQDDSGSIEFGVSFPDRESSSMETSIEPKATETSHTEGITAIEESWESMFNDDGDCLDPRLLQEGILMHIKPENHCSKLSGNTKSRESIQEPRSDYYNHEVPDIDLSDCEFPHVIEIYDFPQEFHTEDLLRVFCSYQKKGFDIKWVDDTHALGVFSSPITARDALGIKHTMVKIRPLSQATRAAKAKARAYAEFLQPAKERPETSAALARRLVISALGVRSKQSKTEREAELKKLQEARERKRLEAKQREDIWEGRDQSTV

SEQ ID NO: 3241 - DNA, 1490 bp, Homosapiens
gagacggagttttgccatgttgtccaggctggtgtcgaaatcctgagctcaagtggtctgcctgcctcggcttcccaaagtgctgggattacaggtgaggctgctgtcagaaaggaacttttacacagtttgccttcagagacagtctatcggcatgttgtagagttttattactaagaaaataaatgttacttacatgttatcagggaataccaagagcagagagagcatccaggaacctagatctgattactacaatcatgaagttcctgatattgacctcagtgattgtgaattcccacatgtcattgaaatttatgactttccccaagaatttcatactgaagaccttctacgggttttctgcagttatcaaaagaaaggatttgatattaaatgggtggatgatacacatgccctaggagtattctccagtccaattacagctcgtgatgcgttgggtattaaacacaccatggtgaagattcgtcccttgtcacaggccacaagagcagccaaggccaaagctagagcttatgctgagttcctccagccagcaaaggagcgtcctgagacttcagcagccctagccagaaggttagtcatcagtgcccttggggttcgaagtaagcagagcaaaaccgaacgagaagcagagctcaagaaactgcaagaagccagagagagaaagcggttggaagccaagcaacgggaagacatctgggaaggcagagaccagtctacagtttgaacatcactcaatgaaagggataattccatgaatcagaaaatgtttccatagccttcagataagatgatccttccagagctctatgtacatgcagatgtgcatgttaaagagataaagtgatcgagacaaggactgactgggtatagaaggaagacagactcctgtcttcactcctaaatgcagttctttggaatcaccctactgtggtgggcgtagtagggagccatcagctaggaagaaacgtgggagatgtgaattccaagagttgcctggacagggcaagtcatgttagcgtgggtcacacttccaagatatttaaagcaaatacaaaacagaacagaggattcaaaccgcaagtatgggagatttaggccctgcagaggcagaccattccttagtatctcacaaagcagagtaatactggaggcagagtagggggtggttggagagcagttagtacaaagaggcagaacagtgtctggtttacttggcatacacagaatctgcactgccggttccagaactgcaaagttggtgaactacaggagatgtgggtatttagactccaaagtttatactgagctcagtgcctgggaccgctccagctgcactgcagccaggggggataccagcttcattcctcagagtaaaccaaccttgggagctgtgtgccagttccagtgtaagcagtaataccatgttgtaagagggaacattaaagcccattttatgacatata

SEQ ID NO: 3242 - protein, 184 aa, Homosapiens
MLSGNTKSRESIQEPRSDYYNHEVPDIDLSDCEFPHVIEIYDFPQEFHTEDLLRVFCSYQKKGFDIKWVDDTHALGVFSSPITARDALGIKHTMVKIRPLSQATRAAKAKARAYAEFLQPAKERPETSAALARRLVISALGVRSKQSKTEREAELKKLQEARERKRLEAKQREDIWEGRDQSTV

SEQ ID NO: 3243 - DNA, 2426 bp, Homosapiens
atatgagtttcctagagtttttagttctgtcatgaaacctgagaatatgattgtaccaataaaactaagctctgattctgaaattgtacaacaaagcatgcaaacatcagatggaatattgaatcccagcagcggaggcatcaccactacttctgttcctggaagtccagatggtgtctttgatcaaacttgcgtagattttgaagttgagagtgtaggtggtatagccaatagtacaggtttcatcttagatcaaaaagatacagattccattcctgcaactatgggtcacatctctctgtcagagagcacaaatgacactgttagtccagtaatgattagagaatgtgagaagaatgacagcactgctgatgagttacatgtaaagcacgaacctcctgatacagctgtccttgctcatgaaacacatagagatagtggatttaagaatgtaggtgacattaccaataaagcatgtatgatggacactacaggtatgtcctgtagtgatcatgtaactgttgatagcccttatgtagttgcagttagaatagctgatgagacctctattaatacacgaagtttctcaaagtttgtaggaatgagtgcagatgcaacccctcttcatgtagctagaagtgggaatgacactgaagatttcagcaacccttctgcttgctcagatatttatggtgagagtatttcatctcattttacagagtcaacaggaaagttgatagagagcttgtcagattgtgcttcctccttacctataaaaaagattgctggtagtaattataacacttttttggactctgaactcagtatgttaaatgggacaaaagttctttcagacagtgccgtgggcattgacctgggtagtactggtgatacaacagaagcattgcacgaactaagaactgccgaagagttcaaaacagaagagcaagatgactcagggagtatagaatttggtgtatcttttcctgatagggaatcatcatctatggaaacatccatcgaaccaaaagcaactgaaacttctcacacagagggaattactgccattgaggagagctgggagtctatgtttaacgatgatggtgactgcctggatccacgtcttctacaagagttatcagggaataccaagagcagagagagcatccaggaacctagatctgattactacaatcatgaagttcctgatattgacctcagtgattgtgaattcccacatgtcattgaaatttatgactttccccaagaatttcatactgaagaccttctacgggttttctgcagttatcaaaagaaaggatttgatattaaatgggtggatgatacacatgccctaggagtattctccagtccaattacagctcgtgatgcgttgggtattaaacacaccatggtgaagattcgtcccttgtcacaggccacaagagcagccaaggccaaagctagagcttatgctgagttcctccagccagcaaaggagcgtcctgagacttcagcagccctagccagaaggttagtcatcagtgcccttggggttcgaagtaagcagagcaaaaccgaacgagaagcagagctcaagaaactgcaagaagccagagagagaaagcggttggaagccaagcaacgggaagacatctgggaaggcagagaccagtctacagtttgaacatcactcaatgaaagggataattccatgaatcagaaaatgtttccatagccttcagataagatgatccttccagagctctatgtacatgcagatgtgcatgttaaagagataaagtgatcgagacaaggactgactgggtatagaaggaagacagactcctgtcttcactcctaaatgcagttctttggaatcaccctactgtggtgggcgtagtagggagccatcagctaggaagaaacgtgggagatgtgaattccaagagttgcctggacagggcaagtcatgttagcgtgggtcacacttccaagatatttaaagcaaatacaaaacagaacagaggattcaaaccgcaagtatgggagatttaggccctgcagaggcagaccattccttagtatctcacaaagcagagtaatactggaggcagagtagggggtggttggagagcagttagtacaaagaggcagaacagtgtctggtttacttggcatacacagaatctgcactgccggttccagaactgcaaagttggtgaactacaggagatgtgggtatttagactccaaagtttatactgagctcagtgcctgggaccgctccagctgcactgcagccaggggggataccagcttcattcctcagagtaaaccaaccttgggagctgtgtgccagttccagtgtaagcagtaataccatgttgtaagagggaacattaaagcccattttatgacatata

SEQ ID NO: 3244 - protein, 551 aa, Homosapiens
MKPENMIVPIKLSSDSEIVQQSMQTSDGILNPSSGGITTTSVPGSPDGVFDQTCVDFEVESVGGIANSTGFILDQKDTDSIPATMGHISLSESTNDTVSPVMIRECEKNDSTADELHVKHEPPDTAVLAHETHRDSGFKNVGDITNKACMMDTTGMSCSDHVTVDSPYVVAVRIADETSINTRSFSKFVGMSADATPLHVARSGNDTEDFSNPSACSDIYGESISSHFTESTGKLIESLSDCASSLPIKKIAGSNYNTFLDSELSMLNGTKVLSDSAVGIDLGSTGDTTEALHELRTAEEFKTEEQDDSGSIEFGVSFPDRESSSMETSIEPKATETSHTEGITAIEESWESMFNDDGDCLDPRLLQELSGNTKSRESIQEPRSDYYNHEVPDIDLSDCEFPHVIEIYDFPQEFHTEDLLRVFCSYQKKGFDIKWVDDTHALGVFSSPITARDALGIKHTMVKIRPLSQATRAAKAKARAYAEFLQPAKERPETSAALARRLVISALGVRSKQSKTEREAELKKLQEARERKRLEAKQREDIWEGRDQSTV

SEQ ID NO: 3245 - DNA, 3657 bp, Homosapiens; identical to SEQ ID NO: 433

SEQ ID NO: 3246 - protein, 756 aa, Homosapiens; identical to SEQ ID NO: 434

SEQ ID NO: 3247 - DNA, 1165 bp, Homosapiens
gggttagggactgtgggtgtgcagacaggaagcaggcaatgcttgccctcggagagctcagcagagataggacaggtctgcaactcttctccaagatggaaagtgctgagtgttttaaaagaagaacaatgcgtggggaattcagaggaagtaaaaacctcctgcgtaagatttcagaaggagactccagccaggaagcgcccgccaccgtgggagcagtgcaccggcccgtgcctctggcactgctgcagggccagctctgtgcctgagcagcgcaccccactcatcaccacctcctgggcccttggcgtccccgaccagaaccaggtttcctaagaagacagccagcgtcacccagtcagcgtgcctttggagtcacctcctgactcccatctgaggtgtggcctcagtcataccacccccaccgggttgtgtccagcctgggcctgaaaatcttcagtgatgagaacccgaattccctggggcagtccatgacacatttggacccttctgatgttagaaatccccaccacatatggaggtaaaaatccacccaccgtggcttccactactggccctacacccctctctcttccagatggcagaggagggtcctgttccccgcccctctccctgggggctgtgctcacatttccccagctgctcctcaagcggcccagatcgtcagttgtgctcagggttgcccagtccacactgtgcggcagccagtgtgggtgcaagtgcagaggtttctctgttgcggtcatgcctaagtcctcttgattttattttttgatgtattttagatctatccacttatttctcctggactacctggtccagtccagcctcatttctcacctgggctactacaatagcctcctgagtgtgtttccttgcattcatgttaatctccacccaacgttttccaaacagcaaaggaagaaatctttcaaacatgtggattgcaagctttgagtgatcttgcccctgcctcctctgccctcatgtttgacagcactctcgagagagagccacactacaatccctggccctgatttcctcagctgaatcaagctttctctggccacagggcttttgcataagctattcattcctcctccaccttgtctgactaatttctattcatctttcctgcagatgc

SEQ ID NO: 3248 - protein, 76 aa, Homosapiens
MLALGELSRDRTGLQLFSKMESAECFKRRTMRGEFRGSKNLLRKISEGDSSQEAPATVGAVHRPVPLALLQGQLCA

SEQ ID NO: 3249 - DNA, 465 bp, Homosapiens
gaggtgtgatgggagctgctgggcgaaatgcagcacatgtggcctttagggacctcaagagcatgtgaccctgaaccagctctgacccaggaagaagactccacccctgaattccaagtgctccattggatcagcttcccaggaagttcagcttcggcataatcgtgcaggaatttcagttcctggctggccgtgaggaggcaggtagccctgttgaaaaccccatgtggcaagtaactgcagtagcctccagctgactgaagctctcagacctactacctcagagaatggatgctgccaacacatgtgagcaaggaaatggatgcttccccagttgagcttccagatgagaacacagcctggccggcactgtgagtatagccttgtgacaccctgaacagggagtccagctgtgcctagattcctgaacagtggaaactgtgagataataaatgtgtgttgttc

SEQ ID NO: 3250 - protein, 44 aa, Homosapiens [sequence omitted]

SEQ ID NO: 3251 - DNA, 2022 bp, Homosapiens
taattaatcaattaacaaagagccacaatacttctgggcatacaacaagaaatactggcacccagaactggagacttcagttgatcttggtggatttcagctgcttaaggcttgctcatgcgtctgcagttggctgtgggtcagcttgccggctgctgatcttggcgggactccttcatgtgcctgggagctggctggtggtggctggtccaggaccgtttctgctgggatgaccgggtgggggactcggctatgctccatgtgtctgtcctcctccagcacggtagtccaggcatgttctcaaggtctggcaaagggcaaaagcaggcaagctcaagcatgcatgcaagcatcacatggtttgatctctttgcatcctgtttgctagcattggccagaccaagtctcatggccaagcctagagtcagagtgtgagagcactgcaaggttacacggaagtgggtgtgcaaacagggaggggtgagctttgggggcagtttttgcaattgacttaccctgtgctcaaaagatatgataacatgtatacgcacatgaagctcctagccattcttgggggcaattcttaggggcaaagcactactttttctgagtgattccattactaaaattcaacaaacatcagtaaaaagaaacttgttaaggcaattctgagatcgtcgaggcttccaagagcttacagaccagtagtgaaaagaggcctgcaaaccactgacccctttgcaagcagggagaggtgcggactatttcacagtcagaactgctggccaagcgcggaggaggaagtggttagagctgagtgggaggggatctaggaaggcttcacaggggaggtggttttggctgagctttgaaggatgaagaggatttccggagggagcgactgagggatcttcctgagcaaagaaagaaggcagcttccttggggccttggacatctgaggcctttcatggagccttctccttccaggagtggcttcctgaggagttcctggagagaatctctcagctggacacccggtcgcctgtcaccaagatcaatgtggccgtagacaggctgcccagcttcctggcggcccccaatgctcccaggggccagccgctgccccatcaccaatgctccatccacctgaactgtgaagacaccctcctccttcatcaggcctttgaagatgccatggatggcctgccttcccacaggcctgtgattgagctctgcatcccttcctcgctggaccccaccctggctccccctggctgccatgtagtctccctcttcactcagtacatgccctatacgctggctggaggcaaggcctgggacgagcaggagagagacgcttatgcagacagagtgtttgattgcatcgaggtctatgcccctggcttcaaggactctgtggttggcagagacatcctcacaccaccagatttggagagaatcttcgggcttcctggagggaaaatatcctggaaggagaagaacatttgctgaagaacaggggaggggaagaaacccagccagagcaggaaaggctgtaactctcctgtgctgatgactgtggccctgcctctgcagaacatattccactgcgccatgtccctggaccagctctacttcgcccgccccgtgcccctgcattctggctaccgctgccctctccagggcctgtatctctgtggaagtggggctcatcctggaggaggtgtgatgggagctgctgggcgaaatgcagcacatgtggcctttagggacctcaagagcatgtgaccctgaaccagctctgacccaggaagaagactccacccctgaattccaagtgctccattggatcagcttcccaggaagttcagcttcgggttagtacataaggccaccacaatgctcaagaaattattttagaaaaaacgtacgagttacatttagtgcaagttgaccttatgcccatgcctccatacatggactggttctgttttattaaaactaatatttcatacagatta

SEQ ID NO: 3252 - protein, 105 aa, Homosapiens
MDGLPSHRPVIELCIPSSLDPTLAPPGCHVVSLFTQYMPYTLAGGKAWDEQERDAYADRVFDCIEVYAPGFKDSVVGRDILTPPDLERIFGLPGGKISWKEKNIC

SEQ ID NO: 3253 - DNA, 2990 bp, Homosapiens
aggactgtctgcctttagtttgctgcatgtctttgagagacagattccatctgttcatgagtcccactggcggattgtttaaactttcttatgaacattttcaaaagcccatacaaataaagagtatgtcaaccagcactttttaagatgaactgtaaccaactagcttctcacatgcttctcatatggtaagagttaattttagctcatgaaacttttggttctgtgaaacacctgctgaacagactcctgggaagggggtctgtgggagtcgacatttatacaaccttccaggtgattctgagcttatcagagctggagaggcacttgctacccaggggcttggtgtggaacgtgagatgccaaagccaaattcaggcctctcagctcaaggcaccctgaagcacagctagtcactccagcacatgttgaagctgtgcatgtttacttcatgttgaactgttcatgttttatttttggaacactggggattggcaaaaaaaaaaaaaacccatgtgaataaagccttctagggcaccactgtgccgattgtgaaccacacgtggacaaaacaagccgcgcttgatagcaactacctacatgaccagcactcccctggatgctgatgctgccatgcgagacgggacgttggcgcagcagcatgccagccacccattgcttctcctgcttgccaactcaaccgtgctgctccctcagacaccatcacttgcgcctcccaagcaatggaagccctggcgatgctctcatgagcccctcactccagcagagcccctgaccaagccaggggagcaggacttttccagccaaggacacaacggactggtggctgtgagtacctccccacttgatcccacttcactggccctgggcgtgtggctctcagcagcctgggaaggagtgtgaagaagcaggtgggataagggccttgagagagaaggaaaaggcagcctagtcgatgctctctgctctccagtgctgactgggggctgggtcgaatgctcatctgcagccagctgtggacatcacaggctcctttcctccccttcccctaatggggaaaggtggtttccccatggcctgtgagggagtcagggagcttccagaaacaagctgacaaggtggggaagcatgtaaccaacacagcatgagagcaggcagcgtacctgcagagactgggggtgaacaccgccgtcttcgagaggcgccatgtgatcgggggtgcagctgtcactgaggagatcatcccagggtttaagttctcccgcgcgtcctacctgctcagcctgctgaggccgcagatttacactgatctggagctgaagaaacatgggctgaggcttcatcttcgaaacccctactccttcacccccatgctggaagagggtgcaggcagcaaggtgcccaggtgccttctgctgggcacagacatggcagaaaaccagaagcagatcgcccagttctcccagaaggatgcccaggtctttcccaaatatgaggagttcatgcatcgcttggcattagccattgaccctctgctggatgcggcccccgtggacatggcggccttccagcatggctccttgctgcaaaggatgaggtcgctctccaccctcaagcccctgctgaaggcaggccgcatcctgggagcccagcttccccgatattatgaggtcctcacagctcccattaccaaggtgctggatcagtggttcgagtctgagcctttaaaagccactctagccacagatgcagtgattggagccatgacaagtccccacactccggggagtgggtatgtgctgctgcaccatgtgatggggggcctggagggaatgcagggggcctggggctacgtccaggggggcatgggtgccctctctgatgcgatcgcaagctcagccaccacacatggagcaagcatcttcactgaaaagacagtggcgaaggtgcaggtgaacagtgaaggctgtgttcaaggagttgtgctggaagatggcacagaggtgagaagcaaaatggtgctgtccaacacatcaccgcagatcaccttcctgaagctgacgccacaggagtggcttcctgaggagttcctggagagaatctctcagctggacacccggtcgcctgtcaccaagatcaatggtaagaggcacaccacattgcagcactgtctcctttgacccatctgagtgagaaacctccaggctgggggcagctgaactcagtcatcatctccattcccggacctccagcctgtgtccccctgcagcctggtcagaagtggccgtagacaggctgcccagcttcctggcggcccccaatgctcccaggggccagccgctgccccatcaccaatgctccatccacctgaactgtgaagacaccctcctccttcatcaggcctttgaagatgccatggatggcctgccttcccacagtgtttgattgcatcgaggtctatgcccctggcttcaaggactctgtggttggcagagacatcctcacaccaccagatttggagagaatcttcgggcttcctggagggaacatattccactgcgccatgtccctggaccagctctacttcgcccgccccgtgcccctgcattctggctaccgctgccctctccagggcctgtatctctgtggaagtggggctcatcctggaggaggtgtgatgggagctgctgggcgaaatgcagcacatgtggcctttagggacctcaagagcatgtgaccctgaaccagctctgacccaggaagaagactccacccctgaattccaagtgctccattggatcagcttcccaggaagttcagcttcgggttagtacataaggccaccacaatgctcaagaaattattttagaaaaaacgtacgagttacatttagtgcaagttgaccttatgcccatgcctccatacatggactggttctgttttattaaaactaatatttcatacagatt

SEQ ID NO: 3254 - protein, 269 aa, Homosapiens
MLEEGAGSKVPRCLLLGTDMAENQKQIAQFSQKDAQVFPKYEEFMHRLALAIDPLLDAAPVDMAAFQHGSLLQRMRSLSTLKPLLKAGRILGAQLPRYYEVLTAPITKVLDQWFESEPLKATLATDAVIGAMTSPHTPGSGYVLLHHVMGGLEGMQGAWGYVQGGMGALSDAIASSATTHGASIFTEKTVAKVQVNSEGCVQGVVLEDGTEVRSKMVLSNTSPQITFLKLTPQEWLPEEFLERISQLDTRSPVTKINGKRHTTLQHCLL

SEQ ID NO: 3255 - DNA, 2428 bp, Homosapiens
acttgccatcccaggcgtttcagttctgactgagaaggtagatgcacaggggaggagagggccctttcgagctccactctgcctccaccactcattccctaaccccgcagcctcagcgccctcatctgtaaaatggggagttttgcctacagggttcagcacaatgccagcctgacataggaaccccagtggattgtcagttttgccattatcccctgcatcctggaggtgacaccgcctggttaataggcaacactcccgacggcccagcacagccccagggcagcaggaggctggcctgtggccaagaatgcatggtggagggggcctggagggggactgcagctcctcctcttcctgcttcctccctgctccaccccgtgcctagggcagcacaaaagccaatcgctagcaaactccctgcctagcaaggcccagcctggggcagaaatggctgcaagtggccgaggtctctgcaaggctgtggccgcctctcccttcccggcgtggagacgagataacacggaagccaggggaggtctgaagcctgagtatgatgcggtggtgataggagcaggacacaacggactggtggctgcagcgtacctgcagagactgggggtgaacaccgccgtcttcgagaggcgccatgtgatcgggggtgcagctgtcactgaggagatcatcccagggtttaagttctcccgcgcgtcctacctgctcagcctgctgaggccgcagatttacactgatctggagctgaagaaacatgggctgaggcttcatcttcgaaacccctactccttcacccccatgctggaagagggtgcaggcagcaaggtgcccaggtgccttctgctgggcacagacatggcagaaaaccagaagcagatcgcccagttctcccagaaggatgcccaggtctttcccaaatatgaggagttcatgcatcgcttggcattagccattgaccctctgctggatgcggcccccgtggacatggcggccttccagcatggctccttgctgcaaaggatgaggtcgctctccaccctcaagcccctgctgaaggcaggccgcatcctgggagcccagcttccccgatattatgaggtcctcacagctcccattaccaaggtgctggatcagtggttcgagtctgagcctttaaaagccactctagccacagatgcagtgattggagccatgacaagtccccacactccggggagtgggtatgtgctgctgcaccatgtgatggggggcctggagggaatgcagggggcctggggctacgtccaggggggcatgggtgccctctctgatgcgatcgcaagctcagccaccacacatggagcaagcatcttcactgaaaagacagtggcgaaggtgcaggtgaacagtgaaggctgtgttcaaggagttgtgctggaagatggcacagaggtgagaagcaaaatggtgctgtccaacacatcaccgcagatcaccttcctgaagctgacgccacaggagtggcttcctgaggagttcctggagagaatctctcagctggacacccggtcgcctgtcaccaagatcaatgtggccgtagacaggctgcccagcttcctggcggcccccaatgctcccaggggccagccgctgccccatcaccaatgctccatccacctgaactgtgaagacaccctcctccttcatcaggcctttgaagatgccatggatggcctgccttcccacaggcctgtgattgagctctgcatcccttcctcgctggaccccaccctggctccccctggctgccatgtagtctccctcttcactcagtacatgccctatacgctggctggaggcaaggcctgggacgagcaggagagagacgcttatgcagacagagtgtttgattgcatcgaggtctatgcccctggcttcaaggactctgtggttggcagagacatcctcacaccaccagatttggagagaatcttcgggcttcctggagggaacatattccactgcgccatgtccctggaccagctctacttcgcccgccccgtgcccctgcattctggctaccgctgccctctccagggcctgtatctctgtggaagtggggctcatcctggaggaggtgtgatgggagctgctgggcgaaatgcagcacatgtggcctttagggacctcaagagcatgtgaccctgaaccagctctgacccaggaagaagactccacccctgaattccaagtgctccattggatcagcttcccaggaagttcagcttcgggttagtacataaggccaccacaatgctcaagaaattattttagaaaaaacgtacgagttacatttagtgcaagttgaccttatgcccatgcctccatacatggactggttctgttttattaaaactaatatttcatacagatt

SEQ ID NO: 3256 - protein, 581 aa, Homosapiens
MAASGRGLCKAVAASPFPAWRRDNTEARGGLKPEYDAVVIGAGHNGLVAAAYLQRLGVNTAVFERRHVIGGAAVTEEIIPGFKFSRASYLLSLLRPQIYTDLELKKHGLRLHLRNPYSFTPMLEEGAGSKVPRCLLLGTDMAENQKQIAQFSQKDAQVFPKYEEFMHRLALAIDPLLDAAPVDMAAFQHGSLLQRMRSLSTLKPLLKAGRILGAQLPRYYEVLTAPITKVLDQWFESEPLKATLATDAVIGAMTSPHTPGSGYVLLHHVMGGLEGMQGAWGYVQGGMGALSDAIASSATTHGASIFTEKTVAKVQVNSEGCVQGVVLEDGTEVRSKMVLSNTSPQITFLKLTPQEWLPEEFLERISQLDTRSPVTKINVAVDRLPSFLAAPNAPRGQPLPHHQCSIHLNCEDTLLLHQAFEDAMDGLPSHRPVIELCIPSSLDPTLAPPGCHVVSLFTQYMPYTLAGGKAWDEQERDAYADRVFDCIEVYAPGFKDSVVGRDILTPPDLERIFGLPGGNIFHCAMSLDQLYFARPVPLHSGYRCPLQGLYLCGSGAHPGGGVMGAAGRNAAHVAFRDLKSM

SEQ ID NO: 3257 - DNA, 499 bp, Homosapiens
agccaggggaggtctgaagcctgagtatgatgcggtggtgataggagcaggcaggcacctgggattccggtgctggctctgctgtgtggcctggggcaaatgcttgccttctctgggcttggatcttcccatggagaatgacaggaagactagagggccccaaatgcatgattgccaactgggtctatacagagataatgacgggaccgaaagcagacggcactcaacatgcagctttgagggcatgccttcattttcatatgtactagagcagttgcgagctggtagatactcaacactcacctctccagggaaaaatgtgtgatgtatgtgtgtgtgtacatgtatatatatgtatatatacacacatatatgtgtatatatatgtatatgtgttacgtacatatatatacacatatacacatgcttattttaaatattgaaataaaagatacactgcacacaattttacaaataaagatacaatactctcaattta

SEQ ID NO: 3258 - protein, 64 aa, Homosapiens
MENDRKTRGPQMHDCQLGLYRDNDGTESRRHSTCSFEGMPSFSYVLEQLRAGRYSTLTSPGKNV

SEQ ID NO: 3259 - DNA, 1025 bp, Homosapiens
gagaattacagacagcgaacttgcccctaagccctcgttgtgggtttgtgtttgagcatttaggagaggactccagtgctcctcagcgacagacacagctgcctctgcggtgtctgaaggccctggtcgtggtgacgctagatggccgccctgggcgcctcctgtgggcgtagaggcatcaccactctgcactggcagactcagcatggagttggagcagagtctgacacgagcacttgccatcccaggcgtttcagttctgactgagaaggtagatgcacaggggaggagagggccctttcgagctccactctgcctccaccactcattccctaaccccgcagcctcagcgccctcatctgtaaaatggggagttttgcctacagggttcagcacaatgccagcctgacataggaacccctcgtcacaagaaactgcagtcatttcataaaggccagttaggataaaacagaactgagtcccagagttcctactgcgtgtctgcagagggagatggaccccattgccttgcagctctgggacatttggggatctgcagtgatctgccacactttgccaacccctgggctcagagtatcacagtctactgggtgctaggggaagaggcaggcccaggaccaggtggtctttccttagtgccttcctttcacacttgcagagggccccaaatgcatgattgccaactgggtctatacagagataatgacgggaccgaaagcagacggcactcaacatgcagctttgagggcatgccttcattttcatatgtactagagcagttgcgagctggtagatactcaacactcacctctccagggaaaaatgtgtgatgtatgtgtgtgtgtacatgtatatatatgtatatatacacacatatatgtgtatatatatgtatatgtgttacgtacatatatatacacatatacacatgcttattttaaatattgaaataaaagatacactgcacacaattttacaaataaagatacaatactctcaattta

SEQ ID NO: 3260 - protein, 67 aa, Homosapiens
MELEQSLTRALAIPGVSVLTEKVDAQGRRGPFRAPLCLHHSFPNPAASAPSSVKWGVLPTGFSTMPA

SEQ ID NO: 3261 - DNA, 1071 bp, Homosapiens
gctcctgcgctactacagcaagaaccgcccaaccgaggctgtcaggtgctacgagctgctggccctgcacctgtctgtcatccccactgacctgctggtgcagcaggccggccagctggcccggcgcctctgggaggcctcccgtatccccctgctctaggccaaggtggccgcagtctgcctttgcatcctgtcctccagccacccttgcttgccactgttccccatgacgagagcctcctgtctgcagtggccatcctgaggatagggcagagtgcccagggtggccccagggcttctaaaaccccacctagaccaccctccatgtcaggtaaaaggtgctcctttgcctgggtttgaattccagcgctgccacttcctctctgcacctcctggcaagtttcttctattccccacgtttaaagcgatggcacctccgtcccagggtggtgtgaggattacccagtgtggagaggactccagtgctcctcagcgacagacacagctgcctctgcggtgtctgaaggccctggtcgtggtgacgctagatggccgccctgggcgcctcctgtgggcgtagaggcatcaccactctgcactggcagactcagcatggagttggagcagagtctgacacgagcacttgccatcccaggcgtttcagttctgactgagaaggtagatgcacaggggaggagagggccctttcgagctccactctgcctccaccactcattccctaaccccgcagcctcagcgccctcatctgtaaaatggggagttttgcctacagggttcagcacaatgccagcctgacataggaaccccagtggattgtcagttttgccattatcccctgcatcctggaggtgacaccgcctggttaataggcaacactcccgacggcccagcacagccccagggcagcaggaggctggcctgtggccaagaatgcatggtggagggggcctggagggggactgcagctcctcctcttcctgcttcctccctgctccaccccgtgcctagggcagcacaaaagccaatcgctagcaaactccctgcctagca

SEQ ID NO: 3262 - protein, 50 aa, Homosapiens
MAPPSQGGVRITQCGEDSSAPQRQTQLPLRCLKALVVVTLDGRPGRLLWA

SEQ ID NO: 3263 - DNA, 2835 bp, Homosapiens
ctctaatgttcataaggtgactgttgtcattctgacttcaaagatgaaaaaacaaggtccaggcattttcccaagcacccagcgcacatgacagagccaagccaggccgcaagcccggtgcgtctgactcaggcccttgcactacccccacacccactgcctccctgtcctccctcctcaggggtacaaactccagatgatcgaggtgcccgtcctctccgacgactcagtgcctatcggcatgctgggaggagactactacaggaagctcctgcgctactacagcaagaaccgcccaaccgaggctgtcaggtgctacgagctgctggccctgcacctgtctgtcatccccactgacctgctggtgcagcaggccggccagctggcccggcgcctctgggaggcctcccgtatccccctgctctaggccaaggtggccgcagtctgcctttgcatcctgtcctccagccacccttgcttgccactgttccccatgacgagagcctcctgtctgcagtggccatcctgaggatagggcagagtgcccagggtggccccagggcttctaaaaccccacctagaccaccctccatgtcaggtactgagcaaggccccagatccttctctctggaggaagagggaagcccaggggtcctgtttgtaaaacaacggtggcaacagctcctcttccagagctgcctctgcctttatcctgggagatggggaggaagccccatctctgctgttccctgcgtggaggaagcccacccagcaagctctctcctaccccaggtaaaaggtgctcctttgcctgggtttgaattccagcgctgccacttcctctctgcacctcctggcaagtttcttctattccccacgtttaaagcgatggcacctccgtcccagggtggtgtgaggattacccagtgtggtaggtgctcaataaatgttggtcattgttatcactgaagcccaacatgctagtgcttctagacccttctgtcagtgctgataagcccttgctaagtcccagccccttcatgcttggctggcgtctgccctagggctggggttctcaagcccctggccctggcccagagatttggattcccttggcggccgtggagcccagcctttgatgtctttcaaagcttctgtggtgcgccctggattgagaaccaccacccgaggggtacagcccctctcttccaaccgagaagttcctgtcccagaatggacccagggacaagagaccctgagagccctgggactgggagtgtctgctcctctgaggccaggaggccggtgctgggccagagaggacggcgtggcgaaagtcagcgtccactgcagcacaggatcagatggccgtgtgctgtgcatgcaggagcctcgccttctgtgtctttagtcttgagccaaaatttgctcaaagactgatctcttccttgcagggaacagctttggggctgggggaactagaacccacatgttggtctaaaccctgagaaggtggcagtgaggaagtatcccctcaggtgactggatctgtgttcctccttaacatcatctgatggaatggcaatgaaaagcgtggattgtggaaaatacagaaaaacataaaggaaaaaactccaatcccctgagcccaccactgttcaggacccctgcttttgtcacctactatttccctttagtttttagcagcggctggatgtgatatgtctagtttaaccagtccccttgatctttctatataataaataacacaggagtgaacatcctgaatcagatcttagcagagatgctcacatgcggggtaactgtccatggtgtgtggaggggtcctcggaaccccctcttaggatcatctccacatactctcccagttctgagattcgttaccaatagcaggtttccgtcacactgcgatatcagagcagtgcaggaactctccgctccaaggggttttttcctcctaggggaacactctgctaagtaatgggcagagaacaaaggggctcctaattcaaggcaggcctaagggagggtcagaaagaactttagctggaggtatttacagatgtgacctcgaatccttggggattcttggaaaatgggcaaggtgccaaaagaggagaactggccaggccttcaaaactaaaacaccagagaattacagacagcgaacttgcccctaagccctcgttgtgggtttgtgtttgagcatttaggagaggactccagtgctcctcagcgacagacacagctgcctctgcggtgtctgaaggccctggtcgtggtgacgctagatggccgccctgggcgcctcctgtgggcgtagaggcatcaccactctgcactggcagactcagcatggagttggagcagagtctgacacgagcacttgccatcccaggcgtttcagttctgactgagaaggtagatgcacaggggaggagagggccctttcgagctccactctgcctccaccactcattccctaaccccgcagcctcagcgccctcatctgtaaaatggggagttttgcctacagggttcagcacaatgccagcctgacataggaaccccagtggattgtcagttttgccattatcccctgcatcctggaggtgacaccgcctggttaataggcaacactcccgacggcccagcacagccccagggcagcaggaggctggcctgtggccaagaatgcatggtggagggggcctggagggggactgcagctcctcctcttcctgcttcctccctgctccaccccgtgcctagggcagcacaaaagccaatcgctagcaaactccctgcctagca

SEQ ID NO: 3264 - protein, 89 aa, Homosapiens
MTEPSQAASPVRLTQALALPPHPLPPCPPSSGVQTPDDRGARPLRRLSAYRHAGRRLLQEAPALLQQEPPNRGCQVLRAAGPAPVCHPH

SEQ ID NO: 3265 - DNA, 3301 bp, Homosapiens
tggagaagaagctgaaggaagggccggagcccggggcctccctgcgctcccagcccctcgtgggagacctgcgccagaggatggacaagtttgtcaagaatcgaggggcacaggagattcagagcacctggctggagtttaaggccaaggctttctccaaaagtgagcccggatcctcctgggagctgctccaggcatgtgggaagctgaagcggcagctctgcgccatctaccggctgaactttctgaccacagcccccagcaggggaggcccacacctgccccagcacctgcaggaccaagtgcagaggctcatgcgggagaagctgacggactggaaggacttcttgctggtgaagagcaggaggaacatcaccatggtcttcacctacctagaagacttcccaggcttggtgcacttcatctatgtggaccgcaccactgggcagatggtggcgccttccctcaactgcagtcaaaagacctcgtcggagttgggcaaggggccgctggctgcctttgtcaaaactaaggtctggtctctgatccagctggcgcgcagatacctgcagaagggctacaccacgctgctgttccaggagggggatttctactgctcctacttcctgtggttcgagaatgacatggggtacaaactccagatgatcgaggtgcccgtcctctccgacgactcagtgcctatcggcatgctgggaggagactactacaggaagctcctgcgctactacagcaagaaccgcccaaccgaggctgtcaggtgctacgagctgctggccctgcacctgtctgtcatccccactgacctgctggtgcagcaggccggccagctggcccggcgcctctgggaggcctcccgtatccccctgctctaggccaaggtggccgcagtctgcctttgcatcctgtcctccagccacccttgcttgccactgttccccatgacgagagcctcctgtctgcagtggccatcctgaggatagggcagagtgcccagggtggccccagggcttctaaaaccccacctagaccaccctccatgtcaggtactgagcaaggccccagatccttctctctggaggaagagggaagcccaggggtcctgtttgtaaaacaacggtggcaacagctcctcttccagagctgcctctgcctttatcctgggagatggggaggaagccccatctctgctgttccctgcgtggaggaagcccacccagcaagctctctcctaccccaggtaaaaggtgctcctttgcctgggtttgaattccagcgctgccacttcctctctgcacctcctggcaagtttcttctattccccacgtttaaagcgatggcacctccgtcccagggtggtgtgaggattacccagtgtggtaggtgctcaataaatgttggtcattgttatcactgaagcccaacatgctagtgcttctagacccttctgtcagtgctgataagcccttgctaagtcccagccccttcatgcttggctggcgtctgccctagggctggggttctcaagcccctggccctggcccagagatttggattcccttggcggccgtggagcccagcctttgatgtctttcaaagcttctgtggtgcgccctggattgagaaccaccacccgaggggtacagcccctctcttccaaccgagaagttcctgtcccagaatggacccagggacaagagaccctgagagccctgggactgggagtgtctgctcctctgaggccaggaggccggtgctgggccagagaggacggcgtggcgaaagtcagcgtccactgcagcacaggatcagatggccgtgtgctgtgcatgcaggagcctcgccttctgtgtctttagtcttgagccaaaatttgctcaaagactgatctcttccttgcagggaacagctttggggctgggggaactagaacccacatgttggtctaaaccctgagaaggtggcagtgaggaagtatcccctcaggtgactggatctgtgttcctccttaacatcatctgatggaatggcaatgaaaagcgtggattgtggaaaatacagaaaaacataaaggaaaaaactccaatcccctgagcccaccactgttcaggacccctgcttttgtcacctactatttccctttagtttttagcagcggctggatgtgatatgtctagtttaaccagtccccttgatctttctatataataaataacacaggagtgaacatcctgaatcagatcttagcagagatgctcacatgcggggtaactgtccatggtgtgtggaggggtcctcggaaccccctcttaggatcatctccacatactctcccagttctgagattcgttaccaatagcaggtttccgtcacactgcgatatcagagcagtgcaggaactctccgctccaaggggttttttcctcctaggggaacactctgctaagtaatgggcagagaacaaaggggctcctaattcaaggcaggcctaagggagggtcagaaagaactttagctggaggtatttacagatgtgacctcgaatccttggggattcttggaaaatgggcaaggtgccaaaagaggagaactggccaggccttcaaaactaaaacaccagagaattacagacagcgaacttgcccctaagccctcgttgtgggtttgtgtttgagcatttaggagaggactccagtgctcctcagcgacagacacagctgcctctgcggtgtctgaaggccctggtcgtggtgacgctagatggccgccctgggcgcctcctgtgggcgtagaggcatcaccactctgcactggcagactcagcatggagttggagcagagtctgacacgagcacttgccatcccaggcgtttcagttctgactgagaaggtagatgcacaggggaggagagggccctttcgagctccactctgcctccaccactcattccctaaccccgcagcctcagcgccctcatctgtaaaatggggagttttgcctacagggttcagcacaatgccagcctgacataggaaccccagtggattgtcagttttgccattatcccctgcatcctggaggtgacaccgcctggttaataggcaacactcccgacggcccagcacagccccagggcagcaggaggctggcctgtggccaagaatgcatggtggagggggcctggagggggactgcagctcctcctcttcctgcttcctccctgctccaccccgtgcctagggcagcacaaaagccaatcgctagcaaactccctgcctagca

SEQ ID NO: 3266 - protein, 270 aa, Homosapiens
MDKFVKNRGAQEIQSTWLEFKAKAFSKSEPGSSWELLQACGKLKRQLCAIYRLNFLTTAPSRGGPHLPQHLQDQVQRLMREKLTDWKDFLLVKSRRNITMVFTYLEDFPGLVHFIYVDRTTGQMVAPSLNCSQKTSSELGKGPLAAFVKTKVWSLIQLARRYLQKGYTTLLFQEGDFYCSYFLWFENDMGYKLQMIEVPVLSDDSVPIGMLGGDYYRKLLRYYSKNRPTEAVRCYELLALHLSVIPTDLLVQQAGQLARRLWEASRIPLL

SEQ ID NO: 3267 - DNA, 4713 bp, Homosapiens
ggtcctacccggaagcgcgcccgggctcctgcaggcggggcgctgtgcgcgccgcgatccggtacgtgggcctccgggctgtcccctctgggggcggcgatcctccctccggagccccccttcaaccctcccggaagtgagcatttgcaggaccagggatgctgtgctgctctcccatgagccagtcaccgagtcggtctgctgcagccctttctgaacctctggccgtctggatgctccactgtgcttgccaagatgaagtgcgtcttggtggccactgagggcgcagaggtcctcttctactggacagatcaggagtttgaagagagtctccggctgaagttcgggcagtcagagaatgaggaagaagagctccctgccctggaggaccagctcagcaccctcctagccccggtcatcatctcctccatgacgatgctggagaagctctcggacacctacacctgcttctccacggaaaatggcaacttcctgtatgtccttcacctgtttggagaatgcctgttcattgccatcaatggtgaccacaccgagagcgagggggacctgcggcggaagctgtatgtgctcaagtacctgtttgaagtgcactttgggctggtgactgtggacggtcatcttatccgaaaggagctgcggcccccagacctggcgcagcgtgtccagctgtgggagcacttccagagcctgctgtggacctacagccgcctgcgggagcaggagcagtgcttcgccgtggaggtgactactgggcgcgggagtcctcaggacttgaagctgtcaggccctggagcgactgattcacccccagctctgtgagctgtgcatagaggcgctggagcggcacgtcatccaggctgtcaacaccagccccgagcggggaggcgaggaggccctgcatgccttcctgctcgtgcactccaagctgctggcattctactctagccacagtgccagctccctgcgcccggccgacctgcttgccctcatcctcctggttcaggacctctaccccagcgagagcacagcagaggacgacattcaggagacagacagcttctccctccctgaggagtacttcacaccagctccttcccctggcgatcagagctcaggtagcaccatctggctggaggggggcaccccccccatggatgcccttcagatagcagaggacaccctccaaacactggttccccactgccctgtgccttccggccccagaaggatcttcctggatgccaacgtgaaggaaagctactgccccctagtgccccacaccatgtactgcctgcccctgtggcagggcatcaacctggtgctcctgaccaggagccccagcgcgcccctggccctggttctgtcccagctgatggatggcttctccatgctggagaagaagctgaaggaagggccggagcccggggcctccctgcgctcccagcccctcgtgggagacctgcgccagaggatggacaagtttgtcaagaatcgaggggcacaggagattcagagcacctggctggagtttaaggccaaggctttctccaaaagtgagcccggatcctcctgggagctgctccaggcatgtgggaagctgaagcggcagctctgcgccatctaccggctgaactttctgaccacagcccccagcaggggaggcccacacctgccccagcacctgcaggaccaagtgcagaggctcatgcgggagaagctgacggactggaaggacttcttgctggtgaagagcaggaggaacatcaccatggtcttcacctacctagaagacttcccaggcttggtgcacttcatctatgtggaccgcaccactgggcagatggtggcgccttccctcaactgcagtcaaaagacctcgtcggagttgggcaaggggccgctggctgcctttgtcaaaactaaggtctggtctctgatccagctggcgcgcagatacctgcagaagggctacaccacgctgctgttccaggagggggatttctactgctcctacttcctgtggttcgagaatgacatggggtacaaactccagatgatcgaggtgcccgtcctctccgacgactcagtgcctatcggcatgctgggaggagactactacaggaagctcctgcgctactacagcaagaaccgcccaaccgaggctgtcaggtgctacgagctgctggccctgcacctgtctgtcatccccactgacctgctggtgcagcaggccggccagctggcccggcgcctctgggaggcctcccgtatccccctgctctaggccaaggtggccgcagtctgcctttgcatcctgtcctccagccacccttgcttgccactgttccccatgacgagagcctcctgtctgcagtggccatcctgaggatagggcagagtgcccagggtggccccagggcttctaaaaccccacctagaccaccctccatgtcaggtactgagcaaggccccagatccttctctctggaggaagagggaagcccaggggtcctgtttgtaaaacaacggtggcaacagctcctcttccagagctgcctctgcctttatcctgggagatggggaggaagccccatctctgctgttccctgcgtggaggaagcccacccagcaagctctctcctaccccaggtaaaaggtgctcctttgcctgggtttgaattccagcgctgccacttcctctctgcacctcctggcaagtttcttctattccccacgtttaaagcgatggcacctccgtcccagggtggtgtgaggattacccagtgtggtaggtgctcaataaatgttggtcattgttatcactgaagcccaacatgctagtgcttctagacccttctgtcagtgctgataagcccttgctaagtcccagccccttcatgcttggctggcgtctgccctagggctggggttctcaagcccctggccctggcccagagatttggattcccttggcggccgtggagcccagcctttgatgtctttcaaagcttctgtggtgcgccctggattgagaaccaccacccgaggggtacagcccctctcttccaaccgagaagttcctgtcccagaatggacccagggacaagagaccctgagagccctgggactgggagtgtctgctcctctgaggccaggaggccggtgctgggccagagaggacggcgtggcgaaagtcagcgtccactgcagcacaggatcagatggccgtgtgctgtgcatgcaggagcctcgccttctgtgtctttagtcttgagccaaaatttgctcaaagactgatctcttccttgcagggaacagctttggggctgggggaactagaacccacatgttggtctaaaccctgagaaggtggcagtgaggaagtatcccctcaggtgactggatctgtgttcctccttaacatcatctgatggaatggcaatgaaaagcgtggattgtggaaaatacagaaaaacataaaggaaaaaactccaatcccctgagcccaccactgttcaggacccctgcttttgtcacctactatttccctttagtttttagcagcggctggatgtgatatgtctagtttaaccagtccccttgatctttctatataataaataacacaggagtgaacatcctgaatcagatcttagcagagatgctcacatgcggggtaactgtccatggtgtgtggaggggtcctcggaaccccctcttaggatcatctccacatactctcccagttctgagattcgttaccaatagcaggtttccgtcacactgcgatatcagagcagtgcaggaactctccgctccaaggggttttttcctcctaggggaacactctgctaagtaatgggcagagaacaaaggggctcctaattcaaggcaggcctaagggagggtcagaaagaactttagctggaggtatttacagatgtgacctcgaatccttggggattcttggaaaatgggcaaggtgccaaaagaggagaactggccaggccttcaaaactaaaacaccagagaattacagacagcgaacttgcccctaagccctcgttgtgggtttgtgtttgagcatttaggagaggactccagtgctcctcagcgacagacacagctgcctctgcggtgtctgaaggccctggtcgtggtgacgctagatggccgccctgggcgcctcctgtgggcgtagaggcatcaccactctgcactggcagactcagcatggagttggagcagagtctgacacgagcacttgccatcccaggcgtttcagttctgactgagaaggtagatgcacaggggaggagagggccctttcgagctccactctgcctccaccactcattccctaaccccgcagcctcagcgccctcatctgtaaaatggggagttttgcctacagggttcagcacaatgccagcctgacataggaaccccagtggattgtcagttttgccattatcccctgcatcctggaggtgacaccgcctggttaataggcaacactcccgacggcccagcacagccccagggcagcaggaggctggcctgtggccaagaatgcatggtggagggggcctggagggggactgcagctcctcctcttcctgcttcctccctgctccaccccgtgcctagggcagcacaaaagccaatcgctagcaaactccctgcctagca

SEQ ID NO: 3268 - protein, 377 aa, Homosapiens
MDALQIAEDTLQTLVPHCPVPSGPRRIFLDANVKESYCPLVPHTMYCLPLWQGINLVLLTRSPSAPLALVLSQLMDGFSMLEKKLKEGPEPGASLRSQPLVGDLRQRMDKFVKNRGAQEIQSTWLEFKAKAFSKSEPGSSWELLQACGKLKRQLCAIYRLNFLTTAPSRGGPHLPQHLQDQVQRLMREKLTDWKDFLLVKSRRNITMVFTYLEDFPGLVHFIYVDRTTGQMVAPSLNCSQKTSSELGKGPLAAFVKTKVWSLIQLARRYLQKGYTTLLFQEGDFYCSYFLWFENDMGYKLQMIEVPVLSDDSVPIGMLGGDYYRKLLRYYSKNRPTEAVRCYELLALHLSVIPTDLLVQQAGQLARRLWEASRIPLL

SEQ ID NO: 3269 - DNA, 4366 bp, Homosapiens
ggtcctacccggaagcgcgcccgggctcctgcaggcggggcgctgtgcgcgccgcgatccggtacgtgggcctccgggctgtcccctctgggggcggcgatcctccctccggagccccccttcaaccctcccggaagtgagcatttgcaggaccagggatgctgtgctgctctcccatgagccagtcaccgagtcggtctgctgcagccctttctgaacctctggccgtctggatgctccactgtgcttgccaagatgaagtgcgtcttggtggccactgagggcgcagaggtcctcttctactggacagatcaggagtttgaagagagtctccggctgaagttcgggcagtcagagaatgaggaagaagagctccctgccctggaggaccagctcagcaccctcctagccccggtcatcatctcctccatgacgatgctggagaagctctcggacacctacacctgcttctccacggaaaatggcaacttcctgtatgtccttcacctggctgcggcccccagacctggcgcagcgtgtccagctgtgggagcacttccagagcctgctgtggacctacagccgcctgcgggagcaggagcagtgcttcgccgtggagccacagtgccagctccctgcgcccggccgacctgcttgccctcatcctcctggttcaggacctctaccccagcgagagcacagcagaggacgacattcaggagacagacagcttctccctccctgaggagtacttcacaccagctccttcccctggcgatcagagctcaggtagcaccatctggctggaggggggcaccccccccatggatgcccttcagatagcagaggacaccctccaaacactggttccccactgccctgtgccttccggccccagaaggatcttcctggatgccaacgtgaaggaaagctactgccccctagtgccccacaccatgtactgcctgcccctgtggcagggcatcaacctggtgctcctgaccaggagccccagcgcgcccctggccctggttctgtcccagctgatggatggcttctccatgctggagaagaagctgaaggaagggccggagcccggggcctccctgcgctcccagcccctcgtgggagacctgcgccagaggatggacaagtttgtcaagaatcgaggggcacaggagattcagagcacctggctggagtttaaggccaaggctttctccaaaagtgagcccggatcctcctgggagctgctccaggcatgtgggaagctgaagcggcagctctgcgccatctaccggctgaactttctgaccacagcccccagcaggggaggcccacacctgccccagcacctgcaggaccaagtgcagaggctcatgcgggagaagctgacggactggaaggacttcttgctggtgaagagcaggaggaacatcaccatggtcttcacctacctagaagacttcccaggcttggtgcacttcatctatgtggaccgcaccactgggcagatggtggcgccttccctcaactgcagtcaaaagacctcgtcggagttgggcaaggggccgctggctgcctttgtcaaaactaaggtctggtctctgatccagctggcgcgcagatacctgcagaagggctacaccacgctgctgttccaggagggggatttctactgctcctacttcctgtggttcgagaatgacatggggtacaaactccagatgatcgaggtgcccgtcctctccgacgactcagtgcctatcggcatgctgggaggagactactacaggaagctcctgcgctactacagcaagaaccgcccaaccgaggctgtcaggtgctacgagctgctggccctgcacctgtctgtcatccccactgacctgctggtgcagcaggccggccagctggcccggcgcctctgggaggcctcccgtatccccctgctctaggccaaggtggccgcagtctgcctttgcatcctgtcctccagccacccttgcttgccactgttccccatgacgagagcctcctgtctgcagtggccatcctgaggatagggcagagtgcccagggtggccccagggcttctaaaaccccacctagaccaccctccatgtcaggtactgagcaaggccccagatccttctctctggaggaagagggaagcccaggggtcctgtttgtaaaacaacggtggcaacagctcctcttccagagctgcctctgcctttatcctgggagatggggaggaagccccatctctgctgttccctgcgtggaggaagcccacccagcaagctctctcctaccccaggtaaaaggtgctcctttgcctgggtttgaattccagcgctgccacttcctctctgcacctcctggcaagtttcttctattccccacgtttaaagcgatggcacctccgtcccagggtggtgtgaggattacccagtgtggtaggtgctcaataaatgttggtcattgttatcactgaagcccaacatgctagtgcttctagacccttctgtcagtgctgataagcccttgctaagtcccagccccttcatgcttggctggcgtctgccctagggctggggttctcaagcccctggccctggcccagagatttggattcccttggcggccgtggagcccagcctttgatgtctttcaaagcttctgtggtgcgccctggattgagaaccaccacccgaggggtacagcccctctcttccaaccgagaagttcctgtcccagaatggacccagggacaagagaccctgagagccctgggactgggagtgtctgctcctctgaggccaggaggccggtgctgggccagagaggacggcgtggcgaaagtcagcgtccactgcagcacaggatcagatggccgtgtgctgtgcatgcaggagcctcgccttctgtgtctttagtcttgagccaaaatttgctcaaagactgatctcttccttgcagggaacagctttggggctgggggaactagaacccacatgttggtctaaaccctgagaaggtggcagtgaggaagtatcccctcaggtgactggatctgtgttcctccttaacatcatctgatggaatggcaatgaaaagcgtggattgtggaaaatacagaaaaacataaaggaaaaaactccaatcccctgagcccaccactgttcaggacccctgcttttgtcacctactatttccctttagtttttagcagcggctggatgtgatatgtctagtttaaccagtccccttgatctttctatataataaataacacaggagtgaacatcctgaatcagatcttagcagagatgctcacatgcggggtaactgtccatggtgtgtggaggggtcctcggaaccccctcttaggatcatctccacatactctcccagttctgagattcgttaccaatagcaggtttccgtcacactgcgatatcagagcagtgcaggaactctccgctccaaggggttttttcctcctaggggaacactctgctaagtaatgggcagagaacaaaggggctcctaattcaaggcaggcctaagggagggtcagaaagaactttagctggaggtatttacagatgtgacctcgaatccttggggattcttggaaaatgggcaaggtgccaaaagaggagaactggccaggccttcaaaactaaaacaccagagaattacagacagcgaacttgcccctaagccctcgttgtgggtttgtgtttgagcatttaggagaggactccagtgctcctcagcgacagacacagctgcctctgcggtgtctgaaggccctggtcgtggtgacgctagatggccgccctgggcgcctcctgtgggcgtagaggcatcaccactctgcactggcagactcagcatggagttggagcagagtctgacacgagcacttgccatcccaggcgtttcagttctgactgagaaggtagatgcacaggggaggagagggccctttcgagctccactctgcctccaccactcattccctaaccccgcagcctcagcgccctcatctgtaaaatggggagttttgcctacagggttcagcacaatgccagcctgacataggaaccccagtggattgtcagttttgccattatcccctgcatcctggaggtgacaccgcctggttaataggcaacactcccgacggcccagcacagccccagggcagcaggaggctggcctgtggccaagaatgcatggtggagggggcctggagggggactgcagctcctcctcttcctgcttcctccctgctccaccccgtgcctagggcagcacaaaagccaatcgctagcaaactccctgcctagca

SEQ ID NO: 3270 - protein, 377 aa, Homosapiens; identical to SEQ ID NO: 3268

SEQ ID NO: 3271 - DNA, 4769 bp, Homosapiens
ggtcctacccggaagcgcgcccgggctcctgcaggcggggcgctgtgcgcgccgcgatccggtacgtgggcctccgggctgtcccctctgggggcggcgatcctccctccggagccccccttcaaccctcccggaagtgagcatttgcaggaccagggatgctgtgctgctctcccatgagccagtcaccgagtcggtctgctgcagccctttctgaacctctggccgtctggatgctccactgtgcttgccaagatgaagtgcgtcttggtggccactgagggcgcagaggtcctcttctactggacagatcaggagtttgaagagagtctccggctgaagttcgggcagtcagagaatgaggaagaagagctccctgccctggaggaccagctcagcaccctcctagccccggtcatcatctcctccatgacgatgctggagaagctctcggacacctacacctgcttctccacggaaaatggcaacttcctgtatgtccttcacctgtttggagaatgcctgttcattgccatcaatggtgaccacaccgagagcgagggggacctgcggcggaagctgtatgtgctcaagtacctgtttgaagtgcactttgggctggtgactgtggacggtcatcttatccgaaaggagctgcggcccccagacctggcgcagcgtgtccagctgtgggagcacttccagagcctgctgtggacctacagccgcctgcgggagcaggagcagtgcttcgccgtggaggccctggagcgactgattcacccccagctctgtgagctgtgcatagaggcgctggagcggcacgtcatccaggctgtcaacaccagccccgagcggggaggcgaggaggccctgcatgccttcctgctcgtgcactccaagctgctggcattctactctagccacagtgccagctccctgcgcccggccgacctgcttgccctcatcctcctggttcaggacctctaccccagcgagagcacagcagaggacgacattcagccttccccgcggagggcccggagcagccagaacatccccgtgcagcaggcctggagccctcactccacgggcccaactggggggagctctgcagagacggagacagacagcttctccctccctgaggagtacttcacaccagctccttcccctggcgatcagagctcaggtagcaccatctggctggaggggggcaccccccccatggatgcccttcagatagcagaggacaccctccaaacactggttccccactgccctgtgccttccggccccagaaggatcttcctggatgccaacgtgaaggaaagctactgccccctagtgccccacaccatgtactgcctgcccctgtggcagggcatcaacctggtgctcctgaccaggagccccagcgcgcccctggccctggttctgtcccagctgatggatggcttctccatgctggagaagaagctgaaggaagggccggagcccggggcctccctgcgctcccagcccctcgtgggagacctgcgccagaggatggacaagtttgtcaagaatcgaggggcacaggagattcagagcacctggctggagtttaaggccaaggctttctccaaaagtgagcccggatcctcctgggagctgctccaggcatgtgggaagctgaagcggcagctctgcgccatctaccggctgaactttctgaccacagcccccagcaggggaggcccacacctgccccagcacctgcaggaccaagtgcagaggctcatgcgggagaagctgacggactggaaggacttcttgctggtgaagagcaggaggaacatcaccatggtcttcacctacctagaagacttcccaggcttggtgcacttcatctatgtggaccgcaccactgggcagatggtggcgccttccctcaactgcagtcaaaagacctcgtcggagttgggcaaggggccgctggctgcctttgtcaaaactaaggtctggtctctgatccagctggcgcgcagatacctgcagaagggctacaccacgctgctgttccaggagggggatttctactgctcctacttcctgtggttcgagaatgacatggggtacaaactccagatgatcgaggtgcccgtcctctccgacgactcagtgcctatcggcatgctgggaggagactactacaggaagctcctgcgctactacagcaagaaccgcccaaccgaggctgtcaggtgctacgagctgctggccctgcacctgtctgtcatccccactgacctgctggtgcagcaggccggccagctggcccggcgcctctgggaggcctcccgtatccccctgctctaggccaaggtggccgcagtctgcctttgcatcctgtcctccagccacccttgcttgccactgttccccatgacgagagcctcctgtctgcagtggccatcctgaggatagggcagagtgcccagggtggccccagggcttctaaaaccccacctagaccaccctccatgtcaggtactgagcaaggccccagatccttctctctggaggaagagggaagcccaggggtcctgtttgtaaaacaacggtggcaacagctcctcttccagagctgcctctgcctttatcctgggagatggggaggaagccccatctctgctgttccctgcgtggaggaagcccacccagcaagctctctcctaccccaggtaaaaggtgctcctttgcctgggtttgaattccagcgctgccacttcctctctgcacctcctggcaagtttcttctattccccacgtttaaagcgatggcacctccgtcccagggtggtgtgaggattacccagtgtggtaggtgctcaataaatgttggtcattgttatcactgaagcccaacatgctagtgcttctagacccttctgtcagtgctgataagcccttgctaagtcccagccccttcatgcttggctggcgtctgccctagggctggggttctcaagcccctggccctggcccagagatttggattcccttggcggccgtggagcccagcctttgatgtctttcaaagcttctgtggtgcgccctggattgagaaccaccacccgaggggtacagcccctctcttccaaccgagaagttcctgtcccagaatggacccagggacaagagaccctgagagccctgggactgggagtgtctgctcctctgaggccaggaggccggtgctgggccagagaggacggcgtggcgaaagtcagcgtccactgcagcacaggatcagatggccgtgtgctgtgcatgcaggagcctcgccttctgtgtctttagtcttgagccaaaatttgctcaaagactgatctcttccttgcagggaacagctttggggctgggggaactagaacccacatgttggtctaaaccctgagaaggtggcagtgaggaagtatcccctcaggtgactggatctgtgttcctccttaacatcatctgatggaatggcaatgaaaagcgtggattgtggaaaatacagaaaaacataaaggaaaaaactccaatcccctgagcccaccactgttcaggacccctgcttttgtcacctactatttccctttagtttttagcagcggctggatgtgatatgtctagtttaaccagtccccttgatctttctatataataaataacacaggagtgaacatcctgaatcagatcttagcagagatgctcacatgcggggtaactgtccatggtgtgtggaggggtcctcggaaccccctcttaggatcatctccacatactctcccagttctgagattcgttaccaatagcaggtttccgtcacactgcgatatcagagcagtgcaggaactctccgctccaaggggttttttcctcctaggggaacactctgctaagtaatgggcagagaacaaaggggctcctaattcaaggcaggcctaagggagggtcagaaagaactttagctggaggtatttacagatgtgacctcgaatccttggggattcttggaaaatgggcaaggtgccaaaagaggagaactggccaggccttcaaaactaaaacaccagagaattacagacagcgaacttgcccctaagccctcgttgtgggtttgtgtttgagcatttaggagaggactccagtgctcctcagcgacagacacagctgcctctgcggtgtctgaaggccctggtcgtggtgacgctagatggccgccctgggcgcctcctgtgggcgtagaggcatcaccactctgcactggcagactcagcatggagttggagcagagtctgacacgagcacttgccatcccaggcgtttcagttctgactgagaaggtagatgcacaggggaggagagggccctttcgagctccactctgcctccaccactcattccctaaccccgcagcctcagcgccctcatctgtaaaatggggagttttgcctacagggttcagcacaatgccagcctgacataggaaccccagtggattgtcagttttgccattatcccctgcatcctggaggtgacaccgcctggttaataggcaacactcccgacggcccagcacagccccagggcagcaggaggctggcctgtggccaagaatgcatggtggagggggcctggagggggactgcagctcctcctcttcctgcttcctccctgctccaccccgtgcctagggcagcacaaaagccaatcgctagcaaactccctgcctagca

SEQ ID NO: 3272 - protein, 701 aa, Homosapiens
MKCVLVATEGAEVLFYWTDQEFEESLRLKFGQSENEEEELPALEDQLSTLLAPVIISSMTMLEKLSDTYTCFSTENGNFLYVLHLFGECLFIAINGDHTESEGDLRRKLYVLKYLFEVHFGLVTVDGHLIRKELRPPDLAQRVQLWEHFQSLLWTYSRLREQEQCFAVEALERLIHPQLCELCIEALERHVIQAVNTSPERGGEEALHAFLLVHSKLLAFYSSHSASSLRPADLLALILLVQDLYPSESTAEDDIQPSPRRARSSQNIPVQQAWSPHSTGPTGGSSAETETDSFSLPEEYFTPAPSPGDQSSGSTIWLEGGTPPMDALQIAEDTLQTLVPHCPVPSGPRRIFLDANVKESYCPLVPHTMYCLPLWQGINLVLLTRSPSAPLALVLSQLMDGFSMLEKKLKEGPEPGASLRSQPLVGDLRQRMDKFVKNRGAQEIQSTWLEFKAKAFSKSEPGSSWELLQACGKLKRQLCAIYRLNFLTTAPSRGGPHLPQHLQDQVQRLMREKLTDWKDFLLVKSRRNITMVFTYLEDFPGLVHFIYVDRTTGQMVAPSLNCSQKTSSELGKGPLAAFVKTKVWSLIQLARRYLQKGYTTLLFQEGDFYCSYFLWFENDMGYKLQMIEVPVLSDDSVPIGMLGGDYYRKLLRYYSKNRPTEAVRCYELLALHLSVIPTDLLVQQAGQLARRLWEASRIPLL

SEQ ID NO: 3273 - DNA, 1792 bp, Homosapiens
ctctaatgttcataaggtgactgttgtcattctgacttcaaagatgaaaaaacaaggtccaggcattttcccaagcacccagcgcacatgacagagccaagccaggccgcaagcccggtgcgtctgactcaggcccttgcactacccccacacccactgcctccctgtcctccctcctcaggggtacaaactccagatgatcgaggtgcccgtcctctccgacgactcagtgcctatcggcatgctgggaggagactactacaggaagctcctgcgctactacagcaagaaccgcccaaccgaggctgtcaggtgctacgagctgctggccctgcacctgtctgtcatccccactgacctgctggtgcagcaggccggccagctggcccggcgcctctgggaggcctcccgtatccccctgctctaggccaaggtggccgcagtctgcctttgcatcctgtcctccagccacccttgcttgccactgttccccatgacgagagcctcctgtctgcagtggccatcctgaggatagggcagagtgcccagggtggccccagggcttctaaaaccccacctagaccaccctccatgtcaggtactgagcaaggccccagatccttctctctggaggaagagggaagcccaggggtcctgtttgtaaaacaacggtggcaacagctcctcttccagagctgcctctgcctttatcctgggagatggggaggaagccccatctctgctgttccctgcgtggaggaagcccacccagcaagctctctcctaccccaggtaaaaggtgctcctttgcctgggtttgaattccagcgctgccacttcctctctgcacctcctggcaagtttcttctattccccacgtttaaagcgatggcacctccgtcccagggtggtgtgaggattacccagtgtggtaggtgctcaataaatgttggtcattgttatcactgaagcccaacatgctagtgcttctagacccttctgtcagtgctgataagcccttgctaagtcccagccccttcatgcttggctggcgtctgccctagggctggggttctcaagcccctggccctggcccagagatttggattcccttggcggccgtggagcccagcctttgatgtctttcaaagcttctgtggtgcgccctggattgagaaccaccacccgaggggtacagcccctctcttccaaccgagaagttcctgtcccagaatggacccagggacaagagaccctgagagccctgggactgggagtgtctgctcctctgaggccaggaggccggtgctgggccagagaggacggcgtggcgaaagtcagcgtccactgcagcacaggatcagatggccgtgtgctgtgcatgcaggagcctcgccttctgtgtctttagtcttgagccaaaatttgctcaaagactgatctcttccttgcagggaacagctttggggctgggggaactagaacccacatgttggtctaaaccctgagaaggtggcagtgaggaagtatcccctcaggtgactggatctgtgttcctccttaacatcatctgatggaatggcaatgaaaagcgtggattgtggaaaatacagaaaaacataaaggaaaaaactccaatcccctgagcccaccactgttcaggacccctgcttttgtcacctactatttccctttagtttttagcagcggctggatgtgatatgtctagtttaaccagtccccttgatctttctatataataaataacacaggagtgaacatcctgaatcag

SEQ ID NO: 3274 - protein, 89 aa, Homosapiens; identical to SEQ ID NO: 3264

SEQ ID NO: 3275 - DNA, 2258 bp, Homosapiens
tggagaagaagctgaaggaagggccggagcccggggcctccctgcgctcccagcccctcgtgggagacctgcgccagaggatggacaagtttgtcaagaatcgaggggcacaggagattcagagcacctggctggagtttaaggccaaggctttctccaaaagtgagcccggatcctcctgggagctgctccaggcatgtgggaagctgaagcggcagctctgcgccatctaccggctgaactttctgaccacagcccccagcaggggaggcccacacctgccccagcacctgcaggaccaagtgcagaggctcatgcgggagaagctgacggactggaaggacttcttgctggtgaagagcaggaggaacatcaccatggtcttcacctacctagaagacttcccaggcttggtgcacttcatctatgtggaccgcaccactgggcagatggtggcgccttccctcaactgcagtcaaaagacctcgtcggagttgggcaaggggccgctggctgcctttgtcaaaactaaggtctggtctctgatccagctggcgcgcagatacctgcagaagggctacaccacgctgctgttccaggagggggatttctactgctcctacttcctgtggttcgagaatgacatggggtacaaactccagatgatcgaggtgcccgtcctctccgacgactcagtgcctatcggcatgctgggaggagactactacaggaagctcctgcgctactacagcaagaaccgcccaaccgaggctgtcaggtgctacgagctgctggccctgcacctgtctgtcatccccactgacctgctggtgcagcaggccggccagctggcccggcgcctctgggaggcctcccgtatccccctgctctaggccaaggtggccgcagtctgcctttgcatcctgtcctccagccacccttgcttgccactgttccccatgacgagagcctcctgtctgcagtggccatcctgaggatagggcagagtgcccagggtggccccagggcttctaaaaccccacctagaccaccctccatgtcaggtactgagcaaggccccagatccttctctctggaggaagagggaagcccaggggtcctgtttgtaaaacaacggtggcaacagctcctcttccagagctgcctctgcctttatcctgggagatggggaggaagccccatctctgctgttccctgcgtggaggaagcccacccagcaagctctctcctaccccaggtaaaaggtgctcctttgcctgggtttgaattccagcgctgccacttcctctctgcacctcctggcaagtttcttctattccccacgtttaaagcgatggcacctccgtcccagggtggtgtgaggattacccagtgtggtaggtgctcaataaatgttggtcattgttatcactgaagcccaacatgctagtgcttctagacccttctgtcagtgctgataagcccttgctaagtcccagccccttcatgcttggctggcgtctgccctagggctggggttctcaagcccctggccctggcccagagatttggattcccttggcggccgtggagcccagcctttgatgtctttcaaagcttctgtggtgcgccctggattgagaaccaccacccgaggggtacagcccctctcttccaaccgagaagttcctgtcccagaatggacccagggacaagagaccctgagagccctgggactgggagtgtctgctcctctgaggccaggaggccggtgctgggccagagaggacggcgtggcgaaagtcagcgtccactgcagcacaggatcagatggccgtgtgctgtgcatgcaggagcctcgccttctgtgtctttagtcttgagccaaaatttgctcaaagactgatctcttccttgcagggaacagctttggggctgggggaactagaacccacatgttggtctaaaccctgagaaggtggcagtgaggaagtatcccctcaggtgactggatctgtgttcctccttaacatcatctgatggaatggcaatgaaaagcgtggattgtggaaaatacagaaaaacataaaggaaaaaactccaatcccctgagcccaccactgttcaggacccctgcttttgtcacctactatttccctttagtttttagcagcggctggatgtgatatgtctagtttaaccagtccccttgatctttctatataataaataacacaggagtgaacatcctgaatcag

SEQ ID NO: 3276 - protein, 270 aa, Homosapiens; identical to SEQ ID NO: 3266

SEQ ID NO: 3277 - DNA, 3323 bp, Homosapiens
ggtcctacccggaagcgcgcccgggctcctgcaggcggggcgctgtgcgcgccgcgatccggtacgtgggcctccgggctgtcccctctgggggcggcgatcctccctccggagccccccttcaaccctcccggaagtgagcatttgcaggaccagggatgctgtgctgctctcccatgagccagtcaccgagtcggtctgctgcagccctttctgaacctctggccgtctggatgctccactgtgcttgccaagatgaagtgcgtcttggtggccactgagggcgcagaggtcctcttctactggacagatcaggagtttgaagagagtctccggctgaagttcgggcagtcagagaatgaggaagaagagctccctgccctggaggaccagctcagcaccctcctagccccggtcatcatctcctccatgacgatgctggagaagctctcggacacctacacctgcttctccacggaaaatggcaacttcctgtatgtccttcacctggctgcggcccccagacctggcgcagcgtgtccagctgtgggagcacttccagagcctgctgtggacctacagccgcctgcgggagcaggagcagtgcttcgccgtggagccacagtgccagctccctgcgcccggccgacctgcttgccctcatcctcctggttcaggacctctaccccagcgagagcacagcagaggacgacattcaggagacagacagcttctccctccctgaggagtacttcacaccagctccttcccctggcgatcagagctcaggtagcaccatctggctggaggggggcaccccccccatggatgcccttcagatagcagaggacaccctccaaacactggttccccactgccctgtgccttccggccccagaaggatcttcctggatgccaacgtgaaggaaagctactgccccctagtgccccacaccatgtactgcctgcccctgtggcagggcatcaacctggtgctcctgaccaggagccccagcgcgcccctggccctggttctgtcccagctgatggatggcttctccatgctggagaagaagctgaaggaagggccggagcccggggcctccctgcgctcccagcccctcgtgggagacctgcgccagaggatggacaagtttgtcaagaatcgaggggcacaggagattcagagcacctggctggagtttaaggccaaggctttctccaaaagtgagcccggatcctcctgggagctgctccaggcatgtgggaagctgaagcggcagctctgcgccatctaccggctgaactttctgaccacagcccccagcaggggaggcccacacctgccccagcacctgcaggaccaagtgcagaggctcatgcgggagaagctgacggactggaaggacttcttgctggtgaagagcaggaggaacatcaccatggtcttcacctacctagaagacttcccaggcttggtgcacttcatctatgtggaccgcaccactgggcagatggtggcgccttccctcaactgcagtcaaaagacctcgtcggagttgggcaaggggccgctggctgcctttgtcaaaactaaggtctggtctctgatccagctggcgcgcagatacctgcagaagggctacaccacgctgctgttccaggagggggatttctactgctcctacttcctgtggttcgagaatgacatggggtacaaactccagatgatcgaggtgcccgtcctctccgacgactcagtgcctatcggcatgctgggaggagactactacaggaagctcctgcgctactacagcaagaaccgcccaaccgaggctgtcaggtgctacgagctgctggccctgcacctgtctgtcatccccactgacctgctggtgcagcaggccggccagctggcccggcgcctctgggaggcctcccgtatccccctgctctaggccaaggtggccgcagtctgcctttgcatcctgtcctccagccacccttgcttgccactgttccccatgacgagagcctcctgtctgcagtggccatcctgaggatagggcagagtgcccagggtggccccagggcttctaaaaccccacctagaccaccctccatgtcaggtactgagcaaggccccagatccttctctctggaggaagagggaagcccaggggtcctgtttgtaaaacaacggtggcaacagctcctcttccagagctgcctctgcctttatcctgggagatggggaggaagccccatctctgctgttccctgcgtggaggaagcccacccagcaagctctctcctaccccaggtaaaaggtgctcctttgcctgggtttgaattccagcgctgccacttcctctctgcacctcctggcaagtttcttctattccccacgtttaaagcgatggcacctccgtcccagggtggtgtgaggattacccagtgtggtaggtgctcaataaatgttggtcattgttatcactgaagcccaacatgctagtgcttctagacccttctgtcagtgctgataagcccttgctaagtcccagccccttcatgcttggctggcgtctgccctagggctggggttctcaagcccctggccctggcccagagatttggattcccttggcggccgtggagcccagcctttgatgtctttcaaagcttctgtggtgcgccctggattgagaaccaccacccgaggggtacagcccctctcttccaaccgagaagttcctgtcccagaatggacccagggacaagagaccctgagagccctgggactgggagtgtctgctcctctgaggccaggaggccggtgctgggccagagaggacggcgtggcgaaagtcagcgtccactgcagcacaggatcagatggccgtgtgctgtgcatgcaggagcctcgccttctgtgtctttagtcttgagccaaaatttgctcaaagactgatctcttccttgcagggaacagctttggggctgggggaactagaacccacatgttggtctaaaccctgagaaggtggcagtgaggaagtatcccctcaggtgactggatctgtgttcctccttaacatcatctgatggaatggcaatgaaaagcgtggattgtggaaaatacagaaaaacataaaggaaaaaactccaatcccctgagcccaccactgttcaggacccctgcttttgtcacctactatttccctttagtttttagcagcggctggatgtgatatgtctagtttaaccagtccccttgatctttctatataataaataacacaggagtgaacatcctgaatcag

SEQ ID NO: 3278 - protein, 377 aa, Homosapiens; identical to SEQ ID NO: 3268

SEQ ID NO: 3279 - DNA, 3726 bp, Homosapiens
ggtcctacccggaagcgcgcccgggctcctgcaggcggggcgctgtgcgcgccgcgatccggtacgtgggcctccgggctgtcccctctgggggcggcgatcctccctccggagccccccttcaaccctcccggaagtgagcatttgcaggaccagggatgctgtgctgctctcccatgagccagtcaccgagtcggtctgctgcagccctttctgaacctctggccgtctggatgctccactgtgcttgccaagatgaagtgcgtcttggtggccactgagggcgcagaggtcctcttctactggacagatcaggagtttgaagagagtctccggctgaagttcgggcagtcagagaatgaggaagaagagctccctgccctggaggaccagctcagcaccctcctagccccggtcatcatctcctccatgacgatgctggagaagctctcggacacctacacctgcttctccacggaaaatggcaacttcctgtatgtccttcacctgtttggagaatgcctgttcattgccatcaatggtgaccacaccgagagcgagggggacctgcggcggaagctgtatgtgctcaagtacctgtttgaagtgcactttgggctggtgactgtggacggtcatcttatccgaaaggagctgcggcccccagacctggcgcagcgtgtccagctgtgggagcacttccagagcctgctgtggacctacagccgcctgcgggagcaggagcagtgcttcgccgtggaggccctggagcgactgattcacccccagctctgtgagctgtgcatagaggcgctggagcggcacgtcatccaggctgtcaacaccagccccgagcggggaggcgaggaggccctgcatgccttcctgctcgtgcactccaagctgctggcattctactctagccacagtgccagctccctgcgcccggccgacctgcttgccctcatcctcctggttcaggacctctaccccagcgagagcacagcagaggacgacattcagccttccccgcggagggcccggagcagccagaacatccccgtgcagcaggcctggagccctcactccacgggcccaactggggggagctctgcagagacggagacagacagcttctccctccctgaggagtacttcacaccagctccttcccctggcgatcagagctcaggtagcaccatctggctggaggggggcaccccccccatggatgcccttcagatagcagaggacaccctccaaacactggttccccactgccctgtgccttccggccccagaaggatcttcctggatgccaacgtgaaggaaagctactgccccctagtgccccacaccatgtactgcctgcccctgtggcagggcatcaacctggtgctcctgaccaggagccccagcgcgcccctggccctggttctgtcccagctgatggatggcttctccatgctggagaagaagctgaaggaagggccggagcccggggcctccctgcgctcccagcccctcgtgggagacctgcgccagaggatggacaagtttgtcaagaatcgaggggcacaggagattcagagcacctggctggagtttaaggccaaggctttctccaaaagtgagcccggatcctcctgggagctgctccaggcatgtgggaagctgaagcggcagctctgcgccatctaccggctgaactttctgaccacagcccccagcaggggaggcccacacctgccccagcacctgcaggaccaagtgcagaggctcatgcgggagaagctgacggactggaaggacttcttgctggtgaagagcaggaggaacatcaccatggtcttcacctacctagaagacttcccaggcttggtgcacttcatctatgtggaccgcaccactgggcagatggtggcgccttccctcaactgcagtcaaaagacctcgtcggagttgggcaaggggccgctggctgcctttgtcaaaactaaggtctggtctctgatccagctggcgcgcagatacctgcagaagggctacaccacgctgctgttccaggagggggatttctactgctcctacttcctgtggttcgagaatgacatggggtacaaactccagatgatcgaggtgcccgtcctctccgacgactcagtgcctatcggcatgctgggaggagactactacaggaagctcctgcgctactacagcaagaaccgcccaaccgaggctgtcaggtgctacgagctgctggccctgcacctgtctgtcatccccactgacctgctggtgcagcaggccggccagctggcccggcgcctctgggaggcctcccgtatccccctgctctaggccaaggtggccgcagtctgcctttgcatcctgtcctccagccacccttgcttgccactgttccccatgacgagagcctcctgtctgcagtggccatcctgaggatagggcagagtgcccagggtggccccagggcttctaaaaccccacctagaccaccctccatgtcaggtactgagcaaggccccagatccttctctctggaggaagagggaagcccaggggtcctgtttgtaaaacaacggtggcaacagctcctcttccagagctgcctctgcctttatcctgggagatggggaggaagccccatctctgctgttccctgcgtggaggaagcccacccagcaagctctctcctaccccaggtaaaaggtgctcctttgcctgggtttgaattccagcgctgccacttcctctctgcacctcctggcaagtttcttctattccccacgtttaaagcgatggcacctccgtcccagggtggtgtgaggattacccagtgtggtaggtgctcaataaatgttggtcattgttatcactgaagcccaacatgctagtgcttctagacccttctgtcagtgctgataagcccttgctaagtcccagccccttcatgcttggctggcgtctgccctagggctggggttctcaagcccctggccctggcccagagatttggattcccttggcggccgtggagcccagcctttgatgtctttcaaagcttctgtggtgcgccctggattgagaaccaccacccgaggggtacagcccctctcttccaaccgagaagttcctgtcccagaatggacccagggacaagagaccctgagagccctgggactgggagtgtctgctcctctgaggccaggaggccggtgctgggccagagaggacggcgtggcgaaagtcagcgtccactgcagcacaggatcagatggccgtgtgctgtgcatgcaggagcctcgccttctgtgtctttagtcttgagccaaaatttgctcaaagactgatctcttccttgcagggaacagctttggggctgggggaactagaacccacatgttggtctaaaccctgagaaggtggcagtgaggaagtatcccctcaggtgactggatctgtgttcctccttaacatcatctgatggaatggcaatgaaaagcgtggattgtggaaaatacagaaaaacataaaggaaaaaactccaatcccctgagcccaccactgttcaggacccctgcttttgtcacctactatttccctttagtttttagcagcggctggatgtgatatgtctagtttaaccagtccccttgatctttctatataataaataacacaggagtgaacatcctgaatcag

SEQ ID NO: 3280 - protein, 701 aa, Homosapiens; identical to SEQ ID NO: 3272

SEQ ID NO: 3281 - DNA, 3670 bp, Homosapiens
ggtcctacccggaagcgcgcccgggctcctgcaggcggggcgctgtgcgcgccgcgatccggtacgtgggcctccgggctgtcccctctgggggcggcgatcctccctccggagccccccttcaaccctcccggaagtgagcatttgcaggaccagggatgctgtgctgctctcccatgagccagtcaccgagtcggtctgctgcagccctttctgaacctctggccgtctggatgctccactgtgcttgccaagatgaagtgcgtcttggtggccactgagggcgcagaggtcctcttctactggacagatcaggagtttgaagagagtctccggctgaagttcgggcagtcagagaatgaggaagaagagctccctgccctggaggaccagctcagcaccctcctagccccggtcatcatctcctccatgacgatgctggagaagctctcggacacctacacctgcttctccacggaaaatggcaacttcctgtatgtccttcacctgtttggagaatgcctgttcattgccatcaatggtgaccacaccgagagcgagggggacctgcggcggaagctgtatgtgctcaagtacctgtttgaagtgcactttgggctggtgactgtggacggtcatcttatccgaaaggagctgcggcccccagacctggcgcagcgtgtccagctgtgggagcacttccagagcctgctgtggacctacagccgcctgcgggagcaggagcagtgcttcgccgtggaggtgactactgggcgcgggagtcctcaggacttgaagctgtcaggccctggagcgactgattcacccccagctctgtgagctgtgcatagaggcgctggagcggcacgtcatccaggctgtcaacaccagccccgagcggggaggcgaggaggccctgcatgccttcctgctcgtgcactccaagctgctggcattctactctagccacagtgccagctccctgcgcccggccgacctgcttgccctcatcctcctggttcaggacctctaccccagcgagagcacagcagaggacgacattcaggagacagacagcttctccctccctgaggagtacttcacaccagctccttcccctggcgatcagagctcaggtagcaccatctggctggaggggggcaccccccccatggatgcccttcagatagcagaggacaccctccaaacactggttccccactgccctgtgccttccggccccagaaggatcttcctggatgccaacgtgaaggaaagctactgccccctagtgccccacaccatgtactgcctgcccctgtggcagggcatcaacctggtgctcctgaccaggagccccagcgcgcccctggccctggttctgtcccagctgatggatggcttctccatgctggagaagaagctgaaggaagggccggagcccggggcctccctgcgctcccagcccctcgtgggagacctgcgccagaggatggacaagtttgtcaagaatcgaggggcacaggagattcagagcacctggctggagtttaaggccaaggctttctccaaaagtgagcccggatcctcctgggagctgctccaggcatgtgggaagctgaagcggcagctctgcgccatctaccggctgaactttctgaccacagcccccagcaggggaggcccacacctgccccagcacctgcaggaccaagtgcagaggctcatgcgggagaagctgacggactggaaggacttcttgctggtgaagagcaggaggaacatcaccatggtcttcacctacctagaagacttcccaggcttggtgcacttcatctatgtggaccgcaccactgggcagatggtggcgccttccctcaactgcagtcaaaagacctcgtcggagttgggcaaggggccgctggctgcctttgtcaaaactaaggtctggtctctgatccagctggcgcgcagatacctgcagaagggctacaccacgctgctgttccaggagggggatttctactgctcctacttcctgtggttcgagaatgacatggggtacaaactccagatgatcgaggtgcccgtcctctccgacgactcagtgcctatcggcatgctgggaggagactactacaggaagctcctgcgctactacagcaagaaccgcccaaccgaggctgtcaggtgctacgagctgctggccctgcacctgtctgtcatccccactgacctgctggtgcagcaggccggccagctggcccggcgcctctgggaggcctcccgtatccccctgctctaggccaaggtggccgcagtctgcctttgcatcctgtcctccagccacccttgcttgccactgttccccatgacgagagcctcctgtctgcagtggccatcctgaggatagggcagagtgcccagggtggccccagggcttctaaaaccccacctagaccaccctccatgtcaggtactgagcaaggccccagatccttctctctggaggaagagggaagcccaggggtcctgtttgtaaaacaacggtggcaacagctcctcttccagagctgcctctgcctttatcctgggagatggggaggaagccccatctctgctgttccctgcgtggaggaagcccacccagcaagctctctcctaccccaggtaaaaggtgctcctttgcctgggtttgaattccagcgctgccacttcctctctgcacctcctggcaagtttcttctattccccacgtttaaagcgatggcacctccgtcccagggtggtgtgaggattacccagtgtggtaggtgctcaataaatgttggtcattgttatcactgaagcccaacatgctagtgcttctagacccttctgtcagtgctgataagcccttgctaagtcccagccccttcatgcttggctggcgtctgccctagggctggggttctcaagcccctggccctggcccagagatttggattcccttggcggccgtggagcccagcctttgatgtctttcaaagcttctgtggtgcgccctggattgagaaccaccacccgaggggtacagcccctctcttccaaccgagaagttcctgtcccagaatggacccagggacaagagaccctgagagccctgggactgggagtgtctgctcctctgaggccaggaggccggtgctgggccagagaggacggcgtggcgaaagtcagcgtccactgcagcacaggatcagatggccgtgtgctgtgcatgcaggagcctcgccttctgtgtctttagtcttgagccaaaatttgctcaaagactgatctcttccttgcagggaacagctttggggctgggggaactagaacccacatgttggtctaaaccctgagaaggtggcagtgaggaagtatcccctcaggtgactggatctgtgttcctccttaacatcatctgatggaatggcaatgaaaagcgtggattgtggaaaatacagaaaaacataaaggaaaaaactccaatcccctgagcccaccactgttcaggacccctgcttttgtcacctactatttccctttagtttttagcagcggctggatgtgatatgtctagtttaaccagtccccttgatctttctatataataaataacacaggagtgaacatcctgaatcag

SEQ ID NO: 3282 - protein, 377 aa, Homosapiens; identical to SEQ ID NO: 3268

SEQ ID NO: 3283 - DNA, 974 bp, Homosapiens
ctctaatgttcataaggtgactgttgtcattctgacttcaaagatgaaaaaacaaggtccaggcattttcccaagcacccagcgcacatgacagagccaagccaggccgcaagcccggtgcgtctgactcaggcccttgcactacccccacacccactgcctccctgtcctccctcctcaggggtacaaactccagatgatcgaggtgcccgtcctctccgacgactcagtgcctatcggcatgctgggaggagactactacaggaagctcctgcgctactacagcaagaaccgcccaaccgaggctgtcaggtgctacgagctgctggccctgcacctgtctgtcatccccactgacctgctggtgcagcaggccggccagctggcccggcgcctctgggaggcctcccgtatccccctgctctaggccaaggtggccgcagtctgcctttgcatcctgtcctccagccacccttgcttgccactgttccccatgacgagagcctcctgtctgcagtggccatcctgaggatagggcagagtgcccagggtggccccagggcttctaaaaccccacctagaccaccctccatgtcaggtactgagcaaggccccagatccttctctctggaggaagagggaagcccaggggtcctgtttgtaaaacaacggtggcaacagctcctcttccagagctgcctctgcctttatcctgggagatggggaggaagccccatctctgctgttccctgcgtggaggaagcccacccagcaagctctctcctaccccaggtaaaaggtgctcctttgcctgggtttgaattccagcgctgccacttcctctctgcacctcctggcaagtttcttctattccccacgtttaaagcgatggcacctccgtcccagggtggtgtgaggattacccagtgtggtaggtgctcaataaatgttggtcattgttatcactgaagccc

SEQ ID NO: 3284 - protein, 89 aa, Homosapiens; identical to SEQ ID NO: 3264

SEQ ID NO: 3285 - DNA, 2852 bp, Homosapiens
ggtcctacccggaagcgcgcccgggctcctgcaggcggggcgctgtgcgcgccgcgatccggtacgtgggcctccgggctgtcccctctgggggcggcgatcctccctccggagccccccttcaaccctcccggaagtgagcatttgcaggaccagggatgctgtgctgctctcccatgagccagtcaccgagtcggtctgctgcagccctttctgaacctctggccgtctggatgctccactgtgcttgccaagatgaagtgcgtcttggtggccactgagggcgcagaggtcctcttctactggacagatcaggagtttgaagagagtctccggctgaagttcgggcagtcagagaatgaggaagaagagctccctgccctggaggaccagctcagcaccctcctagccccggtcatcatctcctccatgacgatgctggagaagctctcggacacctacacctgcttctccacggaaaatggcaacttcctgtatgtccttcacctgtttggagaatgcctgttcattgccatcaatggtgaccacaccgagagcgagggggacctgcggcggaagctgtatgtgctcaagtacctgtttgaagtgcactttgggctggtgactgtggacggtcatcttatccgaaaggagctgcggcccccagacctggcgcagcgtgtccagctgtgggagcacttccagagcctgctgtggacctacagccgcctgcgggagcaggagcagtgcttcgccgtggaggtgactactgggcgcgggagtcctcaggacttgaagctgtcaggccctggagcgactgattcacccccagctctgtgagctgtgcatagaggcgctggagcggcacgtcatccaggctgtcaacaccagccccgagcggggaggcgaggaggccctgcatgccttcctgctcgtgcactccaagctgctggcattctactctagccacagtgccagctccctgcgcccggccgacctgcttgccctcatcctcctggttcaggacctctaccccagcgagagcacagcagaggacgacattcaggagacagacagcttctccctccctgaggagtacttcacaccagctccttcccctggcgatcagagctcaggtagcaccatctggctggaggggggcaccccccccatggatgcccttcagatagcagaggacaccctccaaacactggttccccactgccctgtgccttccggccccagaaggatcttcctggatgccaacgtgaaggaaagctactgccccctagtgccccacaccatgtactgcctgcccctgtggcagggcatcaacctggtgctcctgaccaggagccccagcgcgcccctggccctggttctgtcccagctgatggatggcttctccatgctggagaagaagctgaaggaagggccggagcccggggcctccctgcgctcccagcccctcgtgggagacctgcgccagaggatggacaagtttgtcaagaatcgaggggcacaggagattcagagcacctggctggagtttaaggccaaggctttctccaaaagtgagcccggatcctcctgggagctgctccaggcatgtgggaagctgaagcggcagctctgcgccatctaccggctgaactttctgaccacagcccccagcaggggaggcccacacctgccccagcacctgcaggaccaagtgcagaggctcatgcgggagaagctgacggactggaaggacttcttgctggtgaagagcaggaggaacatcaccatggtcttcacctacctagaagacttcccaggcttggtgcacttcatctatgtggaccgcaccactgggcagatggtggcgccttccctcaactgcagtcaaaagacctcgtcggagttgggcaaggggccgctggctgcctttgtcaaaactaaggtctggtctctgatccagctggcgcgcagatacctgcagaagggctacaccacgctgctgttccaggagggggatttctactgctcctacttcctgtggttcgagaatgacatggggtacaaactccagatgatcgaggtgcccgtcctctccgacgactcagtgcctatcggcatgctgggaggagactactacaggaagctcctgcgctactacagcaagaaccgcccaaccgaggctgtcaggtgctacgagctgctggccctgcacctgtctgtcatccccactgacctgctggtgcagcaggccggccagctggcccggcgcctctgggaggcctcccgtatccccctgctctaggccaaggtggccgcagtctgcctttgcatcctgtcctccagccacccttgcttgccactgttccccatgacgagagcctcctgtctgcagtggccatcctgaggatagggcagagtgcccagggtggccccagggcttctaaaaccccacctagaccaccctccatgtcaggtactgagcaaggccccagatccttctctctggaggaagagggaagcccaggggtcctgtttgtaaaacaacggtggcaacagctcctcttccagagctgcctctgcctttatcctgggagatggggaggaagccccatctctgctgttccctgcgtggaggaagcccacccagcaagctctctcctaccccaggtaaaaggtgctcctttgcctgggtttgaattccagcgctgccacttcctctctgcacctcctggcaagtttcttctattccccacgtttaaagcgatggcacctccgtcccagggtggtgtgaggattacccagtgtggtaggtgctcaataaatgttggtcattgttatcactgaagccc

SEQ ID NO: 3286 - protein, 377 aa, Homosapiens; identical to SEQ ID NO: 3268

SEQ ID NO: 3287 - DNA, 2049 bp, Homosapiens
ggtcctacccggaagcgcgcccgggctcctgcaggcggggcgctgtgcgcgccgcgatccggtacgtgggcctccgggctgtcccctctgggggcggcgatcctccctccggagccccccttcaaccctcccggaagtgagcatttgcaggaccagggatgctgtgctgctctcccatgagccagtcaccgagtcggtctgctgcagccctttctgaacctctggccgtctggatgctccactgtgcttgccaagatgaagtgcgtcttggtggccactgagggcgcagaggtcctcttctactggacagatcaggagtttgaagagagtctccggctgaagttcgggcagtcagagaatgaggaagaagagctccctgccctggaggaccagctcagcaccctcctagccccggtcatcatctcctccatgacgatgctggagaagctctcggacacctacacctgcttctccacggaaaatggcaacttcctgtatgtccttcacctgtttggagaatgcctgttcattgccatcaatggtgaccacaccgagagcgagggggacctgcggcggaagctgtatgtgctcaagtacctgtttgaagtgcactttgggctggtgactgtggacggtcatcttatccgaaaggagctgcggcccccagacctggcgcagcgtgtccagctgtgggagcacttccagagcctgctgtggacctacagccgcctgcgggagcaggagcagtgcttcgccgtggaggccctggagcgactgattcacccccagctctgtgagctgtgcatagaggcgctggagcggcacgtcatccaggctgtcaacaccagccccgagcggggaggcgaggaggccctgcatgccttcctgctcgtgcactccaagctgctggcattctactctagccacagtgccagctccctgcgcccggccgacctgcttgccctcatcctcctggttcaggacctctaccccagcgagagcacagcagaggacgacattcagccttccccgcggagggcccggagcagccagaacatccccgtgcagcaggcctggagccctcactccacgggcccaactggggggagctctgcagagacggagacagacagcttctccctccctgaggagtacttcacaccagctccttcccctggcgatcagagctcaggtgaggaccggaggaaagcaggaggaaacaatagctagctgcgagcgacaggcagcccaggacatctgtcttaggctccagtggacccccgtgcctcctaaggcttgagtgcaggtacccgtgttcctagagcacaggacgctgtctgcggctccccatcttccctgccagctccagcctgaactcaaggattgttaagaccactccactgatccctaaagctgttgatgacaagttgattcatttaaaacttctgtacatgcattctcagactcatcttttttgtaattaaaattaaaaattaagttaaatttagtaataatcatctaatttctatacattctaaaatatattcagcatctgtagtttatactttgtttctccaaagtatgtgggtaaacaataaaaaaaaactataaatattcaaaatggttgaggtgtggtggctcacgcctgtaatcccagcactttgggaggccgaggcgggtagatcacctgaggtcaggagtttgagactagcctggccaacatggcgaaaccccatgtctactaaaaatacaaaaattagccaggtctggtggcaggcgcctgtaatcccagctactcgggaggctgaggcaggagaatcgcttgaacccgggaggtggaggttgcagtgagccaagatcatgccactgcactccagcctgggcgacagagcaagactctgtctcaaaaaaaaaaacaaaacaaaactacaaatattcaaaatgttaacaaaaaatggacaaccttgcttagagaagtagataaaccaaaatccagactgttgtggtcactatgaataaacattacatttatttctgaagttcttaggt

SEQ ID NO: 3288 - protein, 324 aa, Homosapiens; identical to SEQ ID NO: 444

SEQ ID NO: 3289 - DNA, 2021 bp, Homosapiens
actttatttccttgtgtattgccttgcctcatccactggagtctagtgaccagacagtaagcctcaggaaggctgggacctggtgggtcttagtccccctgtttccaagtatctggtgcagagtccaagctcactgtggacagagtgaatgtccccactagcccagggcttggagtggggcaaggttgttggtgatatggcttcctctcccttcctgccctggctaggccctggagcgactgattcacccccagctctgtgagctgtgcatagaggcgctggagcggcacgtcatccaggctgtcaacaccagccccgagcggggaggcgaggaggccctgcatgccttcctgctcgtgcactccaagctgctggcattctactctagaagtacattgctccttgagggcaggggccaggctccacactcctttaacctgcctgccccgtctcctgctgggcatgtgctgatgggtggccatgctcctgtgtctgcagccacagtgccagctccctgcgcccggccgacctgcttgccctcatcctcctggttcaggacctctaccccagcgagagcacagcagaggacgacattcaggtctcagggcagctttctgggcagagggaggccattagggaggtagttcagaaaacctgcctgaagatggtgggcaggctccccctggggactccatgttttctaagtcacaattctgggtgtgtggttgggcgtgacttctttcccactgctttcagatgtaaggggaattctggagtgcacatggtccagtgggttaaaagtgcagatttttcaagtcagccatggttcgaaacccagcttcaacacctggctgtgtgagctgagcccgtacttgcacccccagagcctcagtgcccttatctgtgcaatgggaataacaaagcatctacttctcaggggtatttggagggacaaaaggggtggttcccacagaacctggcactgcctggggcatagtgaatgcttagtgagtgtcagccaccaccatcgctgttgacctcatcaccaggggtagtggtgggttggataccattgtgttggaatttctcgaatttccacagaacagaccgcctagaatcgaatccctgggaagtctgaggaccacacacccaggactgcacccggaacgggtggaggggtggaggggtggaggcttctctgtgaagcgctgggaggcagaaggggtggagggagccaggtcagataggagctaaccagcctctcccctgccctgcacagccttccccgcggagggcccggagcagccagaacatccccgtgcagcaggcctggagccctcactccacgggcccaactggggggagctctgcagagacggtgtgtgctgtgcacttcgtggagtcaggggcaggaggggatcggcctctgcaggcgaccaggcctttcccatccctcctgggagagcagggacagggttgagccagctgggagagcctctcaacctgagccaccttctccattccaggagacagacagcttctccctccctgaggagtacttcacaccagctccttcccctggcgatcagagctcaggtgaggaccggaggaaagcaggaggaaacaatagctagctgcgagcgacaggcagcccaggacatctgtcttaggctccagtggacccccgtgcctcctaaggcttgagtgcaggtacccgtgttcctagagcacaggacgctgtctgcggctccccatcttccctgccagctccagcctgaactcaaggattgttaagaccactccactgatccctaaagctgttgatgacaagttgattcatttaaaacttctgtacatgcattctcagactcatcttttttgtaattaaaattaaaaattaagttaaatttagtaataatcatctaatttctatacattctaaaatatattcagcatctgtagtttatactttgtttctccaaagtatgtgggtaaacaataaaaaaaaactataaatattc

SEQ ID NO: 3290 - protein, 42 aa, Homosapiens
MPSCSCTPSCWHSTLEVHCSLRAGARLHTPLTCLPRLLLGMC

SEQ ID NO: 3291 - DNA, 1617 bp, Homosapiens
ggtcctacccggaagcgcgcccgggctcctgcaggcggggcgctgtgcgcgccgcgatccggtacgtgggcctccgggctgtcccctctgggggcggcgatcctccctccggagccccccttcaaccctcccggaagtgagcatttgcaggaccagggatgctgtgctgctctcccatgagccagtcaccgagtcggtctgctgcagccctttctgaacctctggccgtctggatgctccactgtgcttgccaagatgaagtgcgtcttggtggccactgagggcgcagaggtcctcttctactggacagatcaggagtttgaagagagtctccggctgaagttcgggcagtcagagaatgaggaagaagagctccctgccctggaggaccagctcagcaccctcctagccccggtcatcatctcctccatgacgatgctggagaagctctcggacacctacacctgcttctccacggaaaatggcaacttcctgtatgtccttcacctgtttggagaatgcctgttcattgccatcaatggtgaccacaccgagagcgagggggacctgcggcggaagctgtatgtgctcaagtacctgtttgaagtgcactttgggctggtgactgtggacggtcatcttatccgaaaggagctgcggcccccagacctggcgcagcgtgtccagctgtgggagcacttccagagcctgctgtggacctacagccgcctgcgggagcaggagcagtgcttcgccgtggaggccctggagcgactgattcacccccagctctgtgagctgtgcatagaggcgctggagcggcacgtcatccaggctgtcaacaccagccccgagcggggaggcgaggaggccctgcatgccttcctgctcgtgcactccaagctgctggcattctactctagccacagtgccagctccctgcgcccggccgacctgcttgccctcatcctcctggttcaggacctctaccccagcgagagcacagcagaggacgacattcagccttccccgcggagggcccggagcagccagaacatccccgtgcagcaggcctggagccctcactccacgggcccaactggggggagctctgcagagacggagacagacagcttctccctccctgaggagtacttcacaccagctccttcccctggcgatcagagctcaggtgaggaccggaggaaagcaggaggaaacaatagctagctgcgagcgacaggcagcccaggacatctgtcttaggctccagtggacccccgtgcctcctaaggcttgagtgcaggtacccgtgttcctagagcacaggacgctgtctgcggctccccatcttccctgccagctccagcctgaactcaaggattgttaagaccactccactgatccctaaagctgttgatgacaagttgattcatttaaaacttctgtacatgcattctcagactcatcttttttgtaattaaaattaaaaattaagttaaatttagtaataatcatctaatttctatacattctaaaatatattcagcatctgtagtttatactttgtttctccaaagtatgtgggtaaacaataaaaaaaaactataaatattc

SEQ ID NO: 3292 - protein, 324 aa, Homosapiens; identical to SEQ ID NO: 444

SEQ ID NO: 3293 - DNA, 1506 bp, Homosapiens
ggtcctacccggaagcgcgcccgggctcctgcaggcggggcgctgtgcgcgccgcgatccggtacgtgggcctccgggctgtcccctctgggggcggcgatcctccctccggagccccccttcaaccctcccggaagtgagcatttgcaggaccagggatgctgtgctgctctcccatgagccagtcaccgagtcggtctgctgcagccctttctgaacctctggccgtctggatgctccactgtgcttgccaagatgaagtgcgtcttggtggccactgagggcgcagaggtcctcttctactggacagatcaggagtttgaagagagtctccggctgaagttcgggcagtcagagaatgaggaagaagagctccctgccctggaggaccagctcagcaccctcctagccccggtcatcatctcctccatgacgatgctggagaagctctcggacacctacacctgcttctccacggaaaatggcaacttcctgtatgtccttcacctgtttggagaatgcctgttcattgccatcaatggtgaccacaccgagagcgagggggacctgcggcggaagctgtatgtgctcaagtacctgtttgaagtgcactttgggctggtgactgtggacggtcatcttatccgaaaggagctgcggcccccagacctggcgcagcgtgtccagctgtgggagcacttccagagcctgctgtggacctacagccgcctgcgggagcaggagcagtgcttcgccgtggaggccctggagcgactgattcacccccagctctgtgagctgtgcatagaggcgctggagcggcacgtcatccaggctgtcaacaccagccccgagcggggaggcgaggaggccctgcatgccttcctgctcgtgcactccaagctgctggcattctactctagccacagtgccagctccctgcgcccggccgacctgcttgccctcatcctcctggttcaggacctctaccccagcgagagcacagcagaggacgacattcagccttccccgcggagggcccggagcagccagaacatccccgtgcagcaggcctggagccctcactccacgggcccaactggggggagctctgcagagacggagacagacagcttctccctccctgaggagtacttcacaccagctccttcccctggcgatcagagctcaggtgaggaccggaggaaagcaggaggaaacaatagctagctgcgagcgacaggcagcccaggacatctgtcttaggctccagtggacccccgtgcctcctaaggcttgagtgcaggtacccgtgttcctagagcacaggacgctgtctgcggctccccatcttccctgccagctccagcctgaactcaaggattgttaagaccactccactgatccctaaagctgttgatgacaagttgattcatttaaaacttctgtacatgcattctcagactcatcttttttgtaattaaaattaaaaattaagttaaattt

SEQ ID NO: 3294 - protein, 324 aa, Homosapiens; identical to SEQ ID NO: 444

SEQ ID NO: 3295 - DNA, 909 bp, Homosapiens
cgggctcctgcaggcggggcgctgtgcgcgccgcgatccggtacgtgggcctccgggctgtcccctctgggggcggcgatcctccctccggagccccccttcaaccctcccggaagtgagcatttgcaggaccagggatgctgtgctgctctcccatgagccagtcaccgagtcggtctgctgcagccctttctgaacctctggccgtctggatgctccactgtgcttgccaagatgaagtgcgtcttggtggccactgagggcgcagaggtcctcttctactggacagatcaggagtttgaagagagtctccggctgaagttcgggcagtcagagaatgaggaagaagagctccctgccctggaggaccagctcagcaccctcctagccccggtcatcatctcctccatgacgatgctggagaagctctcggacacctacacctgcttctccacggaaaatggcaacttcctgtatgtccttcacctggtgagtctatagctctggggcccatgttcctcttccctcagcttgatggggagtccacaggcctctcttatttggaactttagactcctttagaaggcagaaacggcatcttatcaaacccgcctgggacccgagcctcccctggcttgtctgcagagaccagggcaggtgaagggagtgcccttggggctggctgacactggcctgcctgtgcctgcagtttggagaatgcctgttcattgccatcaatggtgaccacaccgagagcgagggggacctgcggcggaagctgtatgtgctcaagtacctgtttgaagtgcactttgggctggtgactgtggacggtcatcttatccgaaaggagtgagtcttcaaagctggtcccctctgtcctttgccgagcaccctcgctgggccagg

SEQ ID NO: 3296 - protein, 88 aa, Homosapiens
MKCVLVATEGAEVLFYWTDQEFEESLRLKFGQSENEEEELPALEDQLSTLLAPVIISSMTMLEKLSDTYTCFSTENGNFLYVLHLVSL

SEQ ID NO: 3297 - DNA, 1514 bp, Homosapiens
cgggctcctgcaggcggggcgctgtgcgcgccgcgatccggtacgtgggcctccgggctgtcccctctgggggcggcgatcctccctccggagccccccttcaaccctcccggaagtgaggtagggtccctaggggtcccggagcgggcccactcctagcctcacccactccgggcgtgtggccgtgggccggtcgcttcctcgctcggggccaaagttcctcagccgtgaagaggggtggatgtcacaagtcaagcctccttcccagggtggccgtgagcatttgcaggaccagggatgctgtgctgctctcccatgagccagtcaccgagtcggtctgctgcagccctttctgaacctctggccgtctggatgctccactgtgcttgccaagatgaagtgcgtcttggtggccactgagggcgcagaggtcctcttctactggacagatcaggagtttgaagagagtctccggctgaagttcgggcagtcagagaatgaggaagaagaggttggcctcttgatgctctgagctcggtgaccccacccccacaccccaccagtcctctctggactaaatgagggcaagaagaagtcgaattttatcacgtaacagaagaacttggagccatcagtttctgtaacctaaaaagtttaacaaggctgggcgcggtggctcacgcctgtaatcacaacactttgggaagccaaggtgggccagttgcttgagctcagggatttgagaccagcctgggcagcatggcgaaaccctgtctctacaaaaaaaatacaaaaattagccaggtgtggtggtgcgtgcctatagtcccagctacttgggaggttgaggtgggaggatcacttgagtccaggtggtagaggctgcagtgagccgagactgtgcccatgcattccaacctgggcgacagagcaaaaaaaaaaaaaaaaagtttaacgtaagctgaacacgttaattttttaatagctgtattaaggtatgattaacataccataaattgcacatatttaaagtgcataatttgataagctttgatatgtatatacctatgattctatcacaatcaataaaaggaatatatctaccacctcaaacatttgtaatcccttctttcccatccccatcgcataggaactgctgatctgctttctgtcatgatagattagtttgtatcatatggccttatataaatggagtcatacagtatgtgcttggatttagtttggttttggtttgactgctttcactcagcataattattttgtgattcatctgtgttgtggcatgtatcaatcgttcattccttgtcattgagtagtaatctattgtatcaggatgccaccatttgttcattcatttacttgttgatggacatctgtgttattttcagtttttgactattacaaataaagcaactatgaacatgcacgtacaagtctatgtatacatggatgctttcatgtccaaggacagatacttaggatagactggctag

SEQ ID NO: 3298 - protein, 45 aa, Homosapiens
MKCVLVATEGAEVLFYWTDQEFEESLRLKFGQSENEEEEVGLLML

SEQ ID NO: 3299 - DNA, 1355 bp, Homosapiens
ccgggctcctgcaggcggggcgctgtgcgcgccgcgatccggtacgtgggcctccgggctgtcccctctgggggcggcgatcctccctccggagccccccttcaaccctcccggaagtgagcatttgcaggaccagggatgctgtgctgctctcccatgagccagtcaccgagtcggtctgctgcagccctttctgaacctctggccgtctggatgctccactgtgcttgccaagatgaagtgcgtcttggtggccactgagggcgcagaggtcctcttctactggacagatcaggagtttgaagagagtctccggctgaagttcgggcagtcagagaatgaggaagaagaggttggcctcttgatgctctgagctcggtgaccccacccccacaccccaccagtcctctctggactaaatgagggcaagaagaagtcgaattttatcacgtaacagaagaacttggagccatcagtttctgtaacctaaaaagtttaacaaggctgggcgcggtggctcacgcctgtaatcacaacactttgggaagccaaggtgggccagttgcttgagctcagggatttgagaccagcctgggcagcatggcgaaaccctgtctctacaaaaaaaatacaaaaattagccaggtgtggtggtgcgtgcctatagtcccagctacttgggaggttgaggtgggaggatcacttgagtccaggtggtagaggctgcagtgagccgagactgtgcccatgcattccaacctgggcgacagagcaaaaaaaaaaaaaaaaagtttaacgtaagctgaacacgttaattttttaatagctgtattaaggtatgattaacataccataaattgcacatatttaaagtgcataatttgataagctttgatatgtatatacctatgattctatcacaatcaataaaaggaatatatctaccacctcaaacatttgtaatcccttctttcccatccccatcgcataggaactgctgatctgctttctgtcatgatagattagtttgtatcatatggccttatataaatggagtcatacagtatgtgcttggatttagtttggttttggtttgactgctttcactcagcataattattttgtgattcatctgtgttgtggcatgtatcaatcgttcattccttgtcattgagtagtaatctattgtatcaggatgccaccatttgttcattcatttacttgttgatggacatctgtgttattttcagtttttgactattacaaataaagcaactatgaacatgcacgtacaagtctatgtatacatggatgctttcatgtccaaggacagatacttaggatagactggctag

SEQ ID NO: 3300 - protein, 45 aa, Homosapiens; identical to SEQ ID NO: 3298

SEQ ID NO: 3301 - DNA, 544 bp, Homosapiens
cgggctcctgcaggcggggcgctgtgcgcgccgcgatccggtacgtgggcctccgggctgtcccctctgggggcggcgatcctccctccggagccccccttcaaccctcccggaagtgagcatttgcaggaccagggatgctgtgctgctctcccatgagccagtcaccgagtcggtctgctgcagccctttctgaacctctggccgtctggatgctccactgtgcttgccaagatgaagtgcgtcttggtggccactgagggcgcagaggtcctcttctactggacagatcaggagtttgaagagagtctccggctgaagttcgggcagtcagagaatgaggaagaagaggtgagtgcagggtaggcagtcccaggaggggtggataggaaggaaccatacaaaactcccagcaggcagagaggcaggaaaacctgtgttcaccctgtcctgggcagcatgagcagggtgctgggtggggtccagcatccttcacacctagacccttatcctcaaggttggcctcttgatgctctgagctcgg

SEQ ID NO: 3302 - protein, 43 aa, Homosapiens
MKCVLVATEGAEVLFYWTDQEFEESLRLKFGQSENEEEEVSAG

SEQ ID NO: 3303 - DNA, 786 bp, Homosapiens
ggaagcgcgcccgggctcctgcaggcggggcgctgtgcgcgccgcgatccggtacgtgggcctccgggctgtcccctctgggggcggcgatcctccctccggagccccccttcaaccctcccggaagtgagcatttgcaggaccagggatgctgtgctgctctcccatgagccagtcaccgagtcggtctgctgcagccctttctgaacctctggccgtctggatgctccactgtgcttgccaaggtagatgatcttgccccacctggggaggacagggaggcaggcagcatccaccctggggctttgggaggcagatggaatgaggtaggcagtggactgagtgctactgggctctgcacacctgctcatcccctccccagccctgcatcctgaggccacccccatcctgatgcctcatctctccttcacccctcgaatccaggcaggtcatcacagcctgctgcatctttaaagctcctcccagcccccaccaaggggtgagcactcattacctgacacccgcacctagatgaccgccttcatgaccttgacctgcccatctccagccagccggtcacttctccgctcacaaccacagcctccattccatagcccactgctccctaacccatacactctggtcagctttgtcacatgtacctgggagtcccagagcagcctcttcaggtccacccgcctctcccagcaacctccttttcacacctgttgcactctcagtgtctgccttggcattgagtaattctgtgggaataggctgcattcc

SEQ ID NO: 3304 - protein, 76 aa, Homosapiens
MTAFMTLTCPSPASRSLLRSQPQPPFHSPLLPNPYTLVSFVTCTWESQSSLFRSTRLSQQPPFHTCCTLSVCLGIE

SEQ ID NO: 3305 - DNA, 625 bp, Homosapiens
ggaactcggaggggactcactgacgaaaggagctccagatggcggggggccaacctggggcgacccccagcgcccactttcaccatctggaccccagcaaacctccctgtggcccttggtcccgtcttcagcagctccttctggggtcccacaccttcggagcccggccctgcccctgagtctctggagagagcgagtcagcagttcgccgccgcggggctcccgtttgcctagcacgccagtttctgtccagtttcaccccaaatccccacctccccccacccccgaacctcacggccaccctgggaaggaggcttgacttgtgacatccacccctcttcacggctgaggaactttggccccgagcgaggaagcgaccggcccacggccacacgcccggagtggggggcagcatcttctactatgtgcatctacattggatggcagtggagcaacacagattgttttctgacaaaaatcagccaagtacaatagaagtgagtggaaaggactgactccagttccaggttgggcctccaactgctctgggcacgtcgatggaacagaacaccacctccaccccaataccaccaattcaactttacatgaattataagcgagaaat

SEQ ID NO: 3306 - protein, 46 aa, Homosapiens
MAGGQPGATPSAHFHHLDPSKPPCGPWSRLQQLLLGSHTFGARPCP

SEQ ID NO: 3307 - DNA, 897 bp, Homosapiens
ggaactcggaggggactcactgacgaaaggagctccagatggcggggggccaacctggggcgacccccagcgcccactttcaccatctggaccccagcaaacctccctgtggcccttggtcccgtcttcagcagctccttctggggtcccacaccttcggagcccggccctgcccctgagtctctggagagagcgagtcagcagttcgccgccgcggggctcccgtttgcctagcacgccagtttctgtccagtttcaccccaaatccccacctccccccacccccgaacctcacggccaccctgggaaggaggcttgacttgtgacatccacccctcttcacggctgaggaactttggccccgagcgaggaagcgaccggcccacggccacacgcccggagtggggggcagcatcttctactatgtgcatctacattggatggcagtggagcaacacagattgttttctgacaaaaatcagccaagtactaggagaggcaggactttagaagtggaggagatggagaaggaagcttaggttactatggagtgtgcaaaaaggtcctgtggatttagataccaccacacacaaatgctgttgttggaaggtacctgcccagataaggactgcatttcctctagcatccagatgggaccaaatgactgctggccaatagaagtgagtggaaaggactgactccagttccaggttgggcctccaactgctctgggcacgtcgatggaacagaacaccacctccaccccaataccaccaattcaactttacatgaattataagcgagaaataacttggactgtgttaagtcattgagtttctggggtttaactgttattatagttaagaatgactttaactaatatagtcaatgacatct

SEQ ID NO: 3308 - protein, 50 aa, Homosapiens
MECAKRSCGFRYHHTQMLLLEGTCPDKDCISSSIQMGPNDCWPIEVSGKD

SEQ ID NO: 3309 - DNA, 932 bp, Homosapiens
ggaactcggaggggactcactgacgaaaggagctccagatggcggggggccaacctggggcgacccccagcgcccactttcaccatctggaccccagcaaacctccctgtggcccttggtcccgtcttcagcagctccttctggggtcccacaccttcggagcccggccctgcccctgagtctctggagagagcgagtcagcagttcgccgccgcggggctcccgtttgcctagcacgccagtttctgtccagtttcaccccaaatccccacctccccccacccccgaacctcacggccaccctgggaaggaggcttgacttgtgacatccacccctcttcacggctgaggaactttggccccgagcgaggaagcgaccggcccacggccacacgcccggagtgggtaaatatctactcatgggattgctgggctgtatgggggcagcatcttctactatgtgcatctacattggatggcagtggagcaacacagattgttttctgacaaaaatcagccaagtactaggagaggcaggactttagaagtggaggagatggagaaggaagcttaggttactatggagtgtgcaaaaaggtcctgtggatttagataccaccacacacaaatgctgttgttggaaggtacctgcccagataaggactgcatttcctctagcatccagatgggaccaaatgactgctggccaatagaagtgagtggaaaggactgactccagttccaggttgggcctccaactgctctgggcacgtcgatggaacagaacaccacctccaccccaataccaccaattcaactttacatgaattataagcgagaaataacttggactgtgttaagtcattgagtttctggggtttaactgttattatagttaagaatgactttaactaatatagtcaatgacatct

SEQ ID NO: 3310 - protein, 50 aa, Homosapiens; identical to SEQ ID NO: 3308

SEQ ID NO: 3311 - DNA, 1262 bp, Homosapiens
ctagtggagagactgacaagcagtcagctcagcggtcacaatactgtgtgacaggagctgagatccaagaagtactgggtcctgtgggagcacccctgacttgaaggacaagtcagtgcaactgaatggccagcccttagtgatggtggacgacgggaccctcccagaattgaagccccgcccccttcgggccggccggacattggtcatccctccagtcaccatgggcttttatgtggtcaagaatgtcaatgctttggcctgccgctaccgataagctatcctcacactcacggctaccagtgggcctgctgggctgcttccactcctccactccagtagtatcctctgttttcagacatcctagcaaccagcccctgctgccccatcctgctggaatcaacacagacttgctctccaaagagactaaatgtcatagcgtgatcttagcctaggtaggccacatccatcccaaaggaaaatgtagacatcacctgtacctatataaggataaaggcatgtgtatagagcagaatgtttcccttcatgtgcactatgaaaacgagctgacagcacactcccaggagaaatgtttccagacaactccccatgatcctgtcacacagcattataaccacaaatccaaaccttagcctgctgctgctgctgccctcagaggaagatgaggaaggaaaaaaactgggtggacctacaaaaacccatcctctcccaactccttcttctctgcctctttcttgctgctgccctgagttttttgacacatctctttccataggggagtaatgggtgtgtcagccctggcctgctgggagagctgtttgtatgatttcccggctgatgtatgagcgtgcgcatctgggttcctgacagtggcatccatcactggcagttcttctgggaagcgggtgcttcaaaagtaaaattacaatcacactccagatttggtaagaaggttctattcctctgtgaatccagattcccccagagttgtaatgggagtcaagtaacaatattcattgagtggagagcagtttattaggcacaacaaaaagtagtcatcattcttcatgttgctatgagggagagtttgagtacaaagagaaagcatactgaaacatcaggtacacacacacaccccaactggacaaagcaaattagacctctccaaaattaagagaatattaggggctctatagggtaagcccttaattgtttggttaactcaaatcattatttttaaa

SEQ ID NO: 3312 - protein, 73 aa, Homosapiens
MWSRMSMLWPAATDKLSSHSRLPVGLLGCFHSSTPVVSSVFRHPSNQPLLPHPAGINTDLLSKETKCHSVILA

SEQ ID NO: 3313 - DNA, 2834 bp, Homosapiens
atgagggtgctttgtgccttccctgaagccatgccctccagcaactcccgcccccccgcgtgcctagccccgggggctctctacttggctctgttgctccatctctccctttcctcccaggctggagacaggagacccttgcctgtagacagagctgcaggtttgaaggaaaagaccctgattctacttgatgtgagcaccaagaacccagtcaggacagtcaatgagaacttcctctctctgcagctggatccgtccatcattcatgatggctggctcgatttcctaagctccaagcgcttggtgaccctggcccggggactttcgcccgcctttctgcgcttcgggggcaaaaggaccgacttcctgcagttccagaacctgaggaacccggcgaaaagccgcgggggcccgggcccggattactatctcaaaaactatgaggatgacattgttcgaagtgatgttgccttagataaacagaaaggctgcaagattgcccagcaccctgatgttatgctggagctccaaagggagaaggcagctcagatgcatctggttcttctaaaggagcaattctccaatacttacagtaatctcatattaacagccaggtctctagacaaactttataactttgctgattgctctggactccacctgatatttgctctaaatgcactgcgtcgtaatcccaataactcctggaacagttctagtgccctgagtctgttgaagtacagcgccagcaaaaagtacaacatttcttgggaactgggtaatgagccaaataactatcggaccatgcatggccgggcagtaaatggcagccagttgggaaaggattacatccagctgaagagcctgttgcagcccatccggatttattccagagccagcttatatggccctaatattgggcggccgaggaagaatgtcatcgccctcctagatggattcatgaaggtggcaggaagtacagtagatgcagttacctggcaacattgctacattgatggccgggtggtcaaggtgatggacttcctgaaaactcgcctgttagacacactctctgaccagattaggaaaattcagaaagtggttaatacatacactccaggaaagaagatttggcttgaaggtgtggtgaccacctcagctggaggcacaaacaatctatccgattcctatgctgcaggattcttatggttgaacactttaggaatgctggccaatcagggcattgatgtcgtgatacggcactcattttttgaccatggatacaatcacctcgtggaccagaattttaacccattaccagactactggctctctctcctctacaagcgcctgatcggccccaaagtcttggctgtgcatgtggctgggctccagcggaagccacggcctggccgagtgatccgggacaaactaaggatttatgctcactgcacaaaccaccacaaccacaactacgttcgtgggtccattacactttttatcatcaacttgcatcgatcaagaaagaaaatcaagctggctgggactctcagagacaagctggttcaccagtacctgctgcagccctatgggcaggagggcctaaagtccaaaacccaaagatgtcaatactgtgggatcatctgaatctaaaagggcattacctaattcttcagaagaaaggtcagtgcaactgaatggccagcccttagtgatggtggacgacgggaccctcccagaattgaagccccgcccccttcgggccggccggacattggtcatccctccagtcaccatgggcttttatgtggtcaagaatgtcaatgctttggcctgccgctaccgataagctatcctcacactcacggctaccagtgggcctgctgggctgcttccactcctccactccagtagtatcctctgttttcagacatcctagcaaccagcccctgctgccccatcctgctggaatcaacacagacttgctctccaaagagactaaatgtcatagcgtgatcttagcctaggtaggccacatccatcccaaaggaaaatgtagacatcacctgtacctatataaggataaaggcatgtgtatagagcagaatgtttcccttcatgtgcactatgaaaacgagctgacagcacactcccaggagaaatgtttccagacaactccccatgatcctgtcacacagcattataaccacaaatccaaaccttagcctgctgctgctgctgccctcagaggaagatgaggaaggaaaaaaactgggtggacctacaaaaacccatcctctcccaactccttcttctctgcctctttcttgctgctgccctgagttttttgacacatctctttccataggggagtaatgggtgtgtcagccctggcctgctgggagagctgtttgtatgatttcccggctgatgtatgagcgtgcgcatctgggttcctgacagtggcatccatcactggcagttcttctgggaagcgggtgcttcaaaagtaaaattacaatcacactccagatttggtaagaaggttctattcctctgtgaatccagattcccccagagttgtaatgggagtcaagtaacaatattcattgagtggagagcagtttattaggcacaacaaaaagtagtcatcattcttcatgttgctatgagggagagtttgagtacaaagagaaagcatactgaaacatcaggtacacacacacaccccaactggacaaagcaaattagacctctccaaaattaagagaatattaggggctctatagggtaagcccttaattgtttggttaactcaaatcattatttttaaa

SEQ ID NO: 3314 - protein, 548 aa, Homosapiens
MRVLCAFPEAMPSSNSRPPACLAPGALYLALLLHLSLSSQAGDRRPLPVDRAAGLKEKTLILLDVSTKNPVRTVNENFLSLQLDPSIIHDGWLDFLSSKRLVTLARGLSPAFLRFGGKRTDFLQFQNLRNPAKSRGGPGPDYYLKNYEDDIVRSDVALDKQKGCKIAQHPDVMLELQREKAAQMHLVLLKEQFSNTYSNLILTARSLDKLYNFADCSGLHLIFALNALRRNPNNSWNSSSALSLLKYSASKKYNISWELGNEPNNYRTMHGRAVNGSQLGKDYIQLKSLLQPIRIYSRASLYGPNIGRPRKNVIALLDGFMKVAGSTVDAVTWQHCYIDGRVVKVMDFLKTRLLDTLSDQIRKIQKVVNTYTPGKKIWLEGVVTTSAGGTNNLSDSYAAGFLWLNTLGMLANQGIDVVIRHSFFDHGYNHLVDQNFNPLPDYWLSLLYKRLIGPKVLAVHVAGLQRKPRPGRVIRDKLRIYAHCTNHHNHNYVRGSITLFIINLHRSRKKIKLAGTLRDKLVHQYLLQPYGQEGLKSKTQRCQYCGII

SEQ ID NO: 3315 - DNA, 2650 bp, Homosapiens
aaggacaattagtcactagcgagacccagtaggaagagaggtttaaatcagagggattgaatgagggtgctttgtgccttccctgaagccatgccctccagcaactcccgcccccccgcgtgcctagccccgggggctctctacttggctctgttgctccatctctccctttcctcccaggctggagacaggagacccttgcctgtagacagagctgcaggtttgaaggaaaagaccctgattctacttgatgtgagcaccaagaacccagtcaggacagtcaatgagaacttcctctctctgcagctggatccgtccatcattcatgatggctggctcgatttcctaagctccaagcgcttggtgaccctggcccggggactttcgcccgcctttctgcgcttcgggggcaaaaggaccgacttcctgcagttccagaacctgaggaacccggcgaaaagccgcgggggcccgggcccggattactatctcaaaaactatgaggatgacattgttcgaagtgatgttgccttagataaacagaaaggctgcaagattgcccagcaccctgatgttatgctggagctccaaagggagaaggcagctcagatgcatctggttcttctaaaggagcaattctccaatacttacagtaatctcatattaacagagccaaataactatcggaccatgcatggccgggcagtaaatggcagccagttgggaaaggattacatccagctgaagagcctgttgcagcccatccggatttattccagagccagcttatatggccctaatattgggcggccgaggaagaatgtcatcgccctcctagatggattcatgaaggtggcaggaagtacagtagatgcagttacctggcaacattgctacattgatggccgggtggtcaaggtgatggacttcctgaaaactcgcctgttagacacactctctgaccagattaggaaaattcagaaagtggttaatacatacactccaggaaagaagatttggcttgaaggtgtggtgaccacctcagctggaggcacaaacaatctatccgattcctatgctgcaggattcttatggttgaacactttaggaatgctggccaatcagggcattgatgtcgtgatacggcactcattttttgaccatggatacaatcacctcgtggaccagaattttaacccattaccagactactggctctctctcctctacaagcgcctgatcggccccaaagtcttggctgtgcatgtggctgggctccagcggaagccacggcctggccgagtgatccgggacaaactaaggatttatgctcactgcacaaaccaccacaaccacaactacgttcgtgggtccattacactttttatcatcaacttgcatcgatcaagaaagaaaatcaagctggctgggactctcagagacaagctggttcaccagtacctgctgcagccctatgggcaggagggcctaaagtccaagtcagtgcaactgaatggccagcccttagtgatggtggacgacgggaccctcccagaattgaagccccgcccccttcgggccggccggacattggtcatccctccagtcaccatgggcttttatgtggtcaagaatgtcaatgctttggcctgccgctaccgataagctatcctcacactcacggctaccagtgggcctgctgggctgcttccactcctccactccagtagtatcctctgttttcagacatcctagcaaccagcccctgctgccccatcctgctggaatcaacacagacttgctctccaaagagactaaatgtcatagcgtgatcttagcctaggtaggccacatccatcccaaaggaaaatgtagacatcacctgtacctatataaggataaaggcatgtgtatagagcagaatgtttcccttcatgtgcactatgaaaacgagctgacagcacactcccaggagaaatgtttccagacaactccccatgatcctgtcacacagcattataaccacaaatccaaaccttagcctgctgctgctgctgccctcagaggaagatgaggaaggaaaaaaactgggtggacctacaaaaacccatcctctcccaactccttcttctctgcctctttcttgctgctgccctgagttttttgacacatctctttccataggggagtaatgggtgtgtcagccctggcctgctgggagagctgtttgtatgatttcccggctgatgtatgagcgtgcgcatctgggttcctgacagtggcatccatcactggcagttcttctgggaagcgggtgcttcaaaagtaaaattacaatcacactccagatttggtaagaaggttctattcctctgtgaatccagattcccccagagttgtaatgggagtcaagtaacaatattcattgagtggagagcagtttattaggcacaacaaaaagtagtcatcattcttcatgttgctatgagggagagtttgagtacaaagagaaagcatactgaaacatcaggtacacacacacaccccaactggacaaagcaaattagacctctccaaaattaagagaatattaggggctctatagggtaagcccttaattgtttggttaactcaaatcattatttttaaa

SEQ ID NO: 3316 - protein, 534 aa, Homosapiens
MRVLCAFPEAMPSSNSRPPACLAPGALYLALLLHLSLSSQAGDRRPLPVDRAAGLKEKTLILLDVSTKNPVRTVNENFLSLQLDPSIIHDGWLDFLSSKRLVTLARGLSPAFLRFGGKRTDFLQFQNLRNPAKSRGGPGPDYYLKNYEDDIVRSDVALDKQKGCKIAQHPDVMLELQREKAAQMHLVLLKEQFSNTYSNLILTEPNNYRTMHGRAVNGSQLGKDYIQLKSLLQPIRIYSRASLYGPNIGRPRKNVIALLDGFMKVAGSTVDAVTWQHCYIDGRVVKVMDFLKTRLLDTLSDQIRKIQKVVNTYTPGKKIWLEGVVTTSAGGTNNLSDSYAAGFLWLNTLGMLANQGIDVVIRHSFFDHGYNHLVDQNFNPLPDYWLSLLYKRLIGPKVLAVHVAGLQRKPRPGRVIRDKLRIYAHCTNHHNHNYVRGSITLFIINLHRSRKKIKLAGTLRDKLVHQYLLQPYGQEGLKSKSVQLNGQPLVMVDDGTLPELKPRPLRAGRTLVIPPVTMGFYVVKNVNALACRYR

SEQ ID NO: 3317 - DNA, 2824 bp, Homosapiens
aaggacaattagtcactagcgagacccagtaggaagagaggtttaaatcagagggattgaatgagggtgctttgtgccttccctgaagccatgccctccagcaactcccgcccccccgcgtgcctagccccgggggctctctacttggctctgttgctccatctctccctttcctcccaggctggagacaggagacccttgcctgtagacagagctgcaggtttgaaggaaaagaccctgattctacttgatgtgagcaccaagaacccagtcaggacagtcaatgagaacttcctctctctgcagctggatccgtccatcattcatgatggctggctcgatttcctaagctccaagcgcttggtgaccctggcccggggactttcgcccgcctttctgcgcttcgggggcaaaaggaccgacttcctgcagttccagaacctgaggaacccggcgaaaagccgcgggggcccgggcccggattactatctcaaaaactatgaggatgacattgttcgaagtgatgttgccttagataaacagaaaggctgcaagattgcccagcaccctgatgttatgctggagctccaaagggagaaggcagctcagatgcatctggttcttctaaaggagcaattctccaatacttacagtaatctcatattaacagccaggtctctagacaaactttataactttgctgattgctctggactccacctgatatttgctctaaatgcactgcgtcgtaatcccaataactcctggaacagttctagtgccctgagtctgttgaagtacagcgccagcaaaaagtacaacatttcttgggaactgggtaatgagccaaataactatcggaccatgcatggccgggcagtaaatggcagccagttgggaaaggattacatccagctgaagagcctgttgcagcccatccggatttattccagagccagcttatatggccctaatattgggcggccgaggaagaatgtcatcgccctcctagatggattcatgaaggtggcaggaagtacagtagatgcagttacctggcaacattgctacattgatggccgggtggtcaaggtgatggacttcctgaaaactcgcctgttagacacactctctgaccagattaggaaaattcagaaagtggttaatacatacactccaggaaagaagatttggcttgaaggtgtggtgaccacctcagctggaggcacaaacaatctatccgattcctatgctgcaggattcttatggttgaacactttaggaatgctggccaatcagggcattgatgtcgtgatacggcactcattttttgaccatggatacaatcacctcgtggaccagaattttaacccattaccagactactggctctctctcctctacaagcgcctgatcggccccaaagtcttggctgtgcatgtggctgggctccagcggaagccacggcctggccgagtgatccgggacaaactaaggatttatgctcactgcacaaaccaccacaaccacaactacgttcgtgggtccattacactttttatcatcaacttgcatcgatcaagaaagaaaatcaagctggctgggactctcagagacaagctggttcaccagtacctgctgcagccctatgggcaggagggcctaaagtccaagtcagtgcaactgaatggccagcccttagtgatggtggacgacgggaccctcccagaattgaagccccgcccccttcgggccggccggacattggtcatccctccagtcaccatgggcttttatgtggtcaagaatgtcaatgctttggcctgccgctaccgataagctatcctcacactcacggctaccagtgggcctgctgggctgcttccactcctccactccagtagtatcctctgttttcagacatcctagcaaccagcccctgctgccccatcctgctggaatcaacacagacttgctctccaaagagactaaatgtcatagcgtgatcttagcctaggtaggccacatccatcccaaaggaaaatgtagacatcacctgtacctatataaggataaaggcatgtgtatagagcagaatgtttcccttcatgtgcactatgaaaacgagctgacagcacactcccaggagaaatgtttccagacaactccccatgatcctgtcacacagcattataaccacaaatccaaaccttagcctgctgctgctgctgccctcagaggaagatgaggaaggaaaaaaactgggtggacctacaaaaacccatcctctcccaactccttcttctctgcctctttcttgctgctgccctgagttttttgacacatctctttccataggggagtaatgggtgtgtcagccctggcctgctgggagagctgtttgtatgatttcccggctgatgtatgagcgtgcgcatctgggttcctgacagtggcatccatcactggcagttcttctgggaagcgggtgcttcaaaagtaaaattacaatcacactccagatttggtaagaaggttctattcctctgtgaatccagattcccccagagttgtaatgggagtcaagtaacaatattcattgagtggagagcagtttattaggcacaacaaaaagtagtcatcattcttcatgttgctatgagggagagtttgagtacaaagagaaagcatactgaaacatcaggtacacacacacaccccaactggacaaagcaaattagacctctccaaaattaagagaatattaggggctctatagggtaagcccttaattgtttggttaactcaaatcattatttttaaa

SEQ ID NO: 3318 - protein, 592 aa, Homosapiens
MRVLCAFPEAMPSSNSRPPACLAPGALYLALLLHLSLSSQAGDRRPLPVDRAAGLKEKTLILLDVSTKNPVRTVNENFLSLQLDPSIIHDGWLDFLSSKRLVTLARGLSPAFLRFGGKRTDFLQFQNLRNPAKSRGGPGPDYYLKNYEDDIVRSDVALDKQKGCKIAQHPDVMLELQREKAAQMHLVLLKEQFSNTYSNLILTARSLDKLYNFADCSGLHLIFALNALRRNPNNSWNSSSALSLLKYSASKKYNISWELGNEPNNYRTMHGRAVNGSQLGKDYIQLKSLLQPIRIYSRASLYGPNIGRPRKNVIALLDGFMKVAGSTVDAVTWQHCYIDGRVVKVMDFLKTRLLDTLSDQIRKIQKVVNTYTPGKKIWLEGVVTTSAGGTNNLSDSYAAGFLWLNTLGMLANQGIDVVIRHSFFDHGYNHLVDQNFNPLPDYWLSLLYKRLIGPKVLAVHVAGLQRKPRPGRVIRDKLRIYAHCTNHHNHNYVRGSITLFIINLHRSRKKIKLAGTLRDKLVHQYLLQPYGQEGLKSKSVQLNGQPLVMVDDGTLPELKPRPLRAGRTLVIPPVTMGFYVVKNVNALACRYR

SEQ ID NO: 3319 - DNA, 2488 bp, Homosapiens
aaggacaattagtcactagcgagacccagtaggaagagaggtttaaatcagagggattgaatgagggtgctttgtgccttccctgaagccatgccctccagcaactcccgcccccccgcgtgcctagccccgggggctctctacttggctctgttgctccatctctccctttcctcccaggctggagacaggagacccttgcctgtagacagagctgcaggtttgaaggaaaagaccctgattctacttgatgtgagcaccaagaacccagtcaggacagtcaatgagaacttcctctctctgcagctggatccgtccatcattcatgatggctggctcgatttcctaagctccaagcgcttggtgaccctggcccggggactttcgcccgcctttctgcgcttcgggggcaaaaggaccgacttcctgcagttccagaacctgaggaacccggcgaaaagccgcgggggcccgggcccggattactatctcaaaaactatgaggatgagccaaataactatcggaccatgcatggccgggcagtaaatggcagccagttgggaaaggattacatccagctgaagagcctgttgcagcccatccggatttattccagagccagcttatatggccctaatattgggcggccgaggaagaatgtcatcgccctcctagatggattcatgaaggtggcaggaagtacagtagatgcagttacctggcaacattgctacattgatggccgggtggtcaaggtgatggacttcctgaaaactcgcctgttagacacactctctgaccagattaggaaaattcagaaagtggttaatacatacactccaggaaagaagatttggcttgaaggtgtggtgaccacctcagctggaggcacaaacaatctatccgattcctatgctgcaggattcttatggttgaacactttaggaatgctggccaatcagggcattgatgtcgtgatacggcactcattttttgaccatggatacaatcacctcgtggaccagaattttaacccattaccagactactggctctctctcctctacaagcgcctgatcggccccaaagtcttggctgtgcatgtggctgggctccagcggaagccacggcctggccgagtgatccgggacaaactaaggatttatgctcactgcacaaaccaccacaaccacaactacgttcgtgggtccattacactttttatcatcaacttgcatcgatcaagaaagaaaatcaagctggctgggactctcagagacaagctggttcaccagtacctgctgcagccctatgggcaggagggcctaaagtccaagtcagtgcaactgaatggccagcccttagtgatggtggacgacgggaccctcccagaattgaagccccgcccccttcgggccggccggacattggtcatccctccagtcaccatgggcttttatgtggtcaagaatgtcaatgctttggcctgccgctaccgataagctatcctcacactcacggctaccagtgggcctgctgggctgcttccactcctccactccagtagtatcctctgttttcagacatcctagcaaccagcccctgctgccccatcctgctggaatcaacacagacttgctctccaaagagactaaatgtcatagcgtgatcttagcctaggtaggccacatccatcccaaaggaaaatgtagacatcacctgtacctatataaggataaaggcatgtgtatagagcagaatgtttcccttcatgtgcactatgaaaacgagctgacagcacactcccaggagaaatgtttccagacaactccccatgatcctgtcacacagcattataaccacaaatccaaaccttagcctgctgctgctgctgccctcagaggaagatgaggaaggaaaaaaactgggtggacctacaaaaacccatcctctcccaactccttcttctctgcctctttcttgctgctgccctgagttttttgacacatctctttccataggggagtaatgggtgtgtcagccctggcctgctgggagagctgtttgtatgatttcccggctgatgtatgagcgtgcgcatctgggttcctgacagtggcatccatcactggcagttcttctgggaagcgggtgcttcaaaagtaaaattacaatcacactccagatttggtaagaaggttctattcctctgtgaatccagattcccccagagttgtaatgggagtcaagtaacaatattcattgagtggagagcagtttattaggcacaacaaaaagtagtcatcattcttcatgttgctatgagggagagtttgagtacaaagagaaagcatactgaaacatcaggtacacacacacaccccaactggacaaagcaaattagacctctccaaaattaagagaatattaggggctctatagggtaagcccttaattgtttggttaactcaaatcattatttttaaa

SEQ ID NO: 3320 - protein, 480 aa, Homosapiens
MRVLCAFPEAMPSSNSRPPACLAPGALYLALLLHLSLSSQAGDRRPLPVDRAAGLKEKTLILLDVSTKNPVRTVNENFLSLQLDPSIIHDGWLDFLSSKRLVTLARGLSPAFLRFGGKRTDFLQFQNLRNPAKSRGGPGPDYYLKNYEDEPNNYRTMHGRAVNGSQLGKDYIQLKSLLQPIRIYSRASLYGPNIGRPRKNVIALLDGFMKVAGSTVDAVTWQHCYIDGRVVKVMDFLKTRLLDTLSDQIRKIQKVVNTYTPGKKIWLEGVVTTSAGGTNNLSDSYAAGFLWLNTLGMLANQGIDVVIRHSFFDHGYNHLVDQNFNPLPDYWLSLLYKRLIGPKVLAVHVAGLQRKPRPGRVIRDKLRIYAHCTNHHNHNYVRGSITLFIINLHRSRKKIKLAGTLRDKLVHQYLLQPYGQEGLKSKSVQLNGQPLVMVDDGTLPELKPRPLRAGRTLVIPPVTMGFYVVKNVNALACRYR

SEQ ID NO: 3321 - DNA, 4780 bp, Homosapiens
ctggctggctggctgtacacctcgctgccgccgggcttcgggggcaccggggaagactacagcgaagaggggatccacttcccgtggctgccggcgctcgtgtgcaccggcgcggtattcctgggcgccgaaatctgcccctactcagtgtgttcgcggcacgggctggccatcgcctcgcacagcgtgtgcctgacccggcttctgatggcagccgccttccccgtgtgctacccgctgggccgcctgctggactgggcgctgcgccaggagataagcaccttctacacgcgggagaagttgctggagacgttgcgggccgcagacccctacagtgacctggtgaaggaggagctcaacatcatacagggtgccctggagctgcgcaccaaagttgtggaggaggtgctgacccccctgggagactgcttcatgctgcgctcagacgcggtgctcgacttcgccactgtctccgagatcctgcgcagcggctacactcgcatcccagtgtacgagggtgaccagcggcacaacattgtggacattttatttgtcaaggacttggccttcgtggaccccgacgactgcaccccgctcctcactgtcacccgcttctacaaccggcccctgcattgtgttttcaatgacacccgactggacacggttctggaggagtttaagaagggaaaatctcacctggccattgtccagcgggtgaataatgagggagaaggggaccctttctatgaggtgatgggcattgtcacgctggaggatatcatagaggagattatcaagtcggagatcctggatgaaactgatctctacactgacaatcggaaaaagcagagggtcccgcaacgggagcggaagcggcatgacttctccttgtttaagctttcggacacggagatgcgggtgaagatctcaccacagcttctgctagccacacaccgcttcatggccacagaagtggagccctttaagtctctgtacctttcggagaagatcctgctccggctcctgaaacatcccaacgtgatccaggagctgaagtttgatgagaagaacaagaaggccccggaacactacctctaccagcgcaaccgccctgtggactactttgtgctgcttctacagggtaaagtggaggtggaggttggtaaggaaggccttcgctttgaaaatggagcctttacttactatggcgtcccagccatcatgaccactgcttgctcagataatgacgtgcggaaggttggaagtctggctggatcttctgtctttctaaaccggtccccttctcgctgcagtgggttgaatcgctctgagtctccaaaccgagagcgcagtgactttgggggcagcaacacccagctgtacagcagcagcaacaacctctacatgcctgactactcagtccacatcctcagcgatgtgcagtttgtgaagatcacacggcagcaatatcagaacgcactcactgcctgccacatggacagctcacctcagtcccctgacatggaggccttcacagacggggactccactaaggcccccacaacccggggcacaccccagacccctaaggatgaccccgccatcacgctcctcaacaacaggaacagcctgccgtgcagccgctcagacgggctgagaagccccagcgaggtagtgtacctgaggatggaggagctggccttcacccaggaagaaatgactgacttcgaggagcacagcacacagcagctcacgctgtctcctgcagccgttcccacgagagcagcatcagatagtgaatgttgtaacatcaacctggatacagagaccagcccctgcagtagcgattttgaggaaaacgtgggcaagaagctgctgagaaccttgagtggccaaaaaaggaagaggtcaccagaaggagagagaacctctgaggacaactccaatttaacacctctgatcacatgacagggcaaagccagcattcactgggtgtgtgaaattccagagctttgggggagaatccaccctcccatcatctgcttcccccaaggcctcccacaggtgacagaatgttctgccttcccttccatctcttcacccctagctgtcagtttggcagattttccctcgttacctccagttcgactcagaaccttgacatggccataacagaaggaggtgcctctgatagaacatgctagaaatggtcttttccacagcatagtctgggactggaaaagagatgtctgactgcaagctgacaatgccactctgggacccctgatgctcttctttgttctttgggtcccctgatgccataggagacctatcgtcttggaacttgccattctttcctccagaacaaaatgttaactttctaacacatttcatgcatagcttggctcagaaggtgccattggcagacaggcacatgggaggctggagtaggaggtctgaagattagttcaggggatggaccaagaatttcccccagagctttaaagaagtgggactcagccatgttggcgcgtgattgacattacagcacagaaaactgttagtgactggtttcctgttagataagggttccagcagcctggggcagtatgtctcagctggaatggaaagaatgtgagatggaacctcaagtcactgtttttaccagggacacatctgttttggctcccaatcagcagtcttcaatcgatcaataattctgctctggaagagaaggaacagggagcagagagacccaactgggagccagagatggaacttcaggtcttaagtgcaaatcaaagcaaaaaacaaacaaaacttacatggaaaaactgtaagtgctgaaagcaagtttagccatgacaaaccaaagagtgcccaggtcagccaagaaagatacataatctcatgggacttcagtgggagttacacaggaatgttgaagaatcattcttctttttcatgcatttgtccttctcccacccccttactacaccctagcagatcagctgagtgtactttattccaagaacttactggatctctggtttttctcctgaagttggggcaggtgcaattccaagcataaccaccagatggcagagtgaccgcgcatacctgcttccaagaataaaacagttctgaaaagcaaccgcaaagccgggcgcggtggctcacacctgtaatcccaacagtttggaagaccgaggcgggtggatcacttgaagtcaggagtttgagaccagcctggccaacatggtgaaaccccatctctcctgggcatgtagtcccagctactcgggaggctgaggcaggagaatcgcttgaacctgggaggcagaggttgcagtgagctgagatcacaccactgcacttcatcctaggcaacagagcgagactctgtctccccccgcaaaaaaaaaaaagaaagaaagaaagagaaaagaaaagaaaagcaaccacagccagccttagggaaaacttggaagtaagtgaaatttgtcttcagaataactatctccctttctgatctgtctcctactctttagatgttctcagtcaagtactcactgaactcattgatcgagtgctgtctgctaaatctccaaaccattcccaaacctttccccgtagtataccatccagcttccctccccttcctccaaaaccctccctcccacctccccacacccattgagtcattcacaggcaggagggagactgatcattcctctgggttatctgcatctcaaaagaaaatgcttacccacaggaactgttaactcaggggttcttaacttggggtccatcaccccagggggtccatagttggacttcagagggtctatgaaacccctaaaactgtcagtatttaatgtatttattcttgtatgttttttccagagcattaaagctttcataaggttctcaaaggtctcagacctacaaagagttaaaacaaacagacaaacaaaaaaaaacactactattttaaatagtggaactttcagcccagcgtttctgcaatgcagagtgaagtggatactgggcagttcgagacaggtttttaatcataagtggtcttttcaaatgtccatcaattgatggggaaggctggcacccaccaagaagtggaagtcctcagaaattctcggcacaccctagagtattgtacaaccaacacccccacataactttgtcccctcttccccaacaacccagagcaggtgttgcagacaggagggccacagcgtgtggaagtaaagactttggagctagagaagccttttccagcaatgattattgacttcaccacaccccttgcctggcctggcctgaggctcagcagtgcatgacttctcgtagataacttcacagtcatccagtcccaacacctgctcttgcctggtaggaacaggcgaagtgtcagccctcaatgttgggtacttagacccaaaccaataaatggtgagttttgaacaagaactaccatcatgcaggcttcttgcccagctgaccactggccccggggtgcctgcctggctggtcttcatcacctgaggccaccaggctcaagccactgctgttgcattacacccatccctttgcaaaatccctatggagcctgtcaccactcccctccctatatacccccaccccacaaagattttcttcaggttaaaaaaaaagtttaaaaaaaagattttaaaataaagcatttatgaaggcttaataaattgtaaataatttttaaataaaatgaaaatgcctttcctgg

SEQ ID NO: 3322 - protein, 586 aa, Homosapiens; identical to SEQ ID NO: 448

SEQ ID NO: 3323 - DNA, 3572 bp, Homosapiens
aatgagggagaaggggaccctttctatgaggtgatgggcattgtcacgctggaggatatcatagaggagattatcaagtcggagatcctggatgaaactgatctctacactgacaatcggaaaaagcagagggtcccgcaacgggagcggaagcggcatgacttctccttgtttaagctttcggacacggagatgcgggtgaagatctcaccacagcttctgctagccacacaccgcttcatggccacagaagtggagccctttaagtctctgtacctttcggagaagatcctgctccggctcctgaaacatcccaacgtgatccaggagctgaagtttgatgagaagaacaagaaggccccggaacactacctctaccagcgcaaccgccctgtggactactttgtgctgcttctacagggtaaagtggaggtggaggttggtaaggaaggccttcgctttgaaaatggagcctttacttactatggcgtcccagccatcatgaccactgcttgctcagataatgacgtgcggaaggttggaagtctggctggatcttctgtctttctaaaccggtccccttctcgctgcagtgggttgaatcgctctgagtctccaaaccgagagcgcagtgactttgggggcagcaacacccagctgtacagcagcagcaacaacctctacatgcctgactactcagtccacatcctcagcgatgtgcagtttgtgaagatcacacggcagcaatatcagaacgcactcactgcctgccacatggacagctcacctcagtcccctgacatggaggccttcacagacggggactccactaaggcccccacaacccggggcacaccccagacccctaaggatgaccccgccatcacgctcctcaacaacaggaacagcctgccgtgcagccgctcagacgggctgagaagccccagcgaggtagtgtacctgaggatggaggagctggccttcacccaggaagaaatgactgacttcgaggagcacagcacacagcagctcacgctgtctcctgcagccgttcccacgagagcagcatcagatagtgaatgttgtaacatcaacctggatacagagaccagcccctgcagtagcgattttgaggaaaacgtgggcaagaagctgctgagaaccttgagtggccaaaaaaggaagaggtcaccagaaggagagagaacctctgaggacaactccaatttaacacctctgatcacatgacagggcaaagccagcattcactgggtgtgtgaaattccagaagctttaaagaagtgggactcagccatgttggcgcgtgattgacattacagcacagaaaactgttagtgactggtttcctgttagataagggttccagcagcctggggcagtatgtctcagctggaatggaaagaatgtgagatggaacctcaagtcactgtttttaccagggacacatctgttttggctcccaatcagcagtcttcaatcgatcaataattctgctctggaagagaaggaacagggagcagagagacccaactgggagccagagatggaacttcaggtcttaagtgcaaatcaaagcaaaaaacaaacaaaacttacatggaaaaactgtaagtgctgaaagcaagtttagccatgacaaaccaaagagtgcccaggtcagccaagaaagatacataatctcatgggacttcagtgggagttacacaggaatgttgaagaatcattcttctttttcatgcatttgtccttctcccacccccttactacaccctagcagatcagctgagtgtactttattccaagaacttactggatctctggtttttctcctgaagttggggcaggtgcaattccaagcataaccaccagatggcagagtgaccgcgcatacctgcttccaagaataaaacagttctgaaaagcaaccgcaaagccgggcgcggtggctcacacctgtaatcccaacagtttggaagaccgaggcgggtggatcacttgaagtcaggagtttgagaccagcctggccaacatggtgaaaccccatctctcctgggcatgtagtcccagctactcgggaggctgaggcaggagaatcgcttgaacctgggaggcagaggttgcagtgagctgagatcacaccactgcacttcatcctaggcaacagagcgagactctgtctccccccgcaaaaaaaaaaaagaaagaaagaaagagaaaagaaaagaaaagcaaccacagccagccttagggaaaacttggaagtaagtgaaatttgtcttcagaataactatctccctttctgatctgtctcctactctttagatgttctcagtcaagtactcactgaactcattgatcgagtgctgtctgctaaatctccaaaccattcccaaacctttccccgtagtataccatccagcttccctccccttcctccaaaaccctccctcccacctccccacacccattgagtcattcacaggcaggagggagactgatcattcctctgggttatctgcatctcaaaagaaaatgcttacccacaggaactgttaactcaggggttcttaacttggggtccatcaccccagggggtccatagttggacttcagagggtctatgaaacccctaaaactgtcagtatttaatgtatttattcttgtatgttttttccagagcattaaagctttcataaggttctcaaaggtctcagacctacaaagagttaaaacaaacagacaaacaaaaaaaaacactactattttaaatagtggaactttcagcccagcgtttctgcaatgcagagtgaagtggatactgggcagttcgagacaggtttttaatcataagtggtcttttcaaatgtccatcaattgatggggaaggctggcacccaccaagaagtggaagtcctcagaaattctcggcacaccctagagtattgtacaaccaacacccccacataactttgtcccctcttccccaacaacccagagcaggtgttgcagacaggagggccacagcgtgtggaagtaaagactttggagctagagaagccttttccagcaatgattattgacttcaccacaccccttgcctggcctggcctgaggctcagcagtgcatgacttctcgtagataacttcacagtcatccagtcccaacacctgctcttgcctggtaggaacaggcgaagtgtcagccctcaatgttgggtacttagacccaaaccaataaatggtgagttttgaacaagaactaccatcatgcaggcttcttgcccagctgaccactggccccggggtgcctgcctggctggtcttcatcacctgaggccaccaggctcaagccactgctgttgcattacacccatccctttgcaaaatccctatggagcctgtcaccactcccctccctatatacccccaccccacaaagattttcttcaggttaaaaaaaaagtttaaaaaaaagattttaaaataaagcatttatgaaggcttaataaattgtaaataatttttaaataaaatgaaaatgcctttcctgg

SEQ ID NO: 3324 - protein, 404 aa, Homosapiens
MGIVTLEDIIEEIIKSEILDETDLYTDNRKKQRVPQRERKRHDFSLFKLSDTEMRVKISPQLLLATHRFMATEVEPFKSLYLSEKILLRLLKHPNVIQELKFDEKNKKAPEHYLYQRNRPVDYFVLLLQGKVEVEVGKEGLRFENGAFTYYGVPAIMTTACSDNDVRKVGSLAGSSVFLNRSPSRCSGLNRSESPNRERSDFGGSNTQLYSSSNNLYMPDYSVHILSDVQFVKITRQQYQNALTACHMDSSPQSPDMEAFTDGDSTKAPTTRGTPQTPKDDPAITLLNNRNSLPCSRSDGLRSPSEVVYLRMEELAFTQEEMTDFEEHSTQQLTLSPAAVPTRAASDSECCNINLDTETSPCSSDFEENVGKKLLRTLSGQKRKRSPEGERTSEDNSNLTPLIT

SEQ ID NO: 3325 - DNA, 824 bp, Homosapiens
ccacagggctcggcttgtgcttgtacatctgattccaagatgtgttgcacatcttttcagatgaccttcagcaaaatccattttattttcttgtctttctggagtgtgactttgtaagaggatgtgattcctgtgttttcagagtcaagattcctttttgcagagaaatgtgatgttgtgaagatccaggaacagactgtctcacccactttgttctttgtctctttccttttgtgtttatatcttccctttcgcaactcacaaatccttggcccctgactctttagtgcctgtctctgtgtctcgtaccttcgctgtcagcagaggggactctctggcaggctccccagtaaaccggtccccttctcgctgcagtgggttgaatcgctctgagtctccaaaccgagagcgcagtgactttgggggcagcaacacccagctgtacagcagcagcaacaacctctacatgcctgactactcagtccacatcctcagcgatgtgcagtttgtgaaggtaactcccccaggaaggttatcctctccctcccagtgggcagtgttggctggctgagcgggacaagaagactacccccattcctaggagggatgtgtgcaccattcccctgtgttccaatacagtgctgggtggtaactgctactggctgtataaaggctgttttcagtaagctttaggacggttcattatttgtcactcttttaacatctcctgacccccttttttcatgtggggaaatgaggcacaaagcaatagattagcttgcctgacacaaattgctgccagaaccatttcctttgcatcccct

SEQ ID NO: 3326 - protein, 34 aa, Homosapiens
MPDYSVHILSDVQFVKVTPPGRLSSPSQWAVLAG

SEQ ID NO: 3327 - DNA, 1538 bp, Homosapiens
gttgtagagagaaatggatgtaaagtggagcttgggtgcatatagtcaagaaataggagaaatggacagcatttgaaattccctccaggcatcagctggggaaggaaggccggtgtctgaggttggtgccagaaggatttcctgccctgactcactttgcttccccgcagcaccggtttctgttccccttctttgactcagcctatcagggcttcgcatctggaaacctggagagagatgcctgggccattcgctattttgtgtctgaaggcttcgagttcttctgtgcccagtccttctccaagaacttcgggctctacagtgagtgctctcctgaggagttacagccccacctcctcgcatcactccctgcttcagcagccacagctgattctggtccctctctttagatgagagagtcgggaatctgactgtggttggaaaagaacctgagagcatcctgcaagtcctttcccagatggagaagatcgtgcggattacttggtccaatccccccgcccagggagcacgaattgtggccagcaccctctctaaccctgagctctttgaggaatggacaggtaatgtgaagacaatggctgaccggattctgaccatgagatctgaactcagggcacgactagaagccctcaaaacccctgggacctggaaccacatcactgatcaaattggcatgttcagcttcactgggttgaaccccaagcaggttgagtatctggtcaatgaaaagcacatctacctgctgccaagtggtcgaatcaacgtgagtggcttaaccaccaaaaatctagattacgtggccacctccatccatgaagcagtcaccaaaatccagtgaagaaacaccacccgtccagtaccaccaaagtagttctctgtcatgtgtgttccctgcctgcacaaacctacatgtacataccatggattagagacacttgcaggactgaaaggctgctctggtgaggcagcctctgtttaaaccggccccacatgaagagaacatcccttgagacgaatttggagactgggattagagcctttggaggtcaaagcaaattaagatttttatttaagaataaaagagtactttgatcatgagacataggtatcttgtccctctcactaaaaaggagtgttgtgtgtggcggccacgtgcttctatgtggtgtttgactctgtacaaattctagtcccaaagatcaagttgtctgaaggagccaaagtgtgaatgtgggtgtcggctgcggcattaaattcatcatctcaacccagagtgtctggtctccctgctctttctgcatggttgtgtccctagtcctaagctttggttctttagggtgactgtggtaagaaggatatttaatcatgacatgcacggacacgtacatatttaactgaaacaagttttaccaaacagtatttactcgtgatgtgcgtagtgcattctgatatttttgagccattctattgtgttctacttcacctaaaaaaataaaataaaaatgttgatcaagaca

SEQ ID NO: 3328 - protein, 126 aa, Homosapiens
MEKIVRITWSNPPAQGARIVASTLSNPELFEEWTGNVKTMADRILTMRSELRARLEALKTPGTWNHITDQIGMFSFTGLNPKQVEYLVNEKHIYLLPSGRINVSGLTTKNLDYVATSIHEAVTKIQ

SEQ ID NO: 3329 - DNA, 2823 bp, Homosapiens
ggaacagcctgacgaagaggaactttgggtaccagccagctgacgacagcaagatctggtccggtgcgcgcgggaggaagctgggaagggacgtcgcgcccagatcccgaggtccttgaggaccaggccctctctgcaaggaatcggggaggaaaatctcaaactattaatagaagagcggcaaaaaggaattcgtgcgcacccctctctgttggaaggaccttccctgccagagaccaaggctggcaggacaggtatacttccctcagggggaaacagccgacaaaggtggtcaaggtcgcccgcgcaggctccggagctgcacgtcctggacgaacactcccgtcccgagcacagacgctgggtatttggctgccagcccgggcccgccaggccgggcctggcaccgccaacacctgctcggcgggaacaggaagacctgtgttcgggaactccctccggccacctccccgtatcctcctggccctcgaaggtcgaaaggtggcctctcagggacacccgccgctcgctcggctcctcccctcagccgggagacccaaggaataacagcctctgcgataggagcacgctctaccaatcaaccgtagtcttcgcccacgcctcagccggaggaaattgcattggttgcatcattctcggcagccgataaattgttttcttggattggctaatagcgttccttctcccctgtgccttcgtcgtcagaagctggcgattggttaatcgcgttgccaagctttggacgcggctcgaccattggaggccgcgggcccgcccccgccggctaggtgaaggtgagtgtctcctccagtcgcaacggccagacctgacctgccagctccgggcgtggggtgaaatctcttgattcctagtctctcgatatggcacctccgtcagtctttgccgaggttccgcaggcccagcctgtcctggtcttcaagctcactgccgacttcagggaggatccggacccccgcaaggtcaacctgggagtgggagcatatcgcacggatgactgccatccctgggttttgccagtagtgaagaaagtggagcagaagattgctaatgacaatagcctaaatcacgagtatctgccaatcctgggcctggctgagttccggagctgtgcttctcgtcttgcccttggggatgacagcccagcactcaaggagaagcgggtaggaggtgtgcaatctttggggggaacaggtgcacttcgaattggagctgatttcttagcgcgttggtacaatggaacaaacaacaagaacacacctgtctatgtgtcctcaccaacctgggagaatcacaatgctgtgttttccgctgctggttttaaagacattcggtcctatcgctactgggatgcagagaagagaggattggacctccagggcttcctgaatgatctggagaatgctcctgagttctccattgttgtcctccacgcctgtgcacacaacccaactgggattgacccaactccggagcagtggaagcagattgcttctgtcatgaagcaccggtttctgttccccttctttgactcagcctatcagggcttcgcatctggaaacctggagagagatgcctgggccattcgctattttgtgtctgaaggcttcgagttcttctgtgcccagtccttctccaagaacttcgggctctacaatgagagagtcgggaatctgactgtggttggaaaagaacctgagagcatcctgcaagtcctttcccagatggagaagatcgtgcggattacttggtccaatccccccgcccagggagcacgaattgtggccagcaccctctctaaccctgagctctttgaggaatggacaggtaatgtgaagacaatggctgaccggattctgaccatgagatctgaactcagggcacgactagaagccctcaaaacccctgggacctggaaccacatcactgatcaaattggcatgttcagcttcactgggttgaaccccaagcaggttgagtatctggtcaatgaaaagcacatctacctgctgccaagtggtcgaatcaacgtgagtggcttaaccaccaaaaatctagattacgtggccacctccatccatgaagcagtcaccaaaatccagtgaagaaacaccacccgtccagtaccaccaaagtagttctctgtcatgtgtgttccctgcctgcacaaacctacatgtacataccatggattagagacacttgcaggactgaaaggctgctctggtgaggcagcctctgtttaaaccggccccacatgaagagaacatcccttgagacgaatttggagactgggattagagcctttggaggtcaaagcaaattaagatttttatttaagaataaaagagtactttgatcatgagacataggtatcttgtccctctcactaaaaaggagtgttgtgtgtggcggccacgtgcttctatgtggtgtttgactctgtacaaattctagtcccaaagatcaagttgtctgaaggagccaaagtgtgaatgtgggtgtcggctgcggcattaaattcatcatctcaacccagagtgtctggtctccctgctctttctgcatggttgtgtccctagtcctaagctttggttctttagggtgactgtggtaagaaggatatttaatcatgacatgcacggacacgtacatatttaactgaaacaagttttaccaaacagtatttactcgtgatgtgcgtagtgcattctgatatttttgagccattctattgtgttctacttcacctaaaaaaataaaataaaaatgttgatcaagaca

SEQ ID NO: 3330 - protein, 413 aa, Homosapiens; identical to SEQ ID NO: 450

SEQ ID NO: 3331 - DNA, 1293 bp, Homosapiens
gttgtagagagaaatggatgtaaagtggagcttgggtgcatatagtcaagaaataggagaaatggacagcatttgaaattccctccaggcatcagctggggaaggaaggccggtgtctgaggttggtgccagaaggatttcctgccctgactcactttgcttccccgcagcaccggtttctgttccccttctttgactcagcctatcagggcttcgcatctggaaacctggagagagatgcctgggccattcgctattttgtgtctgaaggcttcgagttcttctgtgcccagtccttctccaagaacttcgggctctacagtgagtgctctcctgaggagttacagccccacctcctcgcatcactccctgcttcagcagccacagctgattctggtccctctctttagatgagagagtcgggaatctgactgtggttggaaaagaacctgagagcatcctgcaagtcctttcccagatggagaagatcgtgcggattacttggtccaatccccccgcccagggagcacgaattgtggccagcaccctctctaaccctgagctctttgaggaatggacaggtaatgtgaagacaatggctgaccggattctgaccatgagatctgaactcagggcacgactagaagccctcaaaacccctgggacctggaaccacatcactgatcaaattggcatgttcagcttcactgggttgaaccccaagcaggttgagtatctggtcaatgaaaagcacatctacctgctgccaagtggtcgaatcaacgtgagtggcttaaccaccaaaaatctagattacgtggccacctccatccatgaagcagtcaccaaaatccagtgaagaaacaccacccgtccagtaccaccaaagtagttctctgtcatgtgtgttccctgcctgcacaaacctacatgtacataccatggattagagacacttgcaggactgaaaggctgctctggtgaggcagcctctgtttaaaccggccccacatgaagagaacatcccttgagacgaatttggagactgggattagagcctttggaggtcaaagcaaattaagatttttatttaagaataaaagagtactttgatcatgagacataggtatcttgtccctctcactaaaaaggagtgttgtgtgtggcggccacgtgcttctatgtggtgtttgactctgtacaaattctagtcccaaagatcaagttgtctgaaggagccaaagtgtgaatgtgggtgtcggctgcggcattaaattcatcatctcaacccag

SEQ ID NO: 3332 - protein, 126 aa, Homosapiens; identical to SEQ ID NO: 3328

SEQ ID NO: 3333 - DNA, 1124 bp, Homosapiens
gttgtagagagaaatggatgtaaagtggagcttgggtgcatatagtcaagaaataggagaaatggacagcatttgaaattccctccaggcatcagctggggaaggaaggccggtgtctgaggttggtgccagaaggatttcctgccctgactcactttgcttccccgcagcaccggtttctgttccccttctttgactcagcctatcagggcttcgcatctggaaacctggagagagatgcctgggccattcgctattttgtgtctgaaggcttcgagttcttctgtgcccagtccttctccaagaacttcgggctctacagtgagtgctctcctgaggagttacagccccacctcctcgcatcactccctgcttcagcagccacagctgattctggtccctctctttagatgagagagtcgggaatctgactgtggttggaaaagaacctgagagcatcctgcaagtcctttcccagatggagaagatcgtgcggattacttggtccaatccccccgcccagggagcacgaattgtggccagcaccctctctaaccctgagctctttgaggaatggacaggtaatgtgaagacaatggctgaccggattctgaccatgagatctgaactcagggcacgactagaagccctcaaaacccctgggacctggaaccacatcactgatcaaattggcatgttcagcttcactgggttgaaccccaagcaggttgagtatctggtcaatgaaaagcacatctacctgctgccaagtggtcgaatcaacgtgagtggcttaaccaccaaaaatctagattacgtggccacctccatccatgaagcagtcaccaaaatccagtgaagaaacaccacccgtccagtaccaccaaagtagttctctgtcatgtgtgttccctgcctgcacaaacctacatgtacataccatggattagagacacttgcaggactgaaaggctgctctggtgaggcagcctctgtttaaaccggccccacatgaagagaacatcccttgagacgaatttggagactgggattagagcctttggaggtcaaagcaaattaagatttttatttaagaataaaagagtactttgatcatgagacat

SEQ ID NO: 3334 - protein, 126 aa, Homosapiens; identical to SEQ ID NO: 3328

SEQ ID NO: 3335 - DNA, 2409 bp, Homosapiens
ggaacagcctgacgaagaggaactttgggtaccagccagctgacgacagcaagatctggtccggtgcgcgcgggaggaagctgggaagggacgtcgcgcccagatcccgaggtccttgaggaccaggccctctctgcaaggaatcggggaggaaaatctcaaactattaatagaagagcggcaaaaaggaattcgtgcgcacccctctctgttggaaggaccttccctgccagagaccaaggctggcaggacaggtatacttccctcagggggaaacagccgacaaaggtggtcaaggtcgcccgcgcaggctccggagctgcacgtcctggacgaacactcccgtcccgagcacagacgctgggtatttggctgccagcccgggcccgccaggccgggcctggcaccgccaacacctgctcggcgggaacaggaagacctgtgttcgggaactccctccggccacctccccgtatcctcctggccctcgaaggtcgaaaggtggcctctcagggacacccgccgctcgctcggctcctcccctcagccgggagacccaaggaataacagcctctgcgataggagcacgctctaccaatcaaccgtagtcttcgcccacgcctcagccggaggaaattgcattggttgcatcattctcggcagccgataaattgttttcttggattggctaatagcgttccttctcccctgtgccttcgtcgtcagaagctggcgattggttaatcgcgttgccaagctttggacgcggctcgaccattggaggccgcgggcccgcccccgccggctaggtgaaggtgagtgtctcctccagtcgcaacggccagacctgacctgccagctccgggcgtggggtgaaatctcttgattcctagtctctcgatatggcacctccgtcagtctttgccgaggttccgcaggcccagcctgtcctggtcttcaagctcactgccgacttcagggaggatccggacccccgcaaggtcaacctgggagtgggagcatatcgcacggatgactgccatccctgggttttgccagtagtgaagaaagtggagcagaagattgctaatgacaatagcctaaatcacgagtatctgccaatcctgggcctggctgagttccggagctgtgcttctcgtcttgcccttggggatgacagcccagcactcaaggagaagcgggtaggaggtgtgcaatctttggggggaacaggtgcacttcgaattggagctgatttcttagcgcgttggtacaatggaacaaacaacaagaacacacctgtctatgtgtcctcaccaacctgggagaatcacaatgctgtgttttccgctgctggttttaaagacattcggtcctatcgctactgggatgcagagaagagaggattggacctccagggcttcctgaatgatctggagaatgctcctgagttctccattgttgtcctccacgcctgtgcacacaacccaactgggattgacccaactccggagcagtggaagcagattgcttctgtcatgaagcaccggtttctgttccccttctttgactcagcctatcagggcttcgcatctggaaacctggagagagatgcctgggccattcgctattttgtgtctgaaggcttcgagttcttctgtgcccagtccttctccaagaacttcgggctctacaatgagagagtcgggaatctgactgtggttggaaaagaacctgagagcatcctgcaagtcctttcccagatggagaagatcgtgcggattacttggtccaatccccccgcccagggagcacgaattgtggccagcaccctctctaaccctgagctctttgaggaatggacaggtaatgtgaagacaatggctgaccggattctgaccatgagatctgaactcagggcacgactagaagccctcaaaacccctgggacctggaaccacatcactgatcaaattggcatgttcagcttcactgggttgaaccccaagcaggttgagtatctggtcaatgaaaagcacatctacctgctgccaagtggtcgaatcaacgtgagtggcttaaccaccaaaaatctagattacgtggccacctccatccatgaagcagtcaccaaaatccagtgaagaaacaccacccgtccagtaccaccaaagtagttctctgtcatgtgtgttccctgcctgcacaaacctacatgtacataccatggattagagacacttgcaggactgaaaggctgctctggtgaggcagcctctgtttaaaccggccccacatgaagagaacatcccttgagacgaatttggagactgggattagagcctttggaggtcaaagcaaattaagatttttatttaagaataaaagagtactttgatcatgagacat

SEQ ID NO: 3336 - protein, 413 aa, Homosapiens; identical to SEQ ID NO: 450

SEQ ID NO: 3337 - DNA, 510 bp, Homosapiens
gatgtaaagtggagcttgggtgcatatagtcaagaaataggagaaatggacagcatttgaaattccctccaggcatcagctggggaaggaaggccggtgtctgaggttggtgccagaaggatttcctgccctgactcactttgcttccccgcagcaccggtttctgttccccttctttgactcagcctatcagggcttcgcatctggaaacctggagagagatgcctgggccattcgctattttgtgtctgaaggcttcgagttcttctgtgcccagtccttctccaagaacttcgggctctacaatgagagagtcgggaatctgactgtggttggaaaagaacctgagagcatcctgcaagtcctttcccagatggagaagatcgtgcggattacttggtccaatccccccgcccagggagcacgaattgtggccagcaccctctctaaccctgagctctttgaggaatggtaaggggctcccagtctggtgggccggggggtggggag

SEQ ID NO: 3338 - protein, 34 aa, Homosapiens
MPGPFAILCLKASSSSVPSPSPRTSGSTMRESGI

SEQ ID NO: 3339 - DNA, 740 bp, Homosapiens
gtgtctcctccagtcgcaacggccagacctgacctgccagctccgggcgtggggtgaaatctcttgattcctagtctctcgatatggcacctccgtcagtctttgccgaggttccgcaggcccagcctgtcctggtcttcaagctcactgccgacttcagggaggatccggacccccgcaaggtcaacctgggagtgggagcatatcgcacggatgactgccatccctgggttttgccagtagtgaagaaagtggagcagaagattgctaatgacaatagcctaaatcacgagtatctgccaatcctgggcctggctgagttccggagctgtgcttctcgtcttgcccttggggatgacagcccagcactcaaggagaagcgggtaagttttgggtaaggatgtattttctctttagaaactgaaagtaaaaagatgttgagaatacagtttgtttaaaatattaggcgttatgtctattgaactgccaatgaataagtgtttctgtagcgcgagttcaggaacctgatagcgcaaataatgtggccatgtacaaagcacggctttttcacttgttcagttttgcccagtagatcatcagattttagctactgcatttgaagcagtcagtggagatgccaagtagaaagaatttaatggagtgataaagacaccagggttctagatccaactctgccactacttttgatcataggcaagtcatttagccctctgggctca

SEQ ID NO: 3340 - protein, 104 aa, Homosapiens
MAPPSVFAEVPQAQPVLVFKLTADFREDPDPRKVNLGVGAYRTDDCHPWVLPVVKKVEQKIANDNSLNHEYLPILGLAEFRSCASRLALGDDSPALKEKRVSFG

SEQ ID NO: 3341 - DNA, 665 bp, Homosapiens
gtttccccctgagggaagtatacctgtcctgccagccttggtctctggcagggaaggtccttccaacagagagggaattgcttagaattgactcaacactgcctccttgctgaatggataattcaagcaaacaactcaagagctggatgctgcccagacaggtaggcagccagataaagtgagtgtccagggaaagagcagtaagggtcagaagagaaagagcctggtgttctcactgcctcctgccttccttatgactgtctgttcagaagtcctcctagcatctttcttctgccttcccctgctcctgtccctgaaaccttttcttcaaaagaagtggaaaagaggaactgggaacccatatagcaacagcatcacctggaatgaattcctttagaacatactgtcttggaaatctgaagcctgcagggctggacaggcaagaagagcagtgagcactgcatgaacctgcatgtactccgaaatatttttcaaatggaaaagaaaacagagaacacaattttcaaaatatctagagccctccaagaagtctttgtagagatctataaaatctcaaggcaatttaaaggtaataagacaacatgttttagaaacactattctctccacatcctggggcagcagccttctccaaagaaacagaaa

SEQ ID NO: 3342 - protein, 66 aa, Homosapiens
MNLHVLRNIFQMEKKTENTIFKISRALQEVFVEIYKISRQFKGNKTTCFRNTILSTSWGSSLLQRN

SEQ ID NO: 3343 - DNA, 4908 bp, Homosapiens
agaggggaaaagaacgtcaggagagtgaacgggagcaaataaaacgctgtccattctgactggaagggccagagccgtgtctaagggcgggggccgggaggtggcccgcggtggtgtctctaccaggacgaggcctggggtatctgaagaggggatgacgtccaggcgctttgctaaagggaagccagaagggtatgagttgctagggtcagagatggggctttcggctcgagtctttccctgcagggcagagagtccgaagagcccgagaaggcagggaggacagtgggcctggtccttccccggccggcagagggagtcccgagatggaacgtccagctctcctctaacgaaaagcgtttgcatggctgtctcgccaattctgtacctcccggggctgaggaagagccgaggtgactagaagctagcgacaagtgccggccacctccgacgccaggcgccgggcttggagcccgacgggccgaattctcgcgagagcggccgccgccatttttccattgattgcagcgggctgggggaggggccgacgacgaaggcggctgtggtagcggcggcggcggcggcggagccctgggtcggtgtctgcgcgctggtgtctgaggcccaggctgaggcctccgctattgctggagcgcaggcggcggagaggatgactgccgctgccattctctcttgagctagcgagccgccgccaccctccaccctcccccggcagggcggagaggagcggccggagtcagcgatggtgcccggcgaggagaaccaactggtcccgaaagaggcaccactggatcataccagtgacaagtcacttctcgacgctaattttgagccaggaaagaagaactttctgcatttgacagataaagatggtgaacaacctcaaatactgctggaggattccagtgctggggaagacagtgttcatgacaggtttataggtccgcttccaagagaaggttctgggggttctaccagtgattatgtcagccaaagctactcctactcatctattttgaataaatcagaaactggatatgtgggactagtaaaccaagcaatgacttgctatttgaatagccttttgcaaacactttttatgactcctgaatttaggaatgcattatataagtgggaatttgaagaatctgaagaagatccagtgacaagtattccataccaacttcaaaggctttttgttttgttacaaaccagcaaaaagagagcaattgaaaccacagatgttacaaggagctttggatgggatagtagtgaggcttggcagcagcatgatgtacaagaactatgcagagtcatgtttgatgctttggaacagaaatggaagcaaacagaacaggctgatcttataaatgagctatatcaaggcaagctgaaggactacgtgagatgtctggaatgtggttatgagggctggcgaatcgacacatatcttgatattccattggtcatccgaccttatgggtccagccaagcatttgctagtgtggaagaagcattgcatgcatttattcagccagagattctggatggcccaaatcagtatttttgtgaacgttgtaagaagaagtgtgatgcacggaagggccttcggtttttgcattttccttatctgctgaccttacagctgaaaagattcgattttgattatacaaccatgcataggattaaactgaatgatcgaatgacatttcccgaggaactagatatgagtacttttattgatgttgaagatgagaaatctcctcagactgaaagttgcactgacagtggagcagaaaatgaaggtagttgtcacagtgatcagatgagcaacgatttctccaatgatgatggtgttgatgaaggaatctgtcttgaaaccaatagtggaactgaaaagatctcaaaatctggacttgaaaagaattccttgatctatgaacttttctctgttatggttcattctgggagcgctgctggtggtcattattatgcatgtataaagtcattcagtgatgagcagtggtacagcttcaatgatcaacatgtcagcaggataacacaagaggacattaagaaaacacatggtggatcttcaggaagcagaggatattattctagtgctttcgcaagttccacaaatgcatatatgctgatctatagactgaaggatccagccagaaatgcaaaatttctagaagtggatgaatacccagaacatattaaaaacttggtgcagaaagagagagagttggaagaacaagaaaagagacaacgagaaattgagcgcaatacatgcaagataaaattattctgtttgcatcctacaaaacaagtaatgatggaaaataaattggaggttcataaggataagacattaaaggaagcagtagaaatggcttataagatgatggatttagaagaggtaatacccctggattgctgtcgccttgttaaatatgatgagtttcatgattatctagaacggtcatatgaaggagaagaagatacaccaatggggcttctactaggtggcgtcaagtcaacatatatgtttgatctgctgttggagacgagaaagcctgatcaggttttccaatcttataaacctggagaagtgatggtgaaagttcatgttgttgatctaaaggcagaatctgtagctgctcctataactgttcgtgcttacttaaatcagacagttacagaattcaaacaactgatttcaaaggccatccatttacctgctgaaacaatgagaatagtgctggaacgctgctacaatgatttgcgtcttctcagtgtctccagtaaaaccctgaaagctgaaggattttttagaagtaacaaggtgtttgttgaaagctccgagactttggattaccagatggcctttgcagactctcatttatggaaactcctggatcggcatgcaaatacaatcagattatttgttttgctacctgaacaatccccagtatcttattccaaaaggacagcataccagaaagctggaggcgattctggtaatgtggatgatgactgtgaaagagtcaaaggacctgtaggaagcctaaagtctgtggaagctattctagaagaaagcactgaaaaactcaaaagcttgtcactgcagcaacagcaggatggagataatggggacagcagcaaaagtactgagacaagtgactttgaaaacatcgaatcacctctcaatgagagggactcttcagcatcagtggataatagagaacttgaacagcatattcagacttctgatccagaaaattttcagtctgaagaacgatcagactcagatgtgaataatgacaggagtacaagttcagtggacagtgatattcttagctccagtcatagcagtgatactttgtgcaatgcagacaatgctcagatccctttggctaatggacttgactctcacagtatcacaagtagtagaagaacgaaagcaaatgaagggaaaaaagaaacatgggatacagcagaagaagactctggaactgatagtgaatatgatgagagtggcaagagtaggggagaaatgcagtacatgtatttcaaagctgaaccttatgctgcagatgaaggttctggggaaggacataaatggttgatggtgcatgttgataaaagaattactctggcagctttcaaacaacatttagagccctttgttggagttttgtcctctcacttcaaggtctttcgagtgtatgccagcaatcaagagtttgagagcgtccggctgaatgagacactttcatcattttctgatgacaataagattacaattagactggggagagcacttaaaaaaggagaatacagagttaaagtataccagcttttggtcaatgaacaagagccatgcaagtttctgctagatgctgtgtttgctaaaggaatgactgtacggcaatcaaaagaggaattaattcctcagctcagggagcaatgtggtttagagctcagtattgacaggtttcgtctaaggaaaaaaacatggaagaatcctggcactgtctttttggattatcatatttatgaagaagatattaatatttccagcaactgggaggttttccttgaagttcttgatggggtagagaagatgaagtccatgtcacagcttgcagttttgtcaagacggtggaagccttcagagatgaagttggatcccttccaggaggttgtattggaaagcagtagtgtggacgaattgcgagagaagcttagtgaaatcagtgggattcctttggatgatattgaatttgctaagggtagaggaacatttccctgtgatatttctgtccttgatattcatcaggatttagactggaatcctaaagtttctaccctgaatgtctggcctctttatatctgtgatgatggtgcggtcatattttatagggataaaacagaagaattaatggaattgacagatgagcaaagaaatgaactgatgaaaaaagaaagcagtcgactccagaagactggacatcgtgtaacatactcacctcgtaaagagaaagcactaaaaatatatctggatggagcaccaaataaagatctgactcaagactgactctgatagtgtagcattttccctgggggagttttggttttaattagatggttcactaccactgggtagtgccattttggccggacatggttggggtaacccagtgacaccagcactgattggactgccctacaccaatcagaagctcagtgcccaatgggccactgttttgactcggaatcatgttgtgcactatagtcaaatgtactgtaaagtgaaaagggatgtgcaaaaaaataaaaaaaaacaacaaaaaaagctaaccttctattagaaaaggg

SEQ ID NO: 3344 - protein, 1287 aa, Homosapiens; identical to SEQ ID NO: 452

SEQ ID NO: 3345 - DNA, 5024 bp, Homosapiens
agaggggaaaagaacgtcaggagagtgaacgggagcaaataaaacgctgtccattctgactggaagggccagagccgtgtctaagggcgggggccgggaggtggcccgcggtggtgtctctaccaggacgaggcctggggtatctgaagaggggatgacgtccaggcgctttgctaaagggaagccagaagggtatgagttgctagggtcagagatggggctttcggctcgagtctttccctgcagggcagagagtccgaagagcccgagaaggcagggaggacagtgggcctggtccttccccggccggcagagggagtcccgagatggaacgtccagctctcctctaacgaaaagcgtttgcatggctgtctcgccaattctgtacctcccggggctgaggaagagccgaggtgactagaagctagcgacaagtgccggccacctccgacgccaggcgccgggcttggagcccgacgggccgaattctcgcgagagcggccgccgccatttttccattgattgcagcgggctgggggaggggccgacgacgaaggcggctgtggtagcggcggcggcggcggcggagccctgggtcggtgtctgcgcgctggtgtctgaggcccaggctgaggcctccgctattgctggagcgcaggcggcggagaggatgactgccgctgccattctctcttgagctagcgagccgccgccaccctccaccctcccccggcagggcggagaggagcggccggagtcagcgatggtgcccggcgaggagaaccaactggtcccgaaagaggcaccactggatcataccagtgacaagtcacttctcgacgctaattttgagccaggaaagaagaactttctgcatttgacagataaagatggtgaacaacctcaaatactgctggaggattccagtgctggggaagacagtgttcatgacaggtttataggtccgcttccaagagaaggttctgggggttctaccagtgattatgtcagccaaagctactcctactcatctattttgaataaatcagaaactggatatgtgggactagtaaaccaagcaatgacttgctatttgaatagccttttgcaaacactttttatgactcctgaatttaggaatgcattatataagtgggaatttgaagaatctgaagaagatccagtgacaagtattccataccaacttcaaaggctttttgttttgttacaaaccagcaaaaagagagcaattgaaaccacagatgttacaaggagctttggatgggatagtagtgaggcttggcagcagcatgatgtacaagaactatgcagagtcatgtttgatgctttggaacagaaatggaagcaaacagaacaggctgatcttataaatgagctatatcaaggcaagctgaaggactacgtgagatgtctggaatgtggttatgagggctggcgaatcgacacatatcttgatattccattggtcatccgaccttatgggtccagccaagcatttgctagtgtggaagaagcattgcatgcatttattcagccagagattctggatggcccaaatcagtatttttgtgaacgttgtaagaagaagtgtgatgcacggaagggccttcggtttttgcattttccttatctgctgaccttacagctgaaaagattcgattttgattatacaaccatgcataggattaaactgaatgatcgaatgacatttcccgaggaactagatatgagtacttttattgatgttgaagatgagaaatctcctcagactgaaagttgcactgacagtggagcagaaaatgaaggtagttgtcacagtgatcagatgagcaacgatttctccaatgatgatggtgttgatgaaggaatctgtcttgaaaccaatagtggaactgaaaagatctcaaaatctggacttgaaaagaattccttgatctatgaacttttctctgttatggttcattctgggagcgctgctggtggtcattattatgcatgtataaagtcattcagtgatgagcagtggtacagcttcaatgatcaacatgtcagcaggataacacaagaggacattaagaaaacacatggtggatcttcaggaagcagaggatattattctagtgctttcgcaagttccacaaatgcatatatgctgatctatagactgaaggatccagccagaaatgcaaaatttctagaagtggatgaatacccagaacatattaaaaacttggtgcagaaagagagagagttggaagaacaagaaaagagacaacgagaaattgagcgcaatacatgcaagataaaattattctgtttgcatcctacaaaacaagtaatgatggaaaataaattggaggttcataaggataagacattaaaggaagcagtagaaatggcttataagatgatggatttagaagaggtaatacccctggattgctgtcgccttgttaaatatgatgagtttcatgattatctagaacggtcatatgaaggagaagaagatacaccaatggggcttctactaggtggcgtcaagtcaacatatatgtttgatctgctgttggagacgagaaagcctgatcaggttttccaatcttataaacctggagaagtgatggtgaaagttcatgttgttgatctaaaggcagaatctgtagctgctcctataactgttcgtgcttacttaaatcagacagttacagaattcaaacaactgatttcaaaggccatccatttacctgctgaaacaatgagaatagtgctggaacgctgctacaatgatttgcgtcttctcagtgtctccagtaaaaccctgaaagctgaaggattttttagaagtaacaaggtgtttgttgaaagctccgagactttggattaccagatggcctttgcagactctcatttatggaaactcctggatcggcatgcaaatacaatcagattatttgttttgctacctgaacaatccccagtatcttattccaaaaggacagcataccagaaagctggaggcgattctggtaatgtggatgatgactgtgaaagagtcaaaggacctgtaggaagcctaaagtctgtggaagctattctagaagaaagcactgaaaaactcaaaagcttgtcactgcagcaacagcaggatggagataatggggacagcagcaaaagtactgagacaagtgactttgaaaacatcgaatcacctctcaatgagagggactcttcagcatcagtggataatagagaacttgaacagcatattcagacttctgatccagaaaattttcagtctgaagaacgatcagactcagatgtgaataatgacaggagtacaagttcagtggacagtgatattcttagctccagtcatagcagtgatactttgtgcaatgcagacaatgctcagatccctttggctaatggacttgactctcacagtatcacaagtagtagaagaacgaaagcaaatgaagggaaaaaagaaacatgggatacagcagaagaagactctggaactgatagtgaatatgatgagagtggcaagagtaggggagaaatgcagtacatgtatttcaaagctgaaccttatgctgcagatgaaggttctggggaaggacataaatggttgatggtgcatgttgataaaagaattactctggcagctttcaaacaacatttagagccctttgttggagttttgtcctctcacttcaaggtctttcgagtgtatgccagcaatcaagagtttgagagcgtccggctgaatgagacactttcatcattttctgatgacaataagattacaattagactggggagagcacttaaaaaaggagaatacagagttaaagtataccagcttttggtcaatgaacaagagccatgcaagtttctgctagatgctgtgtttgctaaaggaatgactgtacggcaatcaaaagaggaattaattcctcagctcagggagcaatgtggtttagagctcagtattgacaggtttcgtctaaggaaaaaaacatggaagaatcctggcactgtctttttggattatcatatttatgaagaagatattaatatttccagcaactgggaggttttccttgaagttcttgatggggtagagaagatgaagtccatgtcacagcttgcagttttgtcaagacggtggaagccttcagagatgaagttggatcccttccaggaggttgtattggaaagcagtagtgtggacgaattgcgagagaagcttagtgaaatcagtgggattcctttggatgatattgaatttgctaagggtagaggaacatttccctgtgatatttctgtccttgatattcatcaggatttagactggaatcctaaagtttctaccctgaatgtctggcctctttatatctgtgatgatggtgcggtcatattttatagggataaaacagaagaattaatggaattgacagatgagcaaagaaatgaactgatgaaaaaagaaagcagtcgactccagaagactggacatcgtgtaacatactcacctcgtaaagagaaagcactaaaaatatatctggatggagcaccaaataaagatctgactcaagactgactctgatagtgtagcattttccctgggggagttttggttttaattagatggttcactaccactgggtagtgccattttggccggacatggttggggtaacccagtgacaccagcactgattggactgccctacaccaatcagaagctcagtgcccaatgggccactgttttgactcggaatcatgttgtgcactatagtcaaatgtactgtaaagtgaaaagggatgtgcaaaaaaataaaaaaaaacaacaaaaaaagctaaccttctattagaaaaggggacaggggaatgagtaaacttcttttattgcggacaaatgtgcacatagccgctagtaaaactagcctcaaacaggatgctcatagcttaataataaaagctgtgcaaaggccatg

SEQ ID NO: 3346 - protein, 1287 aa, Homosapiens; identical to SEQ ID NO: 452

SEQ ID NO: 3347 - DNA, 5401 bp, Homosapiens
agaggggaaaagaacgtcaggagagtgaacgggagcaaataaaacgctgtccattctgactggaagggccagagccgtgtctaagggcgggggccgggaggtggcccgcggtggtgtctctaccaggacgaggcctggggtatctgaagaggggatgacgtccaggcgctttgctaaagggaagccagaagggtatgagttgctagggtcagagatggggctttcggctcgagtctttccctgcagggcagagagtccgaagagcccgagaaggcagggaggacagtgggcctggtccttccccggccggcagagggagtcccgagatggaacgtccagctctcctctaacgaaaagcgtttgcatggctgtctcgccaattctgtacctcccggggctgaggaagagccgaggtgactagaagctagcgacaagtgccggccacctccgacgccaggcgccgggcttggagcccgacgggccgaattctcgcgagagcggccgccgccatttttccattgattgcagcgggctgggggaggggccgacgacgaaggcggctgtggtagcggcggcggcggcggcggagccctgggtcggtgtctgcgcgctggtgtctgaggcccaggctgaggcctccgctattgctggagcgcaggcggcggagaggatgactgccgctgccattctctcttgagctagcgagccgccgccaccctccaccctcccccggcagggcggagaggagcggccggagtcagcgatggtgcccggcgaggagaaccaactggtcccgaaagaggcaccactggatcataccagtgacaagtcacttctcgacgctaattttgagccaggaaagaagaactttctgcatttgacagataaagatggtgaacaacctcaaatactgctggaggattccagtgctggggaagacagtgttcatgacaggtttataggtccgcttccaagagaaggttctgggggttctaccagtgattatgtcagccaaagctactcctactcatctattttgaataaatcagaaactggatatgtgggactagtaaaccaagcaatgacttgctatttgaatagccttttgcaaacactttttatgactcctgaatttaggaatgcattatataagtgggaatttgaagaatctgaagaagatccagtgacaagtattccataccaacttcaaaggctttttgttttgttacaaaccagcaaaaagagagcaattgaaaccacagatgttacaaggagctttggatgggatagtagtgaggcttggcagcagcatgatgtacaagaactatgcagagtcatgtttgatgctttggaacagaaatggaagcaaacagaacaggctgatcttataaatgagctatatcaaggcaagctgaaggactacgtgagatgtctggaatgtggttatgagggctggcgaatcgacacatatcttgatattccattggtcatccgaccttatgggtccagccaagcatttgctagtgtggaagaagcattgcatgcatttattcagccagagattctggatggcccaaatcagtatttttgtgaacgttgtaagaagaagtgtgatgcacggaagggccttcggtttttgcattttccttatctgctgaccttacagctgaaaagattcgattttgattatacaaccatgcataggattaaactgaatgatcgaatgacatttcccgaggaactagatatgagtacttttattgatgttgaagatgagaaatctcctcagactgaaagttgcactgacagtggagcagaaaatgaaggtagttgtcacagtgatcagatgagcaacgatttctccaatgatgatggtgttgatgaaggaatctgtcttgaaaccaatagtggaactgaaaagatctcaaaatctggacttgaaaagaattccttgatctatgaacttttctctgttatggttcattctgggagcgctgctggtggtcattattatgcatgtataaagtcattcagtgatgagcagtggtacagcttcaatgatcaacatgtcagcaggataacacaagaggacattaagaaaacacatggtggatcttcaggaagcagaggatattattctagtgctttcgcaagttccacaaatgcatatatgctgatctatagactgaaggatccagccagaaatgcaaaatttctagaagtggatgaatacccagaacatattaaaaacttggtgcagaaagagagagagttggaagaacaagaaaagagacaacgagaaattgagcgcaatacatgcaagataaaattattctgtttgcatcctacaaaacaagtaatgatggaaaataaattggaggttcataaggataagacattaaaggaagcagtagaaatggcttataagatgatggatttagaagaggtaatacccctggattgctgtcgccttgttaaatatgatgagtttcatgattatctagaacggtcatatgaaggagaagaagatacaccaatggggcttctactaggtggcgtcaagtcaacatatatgtttgatctgctgttggagacgagaaagcctgatcaggttttccaatcttataaacctggagaagtgatggtgaaagttcatgttgttgatctaaaggcagaatctgtagctgctcctataactgttcgtgcttacttaaatcagacagttacagaattcaaacaactgatttcaaaggccatccatttacctgctgaaacaatgagaatagtgctggaacgctgctacaatgatttgcgtcttctcagtgtctccagtaaaaccctgaaagctgaaggattttttagaagtaacaaggtgtttgttgaaagctccgagactttggattaccagatggcctttgcagactctcatttatggaaactcctggatcggcatgcaaatacaatcagattatttgttttgctacctgaacaatccccagtatcttattccaaaaggacagcataccagaaagctggaggcgattctggtaatgtggatgatgactgtgaaagagtcaaaggacctgtaggaagcctaaagtctgtggaagctattctagaagaaagcactgaaaaactcaaaagcttgtcactgcagcaacagcaggatggagataatggggacagcagcaaaagtactgagacaagtgactttgaaaacatcgaatcacctctcaatgagagggactcttcagcatcagtggataatagagaacttgaacagcatattcagacttctgatccagaaaattttcagtctgaagaacgatcagactcagatgtgaataatgacaggagtacaagttcagtggacagtgatattcttagctccagtcatagcagtgatactttgtgcaatgcagacaatgctcagatccctttggctaatggacttgactctcacagtatcacaagtagtagaagaacgaaagcaaatgaagggaaaaaagaaacatgggatacagcagaagaagactctggaactgatagtgaatatgatgagagtggcaagagtaggggagaaatgcagtacatgtatttcaaagctgaaccttatgctgcagatgaaggttctggggaaggacataaatggttgatggtgcatgttgataaaagaattactctggcagctttcaaacaacatttagagccctttgttggagttttgtcctctcacttcaaggtctttcgagtgtatgccagcaatcaagagtttgagagcgtccggctgaatgagacactttcatcattttctgatgacaataagattacaattagactggggagagcacttaaaaaaggagaatacagagttaaagtataccagcttttggtcaatgaacaagagccatgcaagtttctgctagatgctgtgtttgctaaaggaatgactgtacggcaatcaaaagaggaattaattcctcagctcagggagcaatgtggtttagagctcagtattgacaggtttcgtctaaggaaaaaaacatggaagaatcctggcactgtctttttggattatcatatttatgaagaagatattaatatttccagcaactgggaggttttccttgaagttcttgatggggtagagaagatgaagtccatgtcacagcttgcagttttgtcaagacggtggaagccttcagagatgaagttggatcccttccaggaggttgtattggaaagcagtagtgtggacgaattgcgagagaagcttagtgaaatcagtgggattcctttggatgatattgaatttgctaagggtagaggaacatttccctgtgatatttctgtccttgatattcatcaggatttagactggaatcctaaagtttctaccctgaatgtctggcctctttatatctgtgatgatggtgcggtcatattttatagggataaaacagaagaattaatggaattgacagatgagcaaagaaatgaactgatgaaaaaagaaagcagtcgactccagaagactggacatcgtgtaacatactcacctcgtaaagagaaagcactaaaaatatatctggatggagcaccaaataaagatctgactcaagactgactctgatagtgtagcattttccctgggggagttttggttttaattagatggttcactaccactgggtagtgccattttggccggacatggttggggtaacccagtgacaccagcactgattggactgccctacaccaatcagaagctcagtgcccaatgggccactgttttgactcggaatcatgttgtgcactatagtcaaatgtactgtaaagtgaaaagggatgtgcaaaaaaataaaaaaaaacaacaaaaaaagctaaccttctattagaaaaggggacaggggaatgagtaaacttcttttattgcggacaaatgtgcacatagccgctagtaaaactagcctcaaacaggatgctcatagcttaataataaaagctgtgcaaaggccatgaatgaatgaattttctgtttatttcactgatgcacacattacctcattgacaattcagaagtaaatccaacgtgtgttgactcttggaaagcagcaaaaacaggagctgaagaaaagaaattcttggaaccagccgtaacccagtaaggaattgtgaagttgtgtttttattttgtttcattttttgcagagtattaagaacattattctggaacatcagaacgtttcccttagaccgatcccagcaggtggcagctcagattgctgcagtgttgtaattataactgattgtacttaagttatggatgtagagaatatgtttcattcatttattcagcatgtaaataaaattgatcctgttgagttatcataattgc

SEQ ID NO: 3348 - protein, 1287 aa, Homosapiens; identical to SEQ ID NO: 452

SEQ ID NO: 3349 - DNA, 5976 bp, Homosapiens
agaggggaaaagaacgtcaggagagtgaacgggagcaaataaaacgctgtccattctgactggaagggccagagccgtgtctaagggcgggggccgggaggtggcccgcggtggtgtctctaccaggacgaggcctggggtatctgaagaggggatgacgtccaggcgctttgctaaagggaagccagaagggtatgagttgctagggtcagagatggggctttcggctcgagtctttccctgcagggcagagagtccgaagagcccgagaaggcagggaggacagtgggcctggtccttccccggccggcagagggagtcccgagatggaacgtccagctctcctctaacgaaaagcgtttgcatggctgtctcgccaattctgtacctcccggggctgaggaagagccgaggtgactagaagctagcgacaagtgccggccacctccgacgccaggcgccgggcttggagcccgacgggccgaattctcgcgagagcggccgccgccatttttccattgattgcagcgggctgggggaggggccgacgacgaaggcggctgtggtagcggcggcggcggcggcggagccctgggtcggtgtctgcgcgctggtgtctgaggcccaggctgaggcctccgctattgctggagcgcaggcggcggagaggatgactgccgctgccattctctcttgagctagcgagccgccgccaccctccaccctcccccggcagggcggagaggagcggccggagtcagcgatggtgcccggcgaggagaaccaactggtcccgaaagaggcaccactggatcataccagtgacaagtcacttctcgacgctaattttgagccaggaaagaagaactttctgcatttgacagataaagatggtgaacaacctcaaatactgctggaggattccagtgctggggaagacagtgttcatgacaggtttataggtccgcttccaagagaaggttctgggggttctaccagtgattatgtcagccaaagctactcctactcatctattttgaataaatcagaaactggatatgtgggactagtaaaccaagcaatgacttgctatttgaatagccttttgcaaacactttttatgactcctgaatttaggaatgcattatataagtgggaatttgaagaatctgaagaagatccagtgacaagtattccataccaacttcaaaggctttttgttttgttacaaaccagcaaaaagagagcaattgaaaccacagatgttacaaggagctttggatgggatagtagtgaggcttggcagcagcatgatgtacaagaactatgcagagtcatgtttgatgctttggaacagaaatggaagcaaacagaacaggctgatcttataaatgagctatatcaaggcaagctgaaggactacgtgagatgtctggaatgtggttatgagggctggcgaatcgacacatatcttgatattccattggtcatccgaccttatgggtccagccaagcatttgctagtgtggaagaagcattgcatgcatttattcagccagagattctggatggcccaaatcagtatttttgtgaacgttgtaagaagaagtgtgatgcacggaagggccttcggtttttgcattttccttatctgctgaccttacagctgaaaagattcgattttgattatacaaccatgcataggattaaactgaatgatcgaatgacatttcccgaggaactagatatgagtacttttattgatgttgaagatgagaaatctcctcagactgaaagttgcactgacagtggagcagaaaatgaaggtagttgtcacagtgatcagatgagcaacgatttctccaatgatgatggtgttgatgaaggaatctgtcttgaaaccaatagtggaactgaaaagatctcaaaatctggacttgaaaagaattccttgatctatgaacttttctctgttatggttcattctgggagcgctgctggtggtcattattatgcatgtataaagtcattcagtgatgagcagtggtacagcttcaatgatcaacatgtcagcaggataacacaagaggacattaagaaaacacatggtggatcttcaggaagcagaggatattattctagtgctttcgcaagttccacaaatgcatatatgctgatctatagactgaaggatccagccagaaatgcaaaatttctagaagtggatgaatacccagaacatattaaaaacttggtgcagaaagagagagagttggaagaacaagaaaagagacaacgagaaattgagcgcaatacatgcaagataaaattattctgtttgcatcctacaaaacaagtaatgatggaaaataaattggaggttcataaggataagacattaaaggaagcagtagaaatggcttataagatgatggatttagaagaggtaatacccctggattgctgtcgccttgttaaatatgatgagtttcatgattatctagaacggtcatatgaaggagaagaagatacaccaatggggcttctactaggtggcgtcaagtcaacatatatgtttgatctgctgttggagacgagaaagcctgatcaggttttccaatcttataaacctggagaagtgatggtgaaagttcatgttgttgatctaaaggcagaatctgtagctgctcctataactgttcgtgcttacttaaatcagacagttacagaattcaaacaactgatttcaaaggccatccatttacctgctgaaacaatgagaatagtgctggaacgctgctacaatgatttgcgtcttctcagtgtctccagtaaaaccctgaaagctgaaggattttttagaagtaacaaggtgtttgttgaaagctccgagactttggattaccagatggcctttgcagactctcatttatggaaactcctggatcggcatgcaaatacaatcagattatttgttttgctacctgaacaatccccagtatcttattccaaaaggacagcataccagaaagctggaggcgattctggtaatgtggatgatgactgtgaaagagtcaaaggacctgtaggaagcctaaagtctgtggaagctattctagaagaaagcactgaaaaactcaaaagcttgtcactgcagcaacagcaggatggagataatggggacagcagcaaaagtactgagacaagtgactttgaaaacatcgaatcacctctcaatgagagggactcttcagcatcagtggataatagagaacttgaacagcatattcagacttctgatccagaaaattttcagtctgaagaacgatcagactcagatgtgaataatgacaggagtacaagttcagtggacagtgatattcttagctccagtcatagcagtgatactttgtgcaatgcagacaatgctcagatccctttggctaatggacttgactctcacagtatcacaagtagtagaagaacgaaagcaaatgaagggaaaaaagaaacatgggatacagcagaagaagactctggaactgatagtgaatatgatgagagtggcaagagtaggggagaaatgcagtacatgtatttcaaagctgaaccttatgctgcagatgaaggttctggggaaggacataaatggttgatggtgcatgttgataaaagaattactctggcagctttcaaacaacatttagagccctttgttggagttttgtcctctcacttcaaggtctttcgagtgtatgccagcaatcaagagtttgagagcgtccggctgaatgagacactttcatcattttctgatgacaataagattacaattagactggggagagcacttaaaaaaggagaatacagagttaaagtataccagcttttggtcaatgaacaagagccatgcaagtttctgctagatgctgtgtttgctaaaggaatgactgtacggcaatcaaaagaggaattaattcctcagctcagggagcaatgtggtttagagctcagtattgacaggtttcgtctaaggaaaaaaacatggaagaatcctggcactgtctttttggattatcatatttatgaagaagatattaatatttccagcaactgggaggttttccttgaagttcttgatggggtagagaagatgaagtccatgtcacagcttgcagttttgtcaagacggtggaagccttcagagatgaagttggatcccttccaggaggttgtattggaaagcagtagtgtggacgaattgcgagagaagcttagtgaaatcagtgggattcctttggatgatattgaatttgctaagggtagaggaacatttccctgtgatatttctgtccttgatattcatcaggatttagactggaatcctaaagtttctaccctgaatgtctggcctctttatatctgtgatgatggtgcggtcatattttatagggataaaacagaagaattaatggaattgacagatgagcaaagaaatgaactgatgaaaaaagaaagcagtcgactccagaagactggacatcgtgtaacatactcacctcgtaaagagaaagcactaaaaatatatctggatggagcaccaaataaagatctgactcaagactgactctgatagtgtagcattttccctgggggagttttggttttaattagatggttcactaccactgggtagtgccattttggccggacatggttggggtaacccagtgacaccagcactgattggactgccctacaccaatcagaagctcagtgcccaatgggccactgttttgactcggaatcatgttgtgcactatagtcaaatgtactgtaaagtgaaaagggatgtgcaaaaaaataaaaaaaaacaacaaaaaaagctaaccttctattagaaaaggggacaggggaatgagtaaacttcttttattgcggacaaatgtgcacatagccgctagtaaaactagcctcaaacaggatgctcatagcttaataataaaagctgtgcaaaggccatgaatgaatgaattttctgtttatttcactgatgcacacattacctcattgacaattcagaagtaaatccaacgtgtgttgactcttggaaagcagcaaaaacaggagctgaagaaaagaaattcttggaaccagccgtaacccagtaaggaattgtgaagttgtgtttttattttgtttcattttttgcagagtattaagaacattattctggaacatcagaacgtttcccttagaccgatcccagcaggtggcagctcagattgctgcagtgttgtaattataactgattgtacttaagttatggatgtagagaatatgtttcattcatttattcagcatgtaaataaaattgatcctgttgagttatcataattgcagttcaactatctgccatgattattcttttcacgtatcattcattctgtacatttgtgtacattgagaagtatagcaatctatgtaaatgtaatcctcagtgaggttcctcagtgctaggtcccataggattgtcgttgcccttgttaatgaggtttctctgttcagcggcttcaatttttttctctttgtacatctagttttgaagatttacttcaagtttgaatcttctagaatgcttgtaagtccagttttaatttttagagtcaatttgtagttacatgtagtttaacttttgggaaacgtcttaacattgttctgaataaacttgctaatgaggtcaggtcatggtacagactgatgcagtcaacatgatttcattgcagagtttattagtatcagcaagtttttgctttgctaaataaaagtactcaatgaacacaattctacataaattttgacataccatctaatttataaaaatcaataaaaaaggttttggtaaaactttttcatgccagatgctgtttacaacaatgaacatgccaataaaacatttgttcattctgttgtgtt

SEQ ID NO: 3350 - protein, 1287 aa, Homosapiens; identical to SEQ ID NO: 452

SEQ ID NO: 3351 - DNA, 7605 bp, Homosapiens
agaggggaaaagaacgtcaggagagtgaacgggagcaaataaaacgctgtccattctgactggaagggccagagccgtgtctaagggcgggggccgggaggtggcccgcggtggtgtctctaccaggacgaggcctggggtatctgaagaggggatgacgtccaggcgctttgctaaagggaagccagaagggtatgagttgctagggtcagagatggggctttcggctcgagtctttccctgcagggcagagagtccgaagagcccgagaaggcagggaggacagtgggcctggtccttccccggccggcagagggagtcccgagatggaacgtccagctctcctctaacgaaaagcgtttgcatggctgtctcgccaattctgtacctcccggggctgaggaagagccgaggtgactagaagctagcgacaagtgccggccacctccgacgccaggcgccgggcttggagcccgacgggccgaattctcgcgagagcggccgccgccatttttccattgattgcagcgggctgggggaggggccgacgacgaaggcggctgtggtagcggcggcggcggcggcggagccctgggtcggtgtctgcgcgctggtgtctgaggcccaggctgaggcctccgctattgctggagcgcaggcggcggagaggatgactgccgctgccattctctcttgagctagcgagccgccgccaccctccaccctcccccggcagggcggagaggagcggccggagtcagcgatggtgcccggcgaggagaaccaactggtcccgaaagaggcaccactggatcataccagtgacaagtcacttctcgacgctaattttgagccaggaaagaagaactttctgcatttgacagataaagatggtgaacaacctcaaatactgctggaggattccagtgctggggaagacagtgttcatgacaggtttataggtccgcttccaagagaaggttctgggggttctaccagtgattatgtcagccaaagctactcctactcatctattttgaataaatcagaaactggatatgtgggactagtaaaccaagcaatgacttgctatttgaatagccttttgcaaacactttttatgactcctgaatttaggaatgcattatataagtgggaatttgaagaatctgaagaagatccagtgacaagtattccataccaacttcaaaggctttttgttttgttacaaaccagcaaaaagagagcaattgaaaccacagatgttacaaggagctttggatgggatagtagtgaggcttggcagcagcatgatgtacaagaactatgcagagtcatgtttgatgctttggaacagaaatggaagcaaacagaacaggctgatcttataaatgagctatatcaaggcaagctgaaggactacgtgagatgtctggaatgtggttatgagggctggcgaatcgacacatatcttgatattccattggtcatccgaccttatgggtccagccaagcatttgctagtgtggaagaagcattgcatgcatttattcagccagagattctggatggcccaaatcagtatttttgtgaacgttgtaagaagaagtgtgatgcacggaagggccttcggtttttgcattttccttatctgctgaccttacagctgaaaagattcgattttgattatacaaccatgcataggattaaactgaatgatcgaatgacatttcccgaggaactagatatgagtacttttattgatgttgaagatgagaaatctcctcagactgaaagttgcactgacagtggagcagaaaatgaaggtagttgtcacagtgatcagatgagcaacgatttctccaatgatgatggtgttgatgaaggaatctgtcttgaaaccaatagtggaactgaaaagatctcaaaatctggacttgaaaagaattccttgatctatgaacttttctctgttatggttcattctgggagcgctgctggtggtcattattatgcatgtataaagtcattcagtgatgagcagtggtacagcttcaatgatcaacatgtcagcaggataacacaagaggacattaagaaaacacatggtggatcttcaggaagcagaggatattattctagtgctttcgcaagttccacaaatgcatatatgctgatctatagactgaaggatccagccagaaatgcaaaatttctagaagtggatgaatacccagaacatattaaaaacttggtgcagaaagagagagagttggaagaacaagaaaagagacaacgagaaattgagcgcaatacatgcaagataaaattattctgtttgcatcctacaaaacaagtaatgatggaaaataaattggaggttcataaggataagacattaaaggaagcagtagaaatggcttataagatgatggatttagaagaggtaatacccctggattgctgtcgccttgttaaatatgatgagtttcatgattatctagaacggtcatatgaaggagaagaagatacaccaatggggcttctactaggtggcgtcaagtcaacatatatgtttgatctgctgttggagacgagaaagcctgatcaggttttccaatcttataaacctggagaagtgatggtgaaagttcatgttgttgatctaaaggcagaatctgtagctgctcctataactgttcgtgcttacttaaatcagacagttacagaattcaaacaactgatttcaaaggccatccatttacctgctgaaacaatgagaatagtgctggaacgctgctacaatgatttgcgtcttctcagtgtctccagtaaaaccctgaaagctgaaggattttttagaagtaacaaggtgtttgttgaaagctccgagactttggattaccagatggcctttgcagactctcatttatggaaactcctggatcggcatgcaaatacaatcagattatttgttttgctacctgaacaatccccagtatcttattccaaaaggacagcataccagaaagctggaggcgattctggtaatgtggatgatgactgtgaaagagtcaaaggacctgtaggaagcctaaagtctgtggaagctattctagaagaaagcactgaaaaactcaaaagcttgtcactgcagcaacagcaggatggagataatggggacagcagcaaaagtactgagacaagtgactttgaaaacatcgaatcacctctcaatgagagggactcttcagcatcagtggataatagagaacttgaacagcatattcagacttctgatccagaaaattttcagtctgaagaacgatcagactcagatgtgaataatgacaggagtacaagttcagtggacagtgatattcttagctccagtcatagcagtgatactttgtgcaatgcagacaatgctcagatccctttggctaatggacttgactctcacagtatcacaagtagtagaagaacgaaagcaaatgaagggaaaaaagaaacatgggatacagcagaagaagactctggaactgatagtgaatatgatgagagtggcaagagtaggggagaaatgcagtacatgtatttcaaagctgaaccttatgctgcagatgaaggttctggggaaggacataaatggttgatggtgcatgttgataaaagaattactctggcagctttcaaacaacatttagagccctttgttggagttttgtcctctcacttcaaggtctttcgagtgtatgccagcaatcaagagtttgagagcgtccggctgaatgagacactttcatcattttctgatgacaataagattacaattagactggggagagcacttaaaaaaggagaatacagagttaaagtataccagcttttggtcaatgaacaagagccatgcaagtttctgctagatgctgtgtttgctaaaggaatgactgtacggcaatcaaaagaggaattaattcctcagctcagggagcaatgtggtttagagctcagtattgacaggtttcgtctaaggaaaaaaacatggaagaatcctggcactgtctttttggattatcatatttatgaagaagatattaatatttccagcaactgggaggttttccttgaagttcttgatggggtagagaagatgaagtccatgtcacagcttgcagttttgtcaagacggtggaagccttcagagatgaagttggatcccttccaggaggttgtattggaaagcagtagtgtggacgaattgcgagagaagcttagtgaaatcagtgggattcctttggatgatattgaatttgctaagggtagaggaacatttccctgtgatatttctgtccttgatattcatcaggatttagactggaatcctaaagtttctaccctgaatgtctggcctctttatatctgtgatgatggtgcggtcatattttatagggataaaacagaagaattaatggaattgacagatgagcaaagaaatgaactgatgaaaaaagaaagcagtcgactccagaagactggacatcgtgtaacatactcacctcgtaaagagaaagcactaaaaatatatctggatggagcaccaaataaagatctgactcaagactgactctgatagtgtagcattttccctgggggagttttggttttaattagatggttcactaccactgggtagtgccattttggccggacatggttggggtaacccagtgacaccagcactgattggactgccctacaccaatcagaagctcagtgcccaatgggccactgttttgactcggaatcatgttgtgcactatagtcaaatgtactgtaaagtgaaaagggatgtgcaaaaaaataaaaaaaaacaacaaaaaaagctaaccttctattagaaaaggggacaggggaatgagtaaacttcttttattgcggacaaatgtgcacatagccgctagtaaaactagcctcaaacaggatgctcatagcttaataataaaagctgtgcaaaggccatgaatgaatgaattttctgtttatttcactgatgcacacattacctcattgacaattcagaagtaaatccaacgtgtgttgactcttggaaagcagcaaaaacaggagctgaagaaaagaaattcttggaaccagccgtaacccagtaaggaattgtgaagttgtgtttttattttgtttcattttttgcagagtattaagaacattattctggaacatcagaacgtttcccttagaccgatcccagcaggtggcagctcagattgctgcagtgttgtaattataactgattgtacttaagttatggatgtagagaatatgtttcattcatttattcagcatgtaaataaaattgatcctgttgagttatcataattgcagttcaactatctgccatgattattcttttcacgtatcattcattctgtacatttgtgtacattgagaagtatagcaatctatgtaaatgtaatcctcagtgaggttcctcagtgctaggtcccataggattgtcgttgcccttgttaatgaggtttctctgttcagcggcttcaatttttttctctttgtacatctagttttgaagatttacttcaagtttgaatcttctagaatgcttgtaagtccagttttaatttttagagtcaatttgtagttacatgtagtttaacttttgggaaacgtcttaacattgttctgaataaacttgctaatgaggtcaggtcatggtacagactgatgcagtcaacatgatttcattgcagagtttattagtatcagcaagtttttgctttgctaaataaaagtactcaatgaacacaattctacataaattttgacataccatctaatttataaaaatcaataaaaaaggttttggtaaaactttttcatgccagatgctgtttacaacaatgaacatgccaataaaacatttgttcattctgttgtgttattttagtcattaaacttctgtggatgaagaatctgggttaagaatagatttgtcatctttaaatatgacattttgtaatgtgtattggatatctcatttctatgataaaggtatatttacagtaaagttctcataagagaaatgaaaagctgtgttaatatctaactttggggaaccctgtcagtatttcagatccgatttttaccctttttttcttataagaaagataaaattagaaaatactgttagcaaatgtggctctgccatttgaatataatcaccgagaattccatgtcttaaaagtctcctggaatccacaatgaaaaaaaaaatcttttctaaggtatttttctggctaatttttatttgaagaaagctatagcatttagcgaaatttgactgaagtaatgttctgagtttgcattagtgggattggtgatgttctcagaagaaaattggaaacacttgtgatgaattgtctttcagatcacttagattttctgatgtaagaggacagctgtttggttctgatacaggcctgcttacttgggatgtagggttagtaaatggggtttctgctttaaaggactgacttgctatcacacaaaagaggcagacttgtaaacacaatgggctttggagtttggtctgattgggtttggtttagtattcctatgagcgtaaatggtaaaattcttctgatacccactctttagactgtgccttctgctctgttctttgttttatgtttaactgctgtttctaattgcaggtgtattacagatacaaataagagtaaagaaaatatatttcattatagaaaagaaaaaattaaaagcttcttgcttttcagtgcctgatagagtgaaaacacaaagttgcactttaataatttcaataaaagctaatctgtgtcagcctccctctgcttcagagagtcaggtgagcatccataacctaacaggcagagccctagcgatgtggatcaagtttcctgagcccgggggcggtggagcctcatgatctcttatcttttgaggctgaggcaggtcacatgcaacaaattgtgaccctgctccccacaagtcatgcaaaggttttgaagagcttttaccgtggggcagatgaacttgtgtcaaccatgcacaccctgtgagaaccaagtacctgtgtttctaaggcgggcactcaaggtgaggggtgcattctggccaaagaaacaaaagctgtggtttcaggaccatgccgtgtgtagctgatctgtacgggacgtgtatgtaaggaagagcaatcatgatagataagaacagtgtgtgaagcagccttcacactagagtgtttggtcatctcttataatgtaagggaaggtactttaaaattctgggaagatgcgatgaactcatgtcccagtcagaaaataatccaatgaaataagcattggttgccaggccacagttaggaattgtattgtgatacatctagaggccaagagagcaggagagagctaccaacttacactgtggtttaagctaaatgaccgcacagcatcatagcattgcagtgttgttactaaatctggaagtgacctgtgaatgtatggaatacaataaagtcttttattctggttc

SEQ ID NO: 3352 - protein, 1287 aa, Homosapiens; identical to SEQ ID NO: 452

SEQ ID NO: 3353 - DNA, 7778 bp, Homosapiens
agaggggaaaagaacgtcaggagagtgaacgggagcaaataaaacgctgtccattctgactggaagggccagagccgtgtctaagggcgggggccgggaggtggcccgcggtggtgtctctaccaggacgaggcctggggtatctgaagaggggatgacgtccaggcgctttgctaaagggaagccagaagggtatgagttgctagggtcagagatggggctttcggctcgagtctttccctgcagggcagagagtccgaagagcccgagaaggcagggaggacagtgggcctggtccttccccggccggcagagggagtcccgagatggaacgtccagctctcctctaacgaaaagcgtttgcatggctgtctcgccaattctgtacctcccggggctgaggaagagccgaggtgactagaagctagcgacaagtgccggccacctccgacgccaggcgccgggcttggagcccgacgggccgaattctcgcgagagcggccgccgccatttttccattgattgcagcgggctgggggaggggccgacgacgaaggcggctgtggtagcggcggcggcggcggcggagccctgggtcggtgtctgcgcgctggtgtctgaggcccaggctgaggcctccgctattgctggagcgcaggcggcggagaggatgactgccgctgccattctctcttgagctagcgagccgccgccaccctccaccctcccccggcagggcggagaggagcggccggagtcagcgatggtgcccggcgaggagaaccaactggtcccgaaagaggcaccactggatcataccagtgacaagtcacttctcgacgctaattttgagccaggaaagaagaactttctgcatttgacagataaagatggtgaacaacctcaaatactgctggaggattccagtgctggggaagacagtgttcatgacaggtttataggtccgcttccaagagaaggttctgggggttctaccagtgattatgtcagccaaagctactcctactcatctattttgaataaatcagaaactggatatgtgggactagtaaaccaagcaatgacttgctatttgaatagccttttgcaaacactttttatgactcctgaatttaggaatgcattatataagtgggaatttgaagaatctgaagaagatccagtgacaagtattccataccaacttcaaaggctttttgttttgttacaaaccagcaaaaagagagcaattgaaaccacagatgttacaaggagctttggatgggatagtagtgaggcttggcagcagcatgatgtacaagaactatgcagagtcatgtttgatgctttggaacagaaatggaagcaaacagaacaggctgatcttataaatgagctatatcaaggcaagctgaaggactacgtgagatgtctggaatgtggttatgagggctggcgaatcgacacatatcttgatattccattggtcatccgaccttatgggtccagccaagcatttgctagtgtggaagaagcattgcatgcatttattcagccagagattctggatggcccaaatcagtatttttgtgaacgttgtaagaagaagtgtgatgcacggaagggccttcggtttttgcattttccttatctgctgaccttacagctgaaaagattcgattttgattatacaaccatgcataggattaaactgaatgatcgaatgacatttcccgaggaactagatatgagtacttttattgatgttgaagatgagaaatctcctcagactgaaagttgcactgacagtggagcagaaaatgaaggtagttgtcacagtgatcagatgagcaacgatttctccaatgatgatggtgttgatgaaggaatctgtcttgaaaccaatagtggaactgaaaagatctcaaaatctggacttgaaaagaattccttgatctatgaacttttctctgttatggttcattctgggagcgctgctggtggtcattattatgcatgtataaagtcattcagtgatgagcagtggtacagcttcaatgatcaacatgtcagcaggataacacaagaggacattaagaaaacacatggtggatcttcaggaagcagaggatattattctagtgctttcgcaagttccacaaatgcatatatgctgatctatagactgaaggatccagccagaaatgcaaaatttctagaagtggatgaatacccagaacatattaaaaacttggtgcagaaagagagagagttggaagaacaagaaaagagacaacgagaaattgagcgcaatacatgcaagataaaattattctgtttgcatcctacaaaacaagtaatgatggaaaataaattggaggttcataaggataagacattaaaggaagcagtagaaatggcttataagatgatggatttagaagaggtaatacccctggattgctgtcgccttgttaaatatgatgagtttcatgattatctagaacggtcatatgaaggagaagaagatacaccaatggggcttctactaggtggcgtcaagtcaacatatatgtttgatctgctgttggagacgagaaagcctgatcaggttttccaatcttataaacctggagaagtgatggtgaaagttcatgttgttgatctaaaggcagaatctgtagctgctcctataactgttcgtgcttacttaaatcagacagttacagaattcaaacaactgatttcaaaggccatccatttacctgctgaaacaatgagaatagtgctggaacgctgctacaatgatttgcgtcttctcagtgtctccagtaaaaccctgaaagctgaaggattttttagaagtaacaaggtgtttgttgaaagctccgagactttggattaccagatggcctttgcagactctcatttatggaaactcctggatcggcatgcaaatacaatcagattatttgttttgctacctgaacaatccccagtatcttattccaaaaggacagcataccagaaagctggaggcgattctggtaatgtggatgatgactgtgaaagagtcaaaggacctgtaggaagcctaaagtctgtggaagctattctagaagaaagcactgaaaaactcaaaagcttgtcactgcagcaacagcaggatggagataatggggacagcagcaaaagtactgagacaagtgactttgaaaacatcgaatcacctctcaatgagagggactcttcagcatcagtggataatagagaacttgaacagcatattcagacttctgatccagaaaattttcagtctgaagaacgatcagactcagatgtgaataatgacaggagtacaagttcagtggacagtgatattcttagctccagtcatagcagtgatactttgtgcaatgcagacaatgctcagatccctttggctaatggacttgactctcacagtatcacaagtagtagaagaacgaaagcaaatgaagggaaaaaagaaacatgggatacagcagaagaagactctggaactgatagtgaatatgatgagagtggcaagagtaggggagaaatgcagtacatgtatttcaaagctgaaccttatgctgcagatgaaggttctggggaaggacataaatggttgatggtgcatgttgataaaagaattactctggcagctttcaaacaacatttagagccctttgttggagttttgtcctctcacttcaaggtctttcgagtgtatgccagcaatcaagagtttgagagcgtccggctgaatgagacactttcatcattttctgatgacaataagattacaattagactggggagagcacttaaaaaaggagaatacagagttaaagtataccagcttttggtcaatgaacaagagccatgcaagtttctgctagatgctgtgtttgctaaaggaatgactgtacggcaatcaaaagaggaattaattcctcagctcagggagcaatgtggtttagagctcagtattgacaggtttcgtctaaggaaaaaaacatggaagaatcctggcactgtctttttggattatcatatttatgaagaagatattaatatttccagcaactgggaggttttccttgaagttcttgatggggtagagaagatgaagtccatgtcacagcttgcagttttgtcaagacggtggaagccttcagagatgaagttggatcccttccaggaggttgtattggaaagcagtagtgtggacgaattgcgagagaagcttagtgaaatcagtgggattcctttggatgatattgaatttgctaagggtagaggaacatttccctgtgatatttctgtccttgatattcatcaggatttagactggaatcctaaagtttctaccctgaatgtctggcctctttatatctgtgatgatggtgcggtcatattttatagggataaaacagaagaattaatggaattgacagatgagcaaagaaatgaactgatgaaaaaagaaagcagtcgactccagaagactggacatcgtgtaacatactcacctcgtaaagagaaagcactaaaaatatatctggatggagcaccaaataaagatctgactcaagactgactctgatagtgtagcattttccctgggggagttttggttttaattagatggttcactaccactgggtagtgccattttggccggacatggttggggtaacccagtgacaccagcactgattggactgccctacaccaatcagaagctcagtgcccaatgggccactgttttgactcggaatcatgttgtgcactatagtcaaatgtactgtaaagtgaaaagggatgtgcaaaaaaataaaaaaaaacaacaaaaaaagctaaccttctattagaaaaggggacaggggaatgagtaaacttcttttattgcggacaaatgtgcacatagccgctagtaaaactagcctcaaacaggatgctcatagcttaataataaaagctgtgcaaaggccatgaatgaatgaattttctgtttatttcactgatgcacacattacctcattgacaattcagaagtaaatccaacgtgtgttgactcttggaaagcagcaaaaacaggagctgaagaaaagaaattcttggaaccagccgtaacccagtaaggaattgtgaagttgtgtttttattttgtttcattttttgcagagtattaagaacattattctggaacatcagaacgtttcccttagaccgatcccagcaggtggcagctcagattgctgcagtgttgtaattataactgattgtacttaagttatggatgtagagaatatgtttcattcatttattcagcatgtaaataaaattgatcctgttgagttatcataattgcagttcaactatctgccatgattattcttttcacgtatcattcattctgtacatttgtgtacattgagaagtatagcaatctatgtaaatgtaatcctcagtgaggttcctcagtgctaggtcccataggattgtcgttgcccttgttaatgaggtttctctgttcagcggcttcaatttttttctctttgtacatctagttttgaagatttacttcaagtttgaatcttctagaatgcttgtaagtccagttttaatttttagagtcaatttgtagttacatgtagtttaacttttgggaaacgtcttaacattgttctgaataaacttgctaatgaggtcaggtcatggtacagactgatgcagtcaacatgatttcattgcagagtttattagtatcagcaagtttttgctttgctaaataaaagtactcaatgaacacaattctacataaattttgacataccatctaatttataaaaatcaataaaaaaggttttggtaaaactttttcatgccagatgctgtttacaacaatgaacatgccaataaaacatttgttcattctgttgtgttattttagtcattaaacttctgtggatgaagaatctgggttaagaatagatttgtcatctttaaatatgacattttgtaatgtgtattggatatctcatttctatgataaaggtatatttacagtaaagttctcataagagaaatgaaaagctgtgttaatatctaactttggggaaccctgtcagtatttcagatccgatttttaccctttttttcttataagaaagataaaattagaaaatactgttagcaaatgtggctctgccatttgaatataatcaccgagaattccatgtcttaaaagtctcctggaatccacaatgaaaaaaaaaatcttttctaaggtatttttctggctaatttttatttgaagaaagctatagcatttagcgaaatttgactgaagtaatgttctgagtttgcattagtgggattggtgatgttctcagaagaaaattggaaacacttgtgatgaattgtctttcagatcacttagattttctgatgtaagaggacagctgtttggttctgatacaggcctgcttacttgggatgtagggttagtaaatggggtttctgctttaaaggactgacttgctatcacacaaaagaggcagacttgtaaacacaatgggctttggagtttggtctgattgggtttggtttagtattcctatgagcgtaaatggtaaaattcttctgatacccactctttagactgtgccttctgctctgttctttgttttatgtttaactgctgtttctaattgcaggtgtattacagatacaaataagagtaaagaaaatatatttcattatagaaaagaaaaaattaaaagcttcttgcttttcagtgcctgatagagtgaaaacacaaagttgcactttaataatttcaataaaagctaatctgtgtcagcctccctctgcttcagagagtcaggtgagcatccataacctaacaggcagagccctagcgatgtggatcaagtttcctgagcccgggggcggtggagcctcatgatctcttatcttttgaggctgaggcaggtcacatgcaacaaattgtgaccctgctccccacaagtcatgcaaaggttttgaagagcttttaccgtggggcagatgaacttgtgtcaaccatgcacaccctgtgagaaccaagtacctgtgtttctaaggcgggcactcaaggtgaggggtgcattctggccaaagaaacaaaagctgtggtttcaggaccatgccgtgtgtagctgatctgtacgggacgtgtatgtaaggaagagcaatcatgatagataagaacagtgtgtgaagcagccttcacactagagtgtttggtcatctcttataatgtaagggaaggtactttaaaattctgggaagatgcgatgaactcatgtcccagtcagaaaataatccaatgaaataagcattggttgccaggccacagttaggaattgtattgtgatacatctagaggccaagagagcaggagagagctaccaacttacactgtggtttaagctaaatgaccgcacagcatcatagcattgcagtgttgttactaaatctggaagtgacctgtgaatgtatggaatacaataaagtcttttattctggttcatttgctagtacttcctttttgattggatactgtagttcttcctctggattttattttgttcagcgtcaaggccctaattttgcaaatgtagtctaaaccacattacgtggactagaggatactctgaattagcaagttttttgtttgctgaataaaactattccatcttaac

SEQ ID NO: 3354 - protein, 1287 aa, Homosapiens; identical to SEQ ID NO: 452

SEQ ID NO: 3355 - DNA, 431 bp, Homosapiens
gctgctgaagaacctagagtcttatgtattatacaagatactactaattcaaagacagtgaatgaacggatcactttaaatttaccagcatctactccagtcagaaagctctttgaagatgtggccaacaaagtaggctacataaatggaacctttgacttggtgtggggaaatggaatcaatactgctgatatggcaccactggatcataccagtgacaagtcacttctcgacgctaattttgagccaggaaagaagaactttctgcatttgacagataaagatggtgaacaacctcaaatactgctggtaagctacttagaaagccccatatttataatttttgtgcactgtcacctactacttgaggatgcagtttcccaaaggaaataagatgtgttttgtaatttgtgtaataaattaatattttt

SEQ ID NO: 3356 - protein, 66 aa, Homosapiens
MAPLDHTSDKSLLDANFEPGKKNFLHLTDKDGEQPQILLVSYLESPIFIIFVHCHLLLEDAVSQRK

SEQ ID NO: 3357 - DNA, 1703 bp, Homosapiens
cttaaatcagacagttacagaattcaaacaactgatttcaaaggccatccatttacctgctgaaacaatgagaatagtgctggaacgctgctacaatgatttgcgtcttctcagtgtctccagtaaaaccctgaaagctgaaggattttttagaagtaacaaggtgtttgttgaaagctccgagactttggattaccagatggcctttgcagactctcatttatggaaactcctggatcggcatgcaaatacaatcagattatttgttttgctacctgaacaatccccagtatcttattccaaaaggacagcataccagaaagctggaggcgattctggtaatgtggatgatgactgtgaaagagtcaaaggacctgtaggaagcctaaagtctgtggaagctattctagaagaaagcactgaaaaactcaaaagcttgtcactgcagcaacagcaggatggagataatggggacagcagcaaaagtactgagacaagtgactttgaaaacatcgaatcacctctcaatgagagggactcttcagcatcagtggataatagagaacttgaacagcatattcagacttctgatccagaaaattttcagtctgaagaacgatcagactcagatgtgaataatgacaggagtacaagttcagtggacagtgatattcttagctccagtcatagcagtgatactttgtgcaatgcagacaatgctcagatccctttggctaatggacttgactctcacagtatcacaagtagtagaagaacgaaagcaaatgaagggaaaaaagaaacatgggatacagcagaagaagactctggaactgatagtgaatatgatgagagtggcaagagtaggggagaaatgcagtacatgtatttcaaagctgaaccttatgctgcagatgaaggttctggggaaggacataaatgtatgtacttcaaaagaaaaacggtccttgaaacagcatcagtttttctctcagtttatttaaattttcagttaagtgttaggtacttagttctaagatcatttgtaactttctggattataagattattgacgcagttgtaatgaacactgttcttagacctgtgcagtaaattagatggtaattatatcagaactctgagataagaagtaaaaaaaaatagtattcaatgttaggaaggaattatgatataattactaagtaaaaaattagggaatatattaaaaagtaaataatattttttaaaagctgagaaactttagaaaatttgatattcaatgcccaggaaaatgttttatttctacatgctcttccctctctccatttccaatgcaaacaacaattcccttgccatacccccttaaaaagtccttaatcaactgggaaagtcagagaaagaaaaagcgctcttaaaattttttctgttactttgaagtaactccaaagcaaggagttactagaaattccaatgcataatctcagaaagagggaaaagatctgagagtttgggcatttggcataagcagtaacaacaaaaacattccagcatagtatgagacttaaaataaaagaacctttataaaaccttagactgaggccagccaaataattagcaaggcaaccaggtttaagatacaaaatctttcttcaagtgtaaaggagaagtagctggaaaagtaagtactttgcattagttctagc

SEQ ID NO: 3358 - protein, 338 aa, Homosapiens
MRIVLERCYNDLRLLSVSSKTLKAEGFFRSNKVFVESSETLDYQMAFADSHLWKLLDRHANTIRLFVLLPEQSPVSYSKRTAYQKAGGDSGNVDDDCERVKGPVGSLKSVEAILEESTEKLKSLSLQQQQDGDNGDSSKSTETSDFENIESPLNERDSSASVDNRELEQHIQTSDPENFQSEERSDSDVNNDRSTSSVDSDILSSSHSSDTLCNADNAQIPLANGLDSHSITSSRRTKANEGKKETWDTAEEDSGTDSEYDESGKSRGEMQYMYFKAEPYAADEGSGEGHKCMYFKRKTVLETASVFLSVYLNFQLSVRYLVLRSFVTFWIIRLLTQL

SEQ ID NO: 3359 - DNA, 3527 bp, Homosapiens
gttcttgatggtattttcaatatttttggggggaagtatcagttagaaatactctagaactaatagaagcctatagtttttaatcaaataatgagttacgaggaatctaatatacattatagtgttttgtgttatattaagcataacgatatccttattatggattgatgtgattcctacctacgtcttatccttgggagttttattttcttcccctgtgtcctaatgtaactgcttaagttgtttttgaaagaataatcagtgtctttcagccttctgctatctttctctggttcccatttgccttttaagtattctttttttgaatgttgagaatattaattcccccttatgaggaaattacaaagttaggtttttaatacattttaagaaaactctgctaatattttcttagccacgtttgttctttagtttcttttttactattatggcttattttgtattgaagacatggtactgataatttatcagagactcaagaacaatgactatttgtgtcctaagccaggtggcttaaagaatagaagtgtattgtctcacaatctgagatcaggctgtcaacagggttggttccttctgagtgctgtgggggagaatctgttccatactctctcctagcttctgtggtttttggccatcattggcaaccttggcttgtagatacatcaccccagtctctgccttcatcttcatgtggtgttctttctgtgggcttgtctgtctgtattgttttcccctttttcataaaccactagtcctattgtattagggcccaccctgaagaccttattttactttgagtatcactggaaagaccctatttccaaataaggtcacattctgaggtactagggattaggatttcaaaatgtctttttgtggggggcacaattcaacccatagcagtgaccttgaggaggtccaagtagcagacatacttgtcacacctcccagttttcgttatcaacattggcacatttaaagtattggtgtttggagggaggcttataggaggaaagttggcttttagaagatcacatcaaggtaaacaactagttctatattctttttttgctgttgcttaggaaaattttaattttccttttcttctgtagaaagtaaaatatgaattctggatattttgttacaagattatcctagtttttagagagctcaataatactaacacctcatgtatttcaggctgcttcaggtctaattcaaccataaatttaaatggttgaaattctgattaattgacaagttaagttgggaggtaaggaacaactaggataccatctactatggtgtgtaggcaagtgctccagattgtgatttctttgagtatctggggtcgtagggaataatcactgtgcctgggtaagtcaggaagagatcataaatgacaaagaagtcacccttgtaaggattgagtatgtattagcagagatggattcatctgaaaatggtactagatggtgggtgcctgcatcagtattatttcagtatattttcacatcaagatagttgagtaagaaatgtcatgtgattaaatccaagaggtatttattgacctgtaatttgccagacactgctaatcccttgtgctacaaaaatgagtaagaaccacttattggtgcacacagtctgtggaagaaacagaactgcaaacctgtcattctaaaataataggtactaagggactgaatcagtagaagttcttcttgtgtacaccagagaaaagtgacaattgagttgatgcttgaaaagtgacaattgagttgatgcttgaaaagtgacataatggaaaagtgacaattttgaagaatcactaaattggggagtaaatggaaagagaaggattaataatagctttagtgaaaaaagaggataaagtgaagttgatttgtttatgattttagatagggataggagccaatagagaaacaaagattggaaatccagagaagagagtaattggtaatgcagtgttcaacaggagtcaggagggagtggaattaggagtactggtttgaagaagagaggaattatcttctgagactggagagaagagagtaaatatttcattctcaaaaactccttgggataattgggttttttcttgtgcccactttttaagagtaacacttgaagtaaatctttttgtttagtaaggcactaagggaaaagtcaaattatgaaccttcagaggaaatagaatgatgacctaatcttgcatattcttaggggtagagaagatgaagtccatgtcacagcttgcagttttgtcaagacggtggaagccttcagagatgaagttggatcccttccaggaggttgtattggaaagcagtagtgtggacgaattgcgagagaagcttagtgaaatcagtgggattcctttggatgatattgaatttgctaagggtagaggaacatttccctgtgatatttctgtccttgatattcatcaggatttagactggaatcctaaagtttctaccctgaatgtctggcctctttatatctgtgatgatggtgcggtcatattttatagggataaaacagaagaattaatggaattgacagatgagcaaagaaatgaactgatgaaaaaagaaagcagtcgactccagaagactggacatcgtgtaacatactcacctcgtaaagagaaagcactaaaaatatatctggatggagcaccaaataaagatctgactcaagactgactctgatagtgtagcattttccctgggggagttttggttttaattagatggttcactaccactgggtagtgccattttggccggacatggttggggtaacccagtgacaccagcactgattggactgccctacaccaatcagaagctcagtgcccaatgggccactgttttgactcggaatcatgttgtgcactatagtcaaatgtactgtaaagtgaaaagggatgtgcaaaaaaataaaaaaaaacaacaaaaaaagctaaccttctattagaaaaggggacaggggaatgagtaaacttcttttattgcggacaaatgtgcacatagccgctagtaaaactagcctcaaacaggatgctcatagcttaataataaaagctgtgcaaaggccatgaatgaatgaattttctgtttatttcactgatgcacacattacctcattgacaattcagaagtaaatccaacgtgtgttgactcttggaaagcagcaaaaacaggagctgaagaaaagaaattcttggaaccagccgtaacccagtaaggaattgtgaagttgtgtttttattttgtttcattttttgcagagtattaagaacattattctggaacatcagaacgtttcccttagaccgatcccagcaggtggcagctcagattgctgcagtgttgtaattataactgattgtacttaagttatggatgtagagaatatgtttcattcatttattcagcatgtaaataaaattgatcctgttgagttatcataattgc

SEQ ID NO: 3360 - protein, 157 aa, Homosapiens
MKSMSQLAVLSRRWKPSEMKLDPFQEVVLESSSVDELREKLSEISGIPLDDIEFAKGRGTFPCDISVLDIHQDLDWNPKVSTLNVWPLYICDDGAVIFYRDKTEELMELTDEQRNELMKKESSRLQKTGHRVTYSPRKEKALKIYLDGAPNKDLTQD

SEQ ID NO: 3361 - DNA, 4102 bp, Homosapiens
gttcttgatggtattttcaatatttttggggggaagtatcagttagaaatactctagaactaatagaagcctatagtttttaatcaaataatgagttacgaggaatctaatatacattatagtgttttgtgttatattaagcataacgatatccttattatggattgatgtgattcctacctacgtcttatccttgggagttttattttcttcccctgtgtcctaatgtaactgcttaagttgtttttgaaagaataatcagtgtctttcagccttctgctatctttctctggttcccatttgccttttaagtattctttttttgaatgttgagaatattaattcccccttatgaggaaattacaaagttaggtttttaatacattttaagaaaactctgctaatattttcttagccacgtttgttctttagtttcttttttactattatggcttattttgtattgaagacatggtactgataatttatcagagactcaagaacaatgactatttgtgtcctaagccaggtggcttaaagaatagaagtgtattgtctcacaatctgagatcaggctgtcaacagggttggttccttctgagtgctgtgggggagaatctgttccatactctctcctagcttctgtggtttttggccatcattggcaaccttggcttgtagatacatcaccccagtctctgccttcatcttcatgtggtgttctttctgtgggcttgtctgtctgtattgttttcccctttttcataaaccactagtcctattgtattagggcccaccctgaagaccttattttactttgagtatcactggaaagaccctatttccaaataaggtcacattctgaggtactagggattaggatttcaaaatgtctttttgtggggggcacaattcaacccatagcagtgaccttgaggaggtccaagtagcagacatacttgtcacacctcccagttttcgttatcaacattggcacatttaaagtattggtgtttggagggaggcttataggaggaaagttggcttttagaagatcacatcaaggtaaacaactagttctatattctttttttgctgttgcttaggaaaattttaattttccttttcttctgtagaaagtaaaatatgaattctggatattttgttacaagattatcctagtttttagagagctcaataatactaacacctcatgtatttcaggctgcttcaggtctaattcaaccataaatttaaatggttgaaattctgattaattgacaagttaagttgggaggtaaggaacaactaggataccatctactatggtgtgtaggcaagtgctccagattgtgatttctttgagtatctggggtcgtagggaataatcactgtgcctgggtaagtcaggaagagatcataaatgacaaagaagtcacccttgtaaggattgagtatgtattagcagagatggattcatctgaaaatggtactagatggtgggtgcctgcatcagtattatttcagtatattttcacatcaagatagttgagtaagaaatgtcatgtgattaaatccaagaggtatttattgacctgtaatttgccagacactgctaatcccttgtgctacaaaaatgagtaagaaccacttattggtgcacacagtctgtggaagaaacagaactgcaaacctgtcattctaaaataataggtactaagggactgaatcagtagaagttcttcttgtgtacaccagagaaaagtgacaattgagttgatgcttgaaaagtgacaattgagttgatgcttgaaaagtgacataatggaaaagtgacaattttgaagaatcactaaattggggagtaaatggaaagagaaggattaataatagctttagtgaaaaaagaggataaagtgaagttgatttgtttatgattttagatagggataggagccaatagagaaacaaagattggaaatccagagaagagagtaattggtaatgcagtgttcaacaggagtcaggagggagtggaattaggagtactggtttgaagaagagaggaattatcttctgagactggagagaagagagtaaatatttcattctcaaaaactccttgggataattgggttttttcttgtgcccactttttaagagtaacacttgaagtaaatctttttgtttagtaaggcactaagggaaaagtcaaattatgaaccttcagaggaaatagaatgatgacctaatcttgcatattcttaggggtagagaagatgaagtccatgtcacagcttgcagttttgtcaagacggtggaagccttcagagatgaagttggatcccttccaggaggttgtattggaaagcagtagtgtggacgaattgcgagagaagcttagtgaaatcagtgggattcctttggatgatattgaatttgctaagggtagaggaacatttccctgtgatatttctgtccttgatattcatcaggatttagactggaatcctaaagtttctaccctgaatgtctggcctctttatatctgtgatgatggtgcggtcatattttatagggataaaacagaagaattaatggaattgacagatgagcaaagaaatgaactgatgaaaaaagaaagcagtcgactccagaagactggacatcgtgtaacatactcacctcgtaaagagaaagcactaaaaatatatctggatggagcaccaaataaagatctgactcaagactgactctgatagtgtagcattttccctgggggagttttggttttaattagatggttcactaccactgggtagtgccattttggccggacatggttggggtaacccagtgacaccagcactgattggactgccctacaccaatcagaagctcagtgcccaatgggccactgttttgactcggaatcatgttgtgcactatagtcaaatgtactgtaaagtgaaaagggatgtgcaaaaaaataaaaaaaaacaacaaaaaaagctaaccttctattagaaaaggggacaggggaatgagtaaacttcttttattgcggacaaatgtgcacatagccgctagtaaaactagcctcaaacaggatgctcatagcttaataataaaagctgtgcaaaggccatgaatgaatgaattttctgtttatttcactgatgcacacattacctcattgacaattcagaagtaaatccaacgtgtgttgactcttggaaagcagcaaaaacaggagctgaagaaaagaaattcttggaaccagccgtaacccagtaaggaattgtgaagttgtgtttttattttgtttcattttttgcagagtattaagaacattattctggaacatcagaacgtttcccttagaccgatcccagcaggtggcagctcagattgctgcagtgttgtaattataactgattgtacttaagttatggatgtagagaatatgtttcattcatttattcagcatgtaaataaaattgatcctgttgagttatcataattgcagttcaactatctgccatgattattcttttcacgtatcattcattctgtacatttgtgtacattgagaagtatagcaatctatgtaaatgtaatcctcagtgaggttcctcagtgctaggtcccataggattgtcgttgcccttgttaatgaggtttctctgttcagcggcttcaatttttttctctttgtacatctagttttgaagatttacttcaagtttgaatcttctagaatgcttgtaagtccagttttaatttttagagtcaatttgtagttacatgtagtttaacttttgggaaacgtcttaacattgttctgaataaacttgctaatgaggtcaggtcatggtacagactgatgcagtcaacatgatttcattgcagagtttattagtatcagcaagtttttgctttgctaaataaaagtactcaatgaacacaattctacataaattttgacataccatctaatttataaaaatcaataaaaaaggttttggtaaaactttttcatgccagatgctgtttacaacaatgaacatgccaataaaacatttgttcattctgttgtgtt

SEQ ID NO: 3362 - protein, 157 aa, Homosapiens; identical to SEQ ID NO: 3360

SEQ ID NO: 3363 - DNA, 5731 bp, Homosapiens
gttcttgatggtattttcaatatttttggggggaagtatcagttagaaatactctagaactaatagaagcctatagtttttaatcaaataatgagttacgaggaatctaatatacattatagtgttttgtgttatattaagcataacgatatccttattatggattgatgtgattcctacctacgtcttatccttgggagttttattttcttcccctgtgtcctaatgtaactgcttaagttgtttttgaaagaataatcagtgtctttcagccttctgctatctttctctggttcccatttgccttttaagtattctttttttgaatgttgagaatattaattcccccttatgaggaaattacaaagttaggtttttaatacattttaagaaaactctgctaatattttcttagccacgtttgttctttagtttcttttttactattatggcttattttgtattgaagacatggtactgataatttatcagagactcaagaacaatgactatttgtgtcctaagccaggtggcttaaagaatagaagtgtattgtctcacaatctgagatcaggctgtcaacagggttggttccttctgagtgctgtgggggagaatctgttccatactctctcctagcttctgtggtttttggccatcattggcaaccttggcttgtagatacatcaccccagtctctgccttcatcttcatgtggtgttctttctgtgggcttgtctgtctgtattgttttcccctttttcataaaccactagtcctattgtattagggcccaccctgaagaccttattttactttgagtatcactggaaagaccctatttccaaataaggtcacattctgaggtactagggattaggatttcaaaatgtctttttgtggggggcacaattcaacccatagcagtgaccttgaggaggtccaagtagcagacatacttgtcacacctcccagttttcgttatcaacattggcacatttaaagtattggtgtttggagggaggcttataggaggaaagttggcttttagaagatcacatcaaggtaaacaactagttctatattctttttttgctgttgcttaggaaaattttaattttccttttcttctgtagaaagtaaaatatgaattctggatattttgttacaagattatcctagtttttagagagctcaataatactaacacctcatgtatttcaggctgcttcaggtctaattcaaccataaatttaaatggttgaaattctgattaattgacaagttaagttgggaggtaaggaacaactaggataccatctactatggtgtgtaggcaagtgctccagattgtgatttctttgagtatctggggtcgtagggaataatcactgtgcctgggtaagtcaggaagagatcataaatgacaaagaagtcacccttgtaaggattgagtatgtattagcagagatggattcatctgaaaatggtactagatggtgggtgcctgcatcagtattatttcagtatattttcacatcaagatagttgagtaagaaatgtcatgtgattaaatccaagaggtatttattgacctgtaatttgccagacactgctaatcccttgtgctacaaaaatgagtaagaaccacttattggtgcacacagtctgtggaagaaacagaactgcaaacctgtcattctaaaataataggtactaagggactgaatcagtagaagttcttcttgtgtacaccagagaaaagtgacaattgagttgatgcttgaaaagtgacaattgagttgatgcttgaaaagtgacataatggaaaagtgacaattttgaagaatcactaaattggggagtaaatggaaagagaaggattaataatagctttagtgaaaaaagaggataaagtgaagttgatttgtttatgattttagatagggataggagccaatagagaaacaaagattggaaatccagagaagagagtaattggtaatgcagtgttcaacaggagtcaggagggagtggaattaggagtactggtttgaagaagagaggaattatcttctgagactggagagaagagagtaaatatttcattctcaaaaactccttgggataattgggttttttcttgtgcccactttttaagagtaacacttgaagtaaatctttttgtttagtaaggcactaagggaaaagtcaaattatgaaccttcagaggaaatagaatgatgacctaatcttgcatattcttaggggtagagaagatgaagtccatgtcacagcttgcagttttgtcaagacggtggaagccttcagagatgaagttggatcccttccaggaggttgtattggaaagcagtagtgtggacgaattgcgagagaagcttagtgaaatcagtgggattcctttggatgatattgaatttgctaagggtagaggaacatttccctgtgatatttctgtccttgatattcatcaggatttagactggaatcctaaagtttctaccctgaatgtctggcctctttatatctgtgatgatggtgcggtcatattttatagggataaaacagaagaattaatggaattgacagatgagcaaagaaatgaactgatgaaaaaagaaagcagtcgactccagaagactggacatcgtgtaacatactcacctcgtaaagagaaagcactaaaaatatatctggatggagcaccaaataaagatctgactcaagactgactctgatagtgtagcattttccctgggggagttttggttttaattagatggttcactaccactgggtagtgccattttggccggacatggttggggtaacccagtgacaccagcactgattggactgccctacaccaatcagaagctcagtgcccaatgggccactgttttgactcggaatcatgttgtgcactatagtcaaatgtactgtaaagtgaaaagggatgtgcaaaaaaataaaaaaaaacaacaaaaaaagctaaccttctattagaaaaggggacaggggaatgagtaaacttcttttattgcggacaaatgtgcacatagccgctagtaaaactagcctcaaacaggatgctcatagcttaataataaaagctgtgcaaaggccatgaatgaatgaattttctgtttatttcactgatgcacacattacctcattgacaattcagaagtaaatccaacgtgtgttgactcttggaaagcagcaaaaacaggagctgaagaaaagaaattcttggaaccagccgtaacccagtaaggaattgtgaagttgtgtttttattttgtttcattttttgcagagtattaagaacattattctggaacatcagaacgtttcccttagaccgatcccagcaggtggcagctcagattgctgcagtgttgtaattataactgattgtacttaagttatggatgtagagaatatgtttcattcatttattcagcatgtaaataaaattgatcctgttgagttatcataattgcagttcaactatctgccatgattattcttttcacgtatcattcattctgtacatttgtgtacattgagaagtatagcaatctatgtaaatgtaatcctcagtgaggttcctcagtgctaggtcccataggattgtcgttgcccttgttaatgaggtttctctgttcagcggcttcaatttttttctctttgtacatctagttttgaagatttacttcaagtttgaatcttctagaatgcttgtaagtccagttttaatttttagagtcaatttgtagttacatgtagtttaacttttgggaaacgtcttaacattgttctgaataaacttgctaatgaggtcaggtcatggtacagactgatgcagtcaacatgatttcattgcagagtttattagtatcagcaagtttttgctttgctaaataaaagtactcaatgaacacaattctacataaattttgacataccatctaatttataaaaatcaataaaaaaggttttggtaaaactttttcatgccagatgctgtttacaacaatgaacatgccaataaaacatttgttcattctgttgtgttattttagtcattaaacttctgtggatgaagaatctgggttaagaatagatttgtcatctttaaatatgacattttgtaatgtgtattggatatctcatttctatgataaaggtatatttacagtaaagttctcataagagaaatgaaaagctgtgttaatatctaactttggggaaccctgtcagtatttcagatccgatttttaccctttttttcttataagaaagataaaattagaaaatactgttagcaaatgtggctctgccatttgaatataatcaccgagaattccatgtcttaaaagtctcctggaatccacaatgaaaaaaaaaatcttttctaaggtatttttctggctaatttttatttgaagaaagctatagcatttagcgaaatttgactgaagtaatgttctgagtttgcattagtgggattggtgatgttctcagaagaaaattggaaacacttgtgatgaattgtctttcagatcacttagattttctgatgtaagaggacagctgtttggttctgatacaggcctgcttacttgggatgtagggttagtaaatggggtttctgctttaaaggactgacttgctatcacacaaaagaggcagacttgtaaacacaatgggctttggagtttggtctgattgggtttggtttagtattcctatgagcgtaaatggtaaaattcttctgatacccactctttagactgtgccttctgctctgttctttgttttatgtttaactgctgtttctaattgcaggtgtattacagatacaaataagagtaaagaaaatatatttcattatagaaaagaaaaaattaaaagcttcttgcttttcagtgcctgatagagtgaaaacacaaagttgcactttaataatttcaataaaagctaatctgtgtcagcctccctctgcttcagagagtcaggtgagcatccataacctaacaggcagagccctagcgatgtggatcaagtttcctgagcccgggggcggtggagcctcatgatctcttatcttttgaggctgaggcaggtcacatgcaacaaattgtgaccctgctccccacaagtcatgcaaaggttttgaagagcttttaccgtggggcagatgaacttgtgtcaaccatgcacaccctgtgagaaccaagtacctgtgtttctaaggcgggcactcaaggtgaggggtgcattctggccaaagaaacaaaagctgtggtttcaggaccatgccgtgtgtagctgatctgtacgggacgtgtatgtaaggaagagcaatcatgatagataagaacagtgtgtgaagcagccttcacactagagtgtttggtcatctcttataatgtaagggaaggtactttaaaattctgggaagatgcgatgaactcatgtcccagtcagaaaataatccaatgaaataagcattggttgccaggccacagttaggaattgtattgtgatacatctagaggccaagagagcaggagagagctaccaacttacactgtggtttaagctaaatgaccgcacagcatcatagcattgcagtgttgttactaaatctggaagtgacctgtgaatgtatggaatacaataaagtcttttattctggttc

SEQ ID NO: 3364 - protein, 157 aa, Homosapiens; identical to SEQ ID NO: 3360

SEQ ID NO: 3365 - DNA, 5904 bp, Homosapiens
gttcttgatggtattttcaatatttttggggggaagtatcagttagaaatactctagaactaatagaagcctatagtttttaatcaaataatgagttacgaggaatctaatatacattatagtgttttgtgttatattaagcataacgatatccttattatggattgatgtgattcctacctacgtcttatccttgggagttttattttcttcccctgtgtcctaatgtaactgcttaagttgtttttgaaagaataatcagtgtctttcagccttctgctatctttctctggttcccatttgccttttaagtattctttttttgaatgttgagaatattaattcccccttatgaggaaattacaaagttaggtttttaatacattttaagaaaactctgctaatattttcttagccacgtttgttctttagtttcttttttactattatggcttattttgtattgaagacatggtactgataatttatcagagactcaagaacaatgactatttgtgtcctaagccaggtggcttaaagaatagaagtgtattgtctcacaatctgagatcaggctgtcaacagggttggttccttctgagtgctgtgggggagaatctgttccatactctctcctagcttctgtggtttttggccatcattggcaaccttggcttgtagatacatcaccccagtctctgccttcatcttcatgtggtgttctttctgtgggcttgtctgtctgtattgttttcccctttttcataaaccactagtcctattgtattagggcccaccctgaagaccttattttactttgagtatcactggaaagaccctatttccaaataaggtcacattctgaggtactagggattaggatttcaaaatgtctttttgtggggggcacaattcaacccatagcagtgaccttgaggaggtccaagtagcagacatacttgtcacacctcccagttttcgttatcaacattggcacatttaaagtattggtgtttggagggaggcttataggaggaaagttggcttttagaagatcacatcaaggtaaacaactagttctatattctttttttgctgttgcttaggaaaattttaattttccttttcttctgtagaaagtaaaatatgaattctggatattttgttacaagattatcctagtttttagagagctcaataatactaacacctcatgtatttcaggctgcttcaggtctaattcaaccataaatttaaatggttgaaattctgattaattgacaagttaagttgggaggtaaggaacaactaggataccatctactatggtgtgtaggcaagtgctccagattgtgatttctttgagtatctggggtcgtagggaataatcactgtgcctgggtaagtcaggaagagatcataaatgacaaagaagtcacccttgtaaggattgagtatgtattagcagagatggattcatctgaaaatggtactagatggtgggtgcctgcatcagtattatttcagtatattttcacatcaagatagttgagtaagaaatgtcatgtgattaaatccaagaggtatttattgacctgtaatttgccagacactgctaatcccttgtgctacaaaaatgagtaagaaccacttattggtgcacacagtctgtggaagaaacagaactgcaaacctgtcattctaaaataataggtactaagggactgaatcagtagaagttcttcttgtgtacaccagagaaaagtgacaattgagttgatgcttgaaaagtgacaattgagttgatgcttgaaaagtgacataatggaaaagtgacaattttgaagaatcactaaattggggagtaaatggaaagagaaggattaataatagctttagtgaaaaaagaggataaagtgaagttgatttgtttatgattttagatagggataggagccaatagagaaacaaagattggaaatccagagaagagagtaattggtaatgcagtgttcaacaggagtcaggagggagtggaattaggagtactggtttgaagaagagaggaattatcttctgagactggagagaagagagtaaatatttcattctcaaaaactccttgggataattgggttttttcttgtgcccactttttaagagtaacacttgaagtaaatctttttgtttagtaaggcactaagggaaaagtcaaattatgaaccttcagaggaaatagaatgatgacctaatcttgcatattcttaggggtagagaagatgaagtccatgtcacagcttgcagttttgtcaagacggtggaagccttcagagatgaagttggatcccttccaggaggttgtattggaaagcagtagtgtggacgaattgcgagagaagcttagtgaaatcagtgggattcctttggatgatattgaatttgctaagggtagaggaacatttccctgtgatatttctgtccttgatattcatcaggatttagactggaatcctaaagtttctaccctgaatgtctggcctctttatatctgtgatgatggtgcggtcatattttatagggataaaacagaagaattaatggaattgacagatgagcaaagaaatgaactgatgaaaaaagaaagcagtcgactccagaagactggacatcgtgtaacatactcacctcgtaaagagaaagcactaaaaatatatctggatggagcaccaaataaagatctgactcaagactgactctgatagtgtagcattttccctgggggagttttggttttaattagatggttcactaccactgggtagtgccattttggccggacatggttggggtaacccagtgacaccagcactgattggactgccctacaccaatcagaagctcagtgcccaatgggccactgttttgactcggaatcatgttgtgcactatagtcaaatgtactgtaaagtgaaaagggatgtgcaaaaaaataaaaaaaaacaacaaaaaaagctaaccttctattagaaaaggggacaggggaatgagtaaacttcttttattgcggacaaatgtgcacatagccgctagtaaaactagcctcaaacaggatgctcatagcttaataataaaagctgtgcaaaggccatgaatgaatgaattttctgtttatttcactgatgcacacattacctcattgacaattcagaagtaaatccaacgtgtgttgactcttggaaagcagcaaaaacaggagctgaagaaaagaaattcttggaaccagccgtaacccagtaaggaattgtgaagttgtgtttttattttgtttcattttttgcagagtattaagaacattattctggaacatcagaacgtttcccttagaccgatcccagcaggtggcagctcagattgctgcagtgttgtaattataactgattgtacttaagttatggatgtagagaatatgtttcattcatttattcagcatgtaaataaaattgatcctgttgagttatcataattgcagttcaactatctgccatgattattcttttcacgtatcattcattctgtacatttgtgtacattgagaagtatagcaatctatgtaaatgtaatcctcagtgaggttcctcagtgctaggtcccataggattgtcgttgcccttgttaatgaggtttctctgttcagcggcttcaatttttttctctttgtacatctagttttgaagatttacttcaagtttgaatcttctagaatgcttgtaagtccagttttaatttttagagtcaatttgtagttacatgtagtttaacttttgggaaacgtcttaacattgttctgaataaacttgctaatgaggtcaggtcatggtacagactgatgcagtcaacatgatttcattgcagagtttattagtatcagcaagtttttgctttgctaaataaaagtactcaatgaacacaattctacataaattttgacataccatctaatttataaaaatcaataaaaaaggttttggtaaaactttttcatgccagatgctgtttacaacaatgaacatgccaataaaacatttgttcattctgttgtgttattttagtcattaaacttctgtggatgaagaatctgggttaagaatagatttgtcatctttaaatatgacattttgtaatgtgtattggatatctcatttctatgataaaggtatatttacagtaaagttctcataagagaaatgaaaagctgtgttaatatctaactttggggaaccctgtcagtatttcagatccgatttttaccctttttttcttataagaaagataaaattagaaaatactgttagcaaatgtggctctgccatttgaatataatcaccgagaattccatgtcttaaaagtctcctggaatccacaatgaaaaaaaaaatcttttctaaggtatttttctggctaatttttatttgaagaaagctatagcatttagcgaaatttgactgaagtaatgttctgagtttgcattagtgggattggtgatgttctcagaagaaaattggaaacacttgtgatgaattgtctttcagatcacttagattttctgatgtaagaggacagctgtttggttctgatacaggcctgcttacttgggatgtagggttagtaaatggggtttctgctttaaaggactgacttgctatcacacaaaagaggcagacttgtaaacacaatgggctttggagtttggtctgattgggtttggtttagtattcctatgagcgtaaatggtaaaattcttctgatacccactctttagactgtgccttctgctctgttctttgttttatgtttaactgctgtttctaattgcaggtgtattacagatacaaataagagtaaagaaaatatatttcattatagaaaagaaaaaattaaaagcttcttgcttttcagtgcctgatagagtgaaaacacaaagttgcactttaataatttcaataaaagctaatctgtgtcagcctccctctgcttcagagagtcaggtgagcatccataacctaacaggcagagccctagcgatgtggatcaagtttcctgagcccgggggcggtggagcctcatgatctcttatcttttgaggctgaggcaggtcacatgcaacaaattgtgaccctgctccccacaagtcatgcaaaggttttgaagagcttttaccgtggggcagatgaacttgtgtcaaccatgcacaccctgtgagaaccaagtacctgtgtttctaaggcgggcactcaaggtgaggggtgcattctggccaaagaaacaaaagctgtggtttcaggaccatgccgtgtgtagctgatctgtacgggacgtgtatgtaaggaagagcaatcatgatagataagaacagtgtgtgaagcagccttcacactagagtgtttggtcatctcttataatgtaagggaaggtactttaaaattctgggaagatgcgatgaactcatgtcccagtcagaaaataatccaatgaaataagcattggttgccaggccacagttaggaattgtattgtgatacatctagaggccaagagagcaggagagagctaccaacttacactgtggtttaagctaaatgaccgcacagcatcatagcattgcagtgttgttactaaatctggaagtgacctgtgaatgtatggaatacaataaagtcttttattctggttcatttgctagtacttcctttttgattggatactgtagttcttcctctggattttattttgttcagcgtcaaggccctaattttgcaaatgtagtctaaaccacattacgtggactagaggatactctgaattagcaagttttttgtttgctgaataaaactattccatcttaac

SEQ ID NO: 3366 - protein, 157 aa, Homosapiens; identical to SEQ ID NO: 3360

SEQ ID NO: 3367 - DNA, 839 bp, Homosapiens
gctgcttcaggtctaattcaaccataaatttaaatggttgaaattctgattaattgacaagttaagttgggaggggtagagaagatgaagtccatgtcacagcttgcagttttgtcaagacggtggaagccttcagagatgaagttggatcccttccaggaggttgtattggaaagcagtagtgtggacgaattgcgagagaagcttagtgaaatcagtgggattcctttggatgatattgaatttgctaagggtagaggaacatttccctgtgatatttctgtccttgatattcatcaggatttagactggaatcctaaagtttctaccctgaatgtctggcctctttatatctgtgatgatggtgcggtcatattttatagggataaaacagaagaattaatggaattgacagatgagcaaagaaatgaactgatgaaaaaagaaagcagtcgactccagaagactggacatcgtgtaacatactcacctcgtaaagagaaagcactaaaaatatatctggatggagcaccaaataaagatctgactcaagactgactctgatagtgtagcattttccctgggggagttttggttttaattagatggttcactaccactgggtagtgccattttggccggacatggttggggtaacccagtgacaccagcactgattggactgccctacaccaatcagaagctcagtgcccaatgggccactgttttgactcggaatcatgttgtgcactatagtcaaatgtactgtaaagtgaaaagggatgtgcaaaaaaataaaaaaaaacaacaaaaaaagctaaccttctattagaaaaggg

SEQ ID NO: 3368 - protein, 157 aa, Homosapiens; identical to SEQ ID NO: 3360

SEQ ID NO: 3369 - DNA, 955 bp, Homosapiens
gctgcttcaggtctaattcaaccataaatttaaatggttgaaattctgattaattgacaagttaagttgggaggggtagagaagatgaagtccatgtcacagcttgcagttttgtcaagacggtggaagccttcagagatgaagttggatcccttccaggaggttgtattggaaagcagtagtgtggacgaattgcgagagaagcttagtgaaatcagtgggattcctttggatgatattgaatttgctaagggtagaggaacatttccctgtgatatttctgtccttgatattcatcaggatttagactggaatcctaaagtttctaccctgaatgtctggcctctttatatctgtgatgatggtgcggtcatattttatagggataaaacagaagaattaatggaattgacagatgagcaaagaaatgaactgatgaaaaaagaaagcagtcgactccagaagactggacatcgtgtaacatactcacctcgtaaagagaaagcactaaaaatatatctggatggagcaccaaataaagatctgactcaagactgactctgatagtgtagcattttccctgggggagttttggttttaattagatggttcactaccactgggtagtgccattttggccggacatggttggggtaacccagtgacaccagcactgattggactgccctacaccaatcagaagctcagtgcccaatgggccactgttttgactcggaatcatgttgtgcactatagtcaaatgtactgtaaagtgaaaagggatgtgcaaaaaaataaaaaaaaacaacaaaaaaagctaaccttctattagaaaaggggacaggggaatgagtaaacttcttttattgcggacaaatgtgcacatagccgctagtaaaactagcctcaaacaggatgctcatagcttaataataaaagctgtgcaaaggccatg

SEQ ID NO: 3370 - protein, 157 aa, Homosapiens; identical to SEQ ID NO: 3360

SEQ ID NO: 3371 - DNA, 1332 bp, Homosapiens
gctgcttcaggtctaattcaaccataaatttaaatggttgaaattctgattaattgacaagttaagttgggaggggtagagaagatgaagtccatgtcacagcttgcagttttgtcaagacggtggaagccttcagagatgaagttggatcccttccaggaggttgtattggaaagcagtagtgtggacgaattgcgagagaagcttagtgaaatcagtgggattcctttggatgatattgaatttgctaagggtagaggaacatttccctgtgatatttctgtccttgatattcatcaggatttagactggaatcctaaagtttctaccctgaatgtctggcctctttatatctgtgatgatggtgcggtcatattttatagggataaaacagaagaattaatggaattgacagatgagcaaagaaatgaactgatgaaaaaagaaagcagtcgactccagaagactggacatcgtgtaacatactcacctcgtaaagagaaagcactaaaaatatatctggatggagcaccaaataaagatctgactcaagactgactctgatagtgtagcattttccctgggggagttttggttttaattagatggttcactaccactgggtagtgccattttggccggacatggttggggtaacccagtgacaccagcactgattggactgccctacaccaatcagaagctcagtgcccaatgggccactgttttgactcggaatcatgttgtgcactatagtcaaatgtactgtaaagtgaaaagggatgtgcaaaaaaataaaaaaaaacaacaaaaaaagctaaccttctattagaaaaggggacaggggaatgagtaaacttcttttattgcggacaaatgtgcacatagccgctagtaaaactagcctcaaacaggatgctcatagcttaataataaaagctgtgcaaaggccatgaatgaatgaattttctgtttatttcactgatgcacacattacctcattgacaattcagaagtaaatccaacgtgtgttgactcttggaaagcagcaaaaacaggagctgaagaaaagaaattcttggaaccagccgtaacccagtaaggaattgtgaagttgtgtttttattttgtttcattttttgcagagtattaagaacattattctggaacatcagaacgtttcccttagaccgatcccagcaggtggcagctcagattgctgcagtgttgtaattataactgattgtacttaagttatggatgtagagaatatgtttcattcatttattcagcatgtaaataaaattgatcctgttgagttatcataattgc

SEQ ID NO: 3372 - protein, 157 aa, Homosapiens; identical to SEQ ID NO: 3360

SEQ ID NO: 3373 - DNA, 1907 bp, Homosapiens
gctgcttcaggtctaattcaaccataaatttaaatggttgaaattctgattaattgacaagttaagttgggaggggtagagaagatgaagtccatgtcacagcttgcagttttgtcaagacggtggaagccttcagagatgaagttggatcccttccaggaggttgtattggaaagcagtagtgtggacgaattgcgagagaagcttagtgaaatcagtgggattcctttggatgatattgaatttgctaagggtagaggaacatttccctgtgatatttctgtccttgatattcatcaggatttagactggaatcctaaagtttctaccctgaatgtctggcctctttatatctgtgatgatggtgcggtcatattttatagggataaaacagaagaattaatggaattgacagatgagcaaagaaatgaactgatgaaaaaagaaagcagtcgactccagaagactggacatcgtgtaacatactcacctcgtaaagagaaagcactaaaaatatatctggatggagcaccaaataaagatctgactcaagactgactctgatagtgtagcattttccctgggggagttttggttttaattagatggttcactaccactgggtagtgccattttggccggacatggttggggtaacccagtgacaccagcactgattggactgccctacaccaatcagaagctcagtgcccaatgggccactgttttgactcggaatcatgttgtgcactatagtcaaatgtactgtaaagtgaaaagggatgtgcaaaaaaataaaaaaaaacaacaaaaaaagctaaccttctattagaaaaggggacaggggaatgagtaaacttcttttattgcggacaaatgtgcacatagccgctagtaaaactagcctcaaacaggatgctcatagcttaataataaaagctgtgcaaaggccatgaatgaatgaattttctgtttatttcactgatgcacacattacctcattgacaattcagaagtaaatccaacgtgtgttgactcttggaaagcagcaaaaacaggagctgaagaaaagaaattcttggaaccagccgtaacccagtaaggaattgtgaagttgtgtttttattttgtttcattttttgcagagtattaagaacattattctggaacatcagaacgtttcccttagaccgatcccagcaggtggcagctcagattgctgcagtgttgtaattataactgattgtacttaagttatggatgtagagaatatgtttcattcatttattcagcatgtaaataaaattgatcctgttgagttatcataattgcagttcaactatctgccatgattattcttttcacgtatcattcattctgtacatttgtgtacattgagaagtatagcaatctatgtaaatgtaatcctcagtgaggttcctcagtgctaggtcccataggattgtcgttgcccttgttaatgaggtttctctgttcagcggcttcaatttttttctctttgtacatctagttttgaagatttacttcaagtttgaatcttctagaatgcttgtaagtccagttttaatttttagagtcaatttgtagttacatgtagtttaacttttgggaaacgtcttaacattgttctgaataaacttgctaatgaggtcaggtcatggtacagactgatgcagtcaacatgatttcattgcagagtttattagtatcagcaagtttttgctttgctaaataaaagtactcaatgaacacaattctacataaattttgacataccatctaatttataaaaatcaataaaaaaggttttggtaaaactttttcatgccagatgctgtttacaacaatgaacatgccaataaaacatttgttcattctgttgtgtt

SEQ ID NO: 3374 - protein, 157 aa, Homosapiens; identical to SEQ ID NO: 3360

SEQ ID NO: 3375 - DNA, 3709 bp, Homosapiens
gctgcttcaggtctaattcaaccataaatttaaatggttgaaattctgattaattgacaagttaagttgggaggggtagagaagatgaagtccatgtcacagcttgcagttttgtcaagacggtggaagccttcagagatgaagttggatcccttccaggaggttgtattggaaagcagtagtgtggacgaattgcgagagaagcttagtgaaatcagtgggattcctttggatgatattgaatttgctaagggtagaggaacatttccctgtgatatttctgtccttgatattcatcaggatttagactggaatcctaaagtttctaccctgaatgtctggcctctttatatctgtgatgatggtgcggtcatattttatagggataaaacagaagaattaatggaattgacagatgagcaaagaaatgaactgatgaaaaaagaaagcagtcgactccagaagactggacatcgtgtaacatactcacctcgtaaagagaaagcactaaaaatatatctggatggagcaccaaataaagatctgactcaagactgactctgatagtgtagcattttccctgggggagttttggttttaattagatggttcactaccactgggtagtgccattttggccggacatggttggggtaacccagtgacaccagcactgattggactgccctacaccaatcagaagctcagtgcccaatgggccactgttttgactcggaatcatgttgtgcactatagtcaaatgtactgtaaagtgaaaagggatgtgcaaaaaaataaaaaaaaacaacaaaaaaagctaaccttctattagaaaaggggacaggggaatgagtaaacttcttttattgcggacaaatgtgcacatagccgctagtaaaactagcctcaaacaggatgctcatagcttaataataaaagctgtgcaaaggccatgaatgaatgaattttctgtttatttcactgatgcacacattacctcattgacaattcagaagtaaatccaacgtgtgttgactcttggaaagcagcaaaaacaggagctgaagaaaagaaattcttggaaccagccgtaacccagtaaggaattgtgaagttgtgtttttattttgtttcattttttgcagagtattaagaacattattctggaacatcagaacgtttcccttagaccgatcccagcaggtggcagctcagattgctgcagtgttgtaattataactgattgtacttaagttatggatgtagagaatatgtttcattcatttattcagcatgtaaataaaattgatcctgttgagttatcataattgcagttcaactatctgccatgattattcttttcacgtatcattcattctgtacatttgtgtacattgagaagtatagcaatctatgtaaatgtaatcctcagtgaggttcctcagtgctaggtcccataggattgtcgttgcccttgttaatgaggtttctctgttcagcggcttcaatttttttctctttgtacatctagttttgaagatttacttcaagtttgaatcttctagaatgcttgtaagtccagttttaatttttagagtcaatttgtagttacatgtagtttaacttttgggaaacgtcttaacattgttctgaataaacttgctaatgaggtcaggtcatggtacagactgatgcagtcaacatgatttcattgcagagtttattagtatcagcaagtttttgctttgctaaataaaagtactcaatgaacacaattctacataaattttgacataccatctaatttataaaaatcaataaaaaaggttttggtaaaactttttcatgccagatgctgtttacaacaatgaacatgccaataaaacatttgttcattctgttgtgttattttagtcattaaacttctgtggatgaagaatctgggttaagaatagatttgtcatctttaaatatgacattttgtaatgtgtattggatatctcatttctatgataaaggtatatttacagtaaagttctcataagagaaatgaaaagctgtgttaatatctaactttggggaaccctgtcagtatttcagatccgatttttaccctttttttcttataagaaagataaaattagaaaatactgttagcaaatgtggctctgccatttgaatataatcaccgagaattccatgtcttaaaagtctcctggaatccacaatgaaaaaaaaaatcttttctaaggtatttttctggctaatttttatttgaagaaagctatagcatttagcgaaatttgactgaagtaatgttctgagtttgcattagtgggattggtgatgttctcagaagaaaattggaaacacttgtgatgaattgtctttcagatcacttagattttctgatgtaagaggacagctgtttggttctgatacaggcctgcttacttgggatgtagggttagtaaatggggtttctgctttaaaggactgacttgctatcacacaaaagaggcagacttgtaaacacaatgggctttggagtttggtctgattgggtttggtttagtattcctatgagcgtaaatggtaaaattcttctgatacccactctttagactgtgccttctgctctgttctttgttttatgtttaactgctgtttctaattgcaggtgtattacagatacaaataagagtaaagaaaatatatttcattatagaaaagaaaaaattaaaagcttcttgcttttcagtgcctgatagagtgaaaacacaaagttgcactttaataatttcaataaaagctaatctgtgtcagcctccctctgcttcagagagtcaggtgagcatccataacctaacaggcagagccctagcgatgtggatcaagtttcctgagcccgggggcggtggagcctcatgatctcttatcttttgaggctgaggcaggtcacatgcaacaaattgtgaccctgctccccacaagtcatgcaaaggttttgaagagcttttaccgtggggcagatgaacttgtgtcaaccatgcacaccctgtgagaaccaagtacctgtgtttctaaggcgggcactcaaggtgaggggtgcattctggccaaagaaacaaaagctgtggtttcaggaccatgccgtgtgtagctgatctgtacgggacgtgtatgtaaggaagagcaatcatgatagataagaacagtgtgtgaagcagccttcacactagagtgtttggtcatctcttataatgtaagggaaggtactttaaaattctgggaagatgcgatgaactcatgtcccagtcagaaaataatccaatgaaataagcattggttgccaggccacagttaggaattgtattgtgatacatctagaggccaagagagcaggagagagctaccaacttacactgtggtttaagctaaatgaccgcacagcatcatagcattgcagtgttgttactaaatctggaagtgacctgtgaatgtatggaatacaataaagtcttttattctggttcatttgctagtacttcctttttgattggatactgtagttcttcctctggattttattttgttcagcgtcaaggccctaattttgcaaatgtagtctaaaccacattacgtggactagaggatactctgaattagcaagttttttgtttgctgaataaaactattccatcttaac

SEQ ID NO: 3376 - protein, 157 aa, Homosapiens; identical to SEQ ID NO: 3360

SEQ ID NO: 3377 - DNA, 2243 bp, Homosapiens
gatcgcgttccgggacacacaggcggcggctgcgggcgcagagcggagatgcagcggcttggggccaccctgctgtgcctgctgctggcggcggcggtccccacggcccccgcgcccgctccgacggcgacctcggctccagtcaagcccggcccggctctcagctacccgcaggaggaggccaccctcaatgagatgttccgcgaggttgaggaactgatggaggacacgcagcacaaattgcgcagcgcggtggaagagatttagatctggaccaggctgtgggtagatgtgcaatagaaatagctaatttatttccccaggtgtgtgctttaggcgtgggctgaccaggcttcttcctacatcttcttcccagtaagtttcccctctggcttgacagcatgaggtgttgtgcatttgttcagctcccccaggctgttctccaggcttcacagtctggtgcttgggagagtcaggcagggttaaactgcaggagcagtttgccacccctgtccagattattggctgctttgcctctaccagttggcagacagccgtttgttctacatggctttgataattgtttgaggggaggagatggaaacaatgtggagtctccctctgattggttttggggaaatgtggagaagagtgccctgctttgcaaacatcaacctggcaaaaatgcaacaaatgaattttccacgcagttctttccatgggcataggtaagctgtgccttcagctgttgcagatgaaatgttctgttcaccctgcattacatgtgtttattcatccagcagtgttgctcagctcctacctctgtgccagggcagcattttcatatccaagatcaattccctctctcagcacagcctggggagggggtcattgttctcctcgtccatcagggatctcagaggctcagagactgcaagctgcttgcccaagtcacacagctagtgaagaccagagcagtttcatctggttgtgactctaagctcagtgctctctccactaccccacaccagccttggtgccaccaaaagtgctccccaaaaggaaggagaatgggatttttcttttgaggcatgcacatctggaattaaggtcaaactaattctcacatccctctaaaagtaaactactgttaggaacagcagtgttctcacagtgtggggcagccgtccttctaatgaagacaatgatattgacactgtccctctttggcagttgcattagtaactttgaaaggtatatgactgagcgtagcatacaggttaacctgcagaaacagtacttaggtaattgtagggcgaggattataaatgaaatttgcaaaatcacttagcagcaactgaagacaattatcaaccacgtggagaaaatcaaaccgagcagggctgtgtgaaacatggttgtaatatgcgactgcgaacactgaactctacgccactccacaaatgatgttttcaggtgtcatggactgttgccaccatgtattcatccagagttcttaaagtttaaagttgcacatgattgtataagcatgctttctttgagttttaaattatgtataaacataagttgcatttagaaatcaagcataaatcacttcaactgctcttctgtagttcttggatttcttttcccttttgactttgaataaatgtaaaatcctttcagccagaaaaagtaaaatagaaacaacctgtattaaaaatcttccatagaagcaaatttgccacccaactgaagcacacctctttcagcatcaaaatattttagaaatcttaactatttttggatgggaatttgtcttaaagagtgtaaatgcttcacggccttctgaaaggacaaatggaatatgtatgactctttttttaggggagccttctttaatcaaatgcagttctgggccataagacagtaagatcctcaaggaccataatattagagctactatattgaagtcagctgcgtggcaagtgccagattaggcagtctacctatattcattcatttaatcttcactgaactccatgagcattttcttcatttcacagatgaacaaatggaggtgcaaagagattgacagagtagaagtcagacaaaaacagcatctagtacagtatgtccaggttatagtgattattttaagatcaaatagggagctgttttctattcaatgtcagaaaccatcaggaccaccctacattctggttactcaacagatatctact

SEQ ID NO: 3378 - protein, 72 aa, Homosapiens
MQRLGATLLCLLLAAAVPTAPAPAPTATSAPVKPGPALSYPQEEATLNEMFREVEELMEDTQHKLRSAVEEI

SEQ ID NO: 3379 - DNA, 3268 bp, Homosapiens
cgacgccaaggggagggggctgacctgtgcttggtccaccccaggtaggggctgagagaggcttgaggtggaagtgggggtcgggcactctgacctggtcgaggaggggctagggtttgaaccggggacagagtctaggtgagctggggcttgggagctattagcgtagaggatccgggttcggttgctctggcgagggctccagcatcacaggcggcggctgcgggcgcagagcggagatgcagcggcttggggccaccctgctgtgcctgctgctggcggcggcggtccccacggcccccgcgcccgctccgacggcgacctcggctccagtcaagcccggcccggctctcagctacccgcaggaggaggccaccctcaatgagatgttccgcgaggttgaggaactgatggaggacacgcagcacaaattgcgcagcgcggtggaagagatggaggcagaagaagctgctgctaaagcatcatcagaagtgaacctggcaaacttacctcccagctatcacaatgagaccaacacagacacgaaggttggaaataataccatccatgtgcaccgagaaattcacaagataaccaacaaccagactggacaaatggtcttttcagagacagttatcacatctgtgggagacgaagaaggcagaaggagccacgagtgcatcatcgacgaggactgtgggcccagcatgtactgccagtttgccagcttccagtacacctgccagccatgccggggccagaggatgctctgcacccgggacagtgagtgctgtggagaccagctgtgtgtctggggtcactgcaccaaaatggccaccaggggcagcaatgggaccatctgtgacaaccagagggactgccagccggggctgtgctgtgccttccagagaggcctgctgttccctgtgtgcacacccctgcccgtggagggcgagctttgccatgaccccgccagccggcttctggacctcatcacctgggagctagagcctgatggagccttggaccgatgcccttgtgccagtggcctcctctgccagccccacagccacagcctggtgtatgtgtgcaagccgaccttcgtggggagccgtgaccaagatggggagatcctgctgcccagagaggtccccgatgagtatgaagttggcagcttcatggaggaggtgcgccaggagctggaggacctggagaggagcctgactgaagagatggcgctgagggagcctgcggctgccgccgctgcactgctgggaggggaagagatttagatctggaccaggctgtgggtagatgtgcaatagaaatagctaatttatttccccaggtgtgtgctttaggcgtgggctgaccaggcttcttcctacatcttcttcccagtaagtttcccctctggcttgacagcatgaggtgttgtgcatttgttcagctcccccaggctgttctccaggcttcacagtctggtgcttgggagagtcaggcagggttaaactgcaggagcagtttgccacccctgtccagattattggctgctttgcctctaccagttggcagacagccgtttgttctacatggctttgataattgtttgaggggaggagatggaaacaatgtggagtctccctctgattggttttggggaaatgtggagaagagtgccctgctttgcaaacatcaacctggcaaaaatgcaacaaatgaattttccacgcagttctttccatgggcataggtaagctgtgccttcagctgttgcagatgaaatgttctgttcaccctgcattacatgtgtttattcatccagcagtgttgctcagctcctacctctgtgccagggcagcattttcatatccaagatcaattccctctctcagcacagcctggggagggggtcattgttctcctcgtccatcagggatctcagaggctcagagactgcaagctgcttgcccaagtcacacagctagtgaagaccagagcagtttcatctggttgtgactctaagctcagtgctctctccactaccccacaccagccttggtgccaccaaaagtgctccccaaaaggaaggagaatgggatttttcttttgaggcatgcacatctggaattaaggtcaaactaattctcacatccctctaaaagtaaactactgttaggaacagcagtgttctcacagtgtggggcagccgtccttctaatgaagacaatgatattgacactgtccctctttggcagttgcattagtaactttgaaaggtatatgactgagcgtagcatacaggttaacctgcagaaacagtacttaggtaattgtagggcgaggattataaatgaaatttgcaaaatcacttagcagcaactgaagacaattatcaaccacgtggagaaaatcaaaccgagcagggctgtgtgaaacatggttgtaatatgcgactgcgaacactgaactctacgccactccacaaatgatgttttcaggtgtcatggactgttgccaccatgtattcatccagagttcttaaagtttaaagttgcacatgattgtataagcatgctttctttgagttttaaattatgtataaacataagttgcatttagaaatcaagcataaatcacttcaactgctcttctgtagttcttggatttcttttcccttttgactttgaataaatgtaaaatcctttcagccagaaaaagtaaaatagaaacaacctgtattaaaaatcttccatagaagcaaatttgccacccaactgaagcacacctctttcagcatcaaaatattttagaaatcttaactatttttggatgggaatttgtcttaaagagtgtaaatgcttcacggccttctgaaaggacaaatggaatatgtatgactctttttttaggggagccttctttaatcaaatgcagttctgggccataagacagtaagatcctcaaggaccataatattagagctactatattgaagtcagctgcgtggcaagtgccagattaggcagtctacctatattcattcatttaatcttcactgaactccatgagcattttcttcatttcacagatgaacaaatggaggtgcaaagagattgacagagtagaagtcagacaaaaacagcatctagtacagtatgtccaggttatagtgattattttaagatcaaatagggagctgttttctattcaatgtcagaaaccatcaggaccaccctacattctggttactcaacagatatctact

SEQ ID NO: 3380 - protein, 350 aa, Homosapiens; identical to SEQ ID NO: 454

SEQ ID NO: 3381 - DNA, 3418 bp, Homosapiens
agtgaaggagatggctgccttcggtagagctggtcgctgaggcagaagaggagggcgtggggcgtggggcgtgaggtggccggcgccccggctggccaatggccgggctgcggcccctccgcggggcggggtgggcctggtgggcgggcggggctcggggcgggggcggagagggagcctggtgggcgggcggggcgcgtcttgcgggctccctcgggtaccggcgctgccgcaccccgccgcgctcccgcacccgcggcccgcccaccgcgccgctcccgcatctgcacccgcagcccggcggcctcccggcgggagcgagcagatccagtccggcccgcagcgcaactcggtccagtcggggcggcggctgcgggcgcagagcggagatgcagcggcttggggccaccctgctgtgcctgctgctggcggcggcggtccccacggcccccgcgcccgctccgacggcgacctcggctccagtcaagcccggcccggctctcagctacccgcaggaggaggccaccctcaatgagatgttccgcgaggttgaggaactgatggaggacacgcagcacaaattgcgcagcgcggtggaagagatggaggcagaagaagctgctgctaaagcatcatcagaagtgaacctggcaaacttacctcccagctatcacaatgagaccaacacagacacgaaggttggaaataataccatccatgtgcaccgagaaattcacaagataaccaacaaccagactggacaaatggtcttttcagagacagttatcacatctgtgggagacgaagaaggcagaaggagccacgagtgcatcatcgacgaggactgtgggcccagcatgtactgccagtttgccagcttccagtacacctgccagccatgccggggccagaggatgctctgcacccgggacagtgagtgctgtggagaccagctgtgtgtctggggtcactgcaccaaaatggccaccaggggcagcaatgggaccatctgtgacaaccagagggactgccagccggggctgtgctgtgccttccagagaggcctgctgttccctgtgtgcacacccctgcccgtggagggcgagctttgccatgaccccgccagccggcttctggacctcatcacctgggagctagagcctgatggagccttggaccgatgcccttgtgccagtggcctcctctgccagccccacagccacagcctggtgtatgtgtgcaagccgaccttcgtggggagccgtgaccaagatggggagatcctgctgcccagagaggtccccgatgagtatgaagttggcagcttcatggaggaggtgcgccaggagctggaggacctggagaggagcctgactgaagagatggcgctgagggagcctgcggctgccgccgctgcactgctgggaggggaagagatttagatctggaccaggctgtgggtagatgtgcaatagaaatagctaatttatttccccaggtgtgtgctttaggcgtgggctgaccaggcttcttcctacatcttcttcccagtaagtttcccctctggcttgacagcatgaggtgttgtgcatttgttcagctcccccaggctgttctccaggcttcacagtctggtgcttgggagagtcaggcagggttaaactgcaggagcagtttgccacccctgtccagattattggctgctttgcctctaccagttggcagacagccgtttgttctacatggctttgataattgtttgaggggaggagatggaaacaatgtggagtctccctctgattggttttggggaaatgtggagaagagtgccctgctttgcaaacatcaacctggcaaaaatgcaacaaatgaattttccacgcagttctttccatgggcataggtaagctgtgccttcagctgttgcagatgaaatgttctgttcaccctgcattacatgtgtttattcatccagcagtgttgctcagctcctacctctgtgccagggcagcattttcatatccaagatcaattccctctctcagcacagcctggggagggggtcattgttctcctcgtccatcagggatctcagaggctcagagactgcaagctgcttgcccaagtcacacagctagtgaagaccagagcagtttcatctggttgtgactctaagctcagtgctctctccactaccccacaccagccttggtgccaccaaaagtgctccccaaaaggaaggagaatgggatttttcttttgaggcatgcacatctggaattaaggtcaaactaattctcacatccctctaaaagtaaactactgttaggaacagcagtgttctcacagtgtggggcagccgtccttctaatgaagacaatgatattgacactgtccctctttggcagttgcattagtaactttgaaaggtatatgactgagcgtagcatacaggttaacctgcagaaacagtacttaggtaattgtagggcgaggattataaatgaaatttgcaaaatcacttagcagcaactgaagacaattatcaaccacgtggagaaaatcaaaccgagcagggctgtgtgaaacatggttgtaatatgcgactgcgaacactgaactctacgccactccacaaatgatgttttcaggtgtcatggactgttgccaccatgtattcatccagagttcttaaagtttaaagttgcacatgattgtataagcatgctttctttgagttttaaattatgtataaacataagttgcatttagaaatcaagcataaatcacttcaactgctcttctgtagttcttggatttcttttcccttttgactttgaataaatgtaaaatcctttcagccagaaaaagtaaaatagaaacaacctgtattaaaaatcttccatagaagcaaatttgccacccaactgaagcacacctctttcagcatcaaaatattttagaaatcttaactatttttggatgggaatttgtcttaaagagtgtaaatgcttcacggccttctgaaaggacaaatggaatatgtatgactctttttttaggggagccttctttaatcaaatgcagttctgggccataagacagtaagatcctcaaggaccataatattagagctactatattgaagtcagctgcgtggcaagtgccagattaggcagtctacctatattcattcatttaatcttcactgaactccatgagcattttcttcatttcacagatgaacaaatggaggtgcaaagagattgacagagtagaagtcagacaaaaacagcatctagtacagtatgtccaggttatagtgattattttaagatcaaatagggagctgttttctattcaatgtcagaaaccatcaggaccaccctacattctggttactcaacagatatctact

SEQ ID NO: 3382 - protein, 447 aa, Homosapiens
MAGLRPLRGAGWAWWAGGARGGGGEGAWWAGGARLAGSLGYRRCRTPPRSRTRGPPTAPLPHLHPQPGGLPAGASRSSPARSATRSSRGGGCGRRAEMQRLGATLLCLLLAAAVPTAPAPAPTATSAPVKPGPALSYPQEEATLNEMFREVEELMEDTQHKLRSAVEEMEAEEAAAKASSEVNLANLPPSYHNETNTDTKVGNNTIHVHREIHKITNNQTGQMVFSETVITSVGDEEGRRSHECIIDEDCGPSMYCQFASFQYTCQPCRGQRMLCTRDSECCGDQLCVWGHCTKMATRGSNGTICDNQRDCQPGLCCAFQRGLLFPVCTPLPVEGELCHDPASRLLDLITWELEPDGALDRCPCASGLLCQPHSHSLVYVCKPTFVGSRDQDGEILLPREVPDEYEVGSFMEEVRQELEDLERSLTEEMALREPAAAAAALLGGEEI

SEQ ID NO: 3383 - DNA, 1629 bp, Homosapiens
gatcgcgttccgggacacacaggcggcggctgcgggcgcagagcggagatgcagcggcttggggccaccctgctgtgcctgctgctggcggcggcggtccccacggcccccgcgcccgctccgacggcgacctcggctccagtcaagcccggcccggctctcagctacccgcaggaggaggccaccctcaatgagatgttccgcgaggttgaggaactgatggaggacacgcagcacaaattgcgcagcgcggtggaagagatttagatctggaccaggctgtgggtagatgtgcaatagaaatagctaatttatttccccaggtgtgtgctttaggcgtgggctgaccaggcttcttcctacatcttcttcccagtaagtttcccctctggcttgacagcatgaggtgttgtgcatttgttcagctcccccaggctgttctccaggcttcacagtctggtgcttgggagagtcaggcagggttaaactgcaggagcagtttgccacccctgtccagattattggctgctttgcctctaccagttggcagacagccgtttgttctacatggctttgataattgtttgaggggaggagatggaaacaatgtggagtctccctctgattggttttggggaaatgtggagaagagtgccctgctttgcaaacatcaacctggcaaaaatgcaacaaatgaattttccacgcagttctttccatgggcataggtaagctgtgccttcagctgttgcagatgaaatgttctgttcaccctgcattacatgtgtttattcatccagcagtgttgctcagctcctacctctgtgccagggcagcattttcatatccaagatcaattccctctctcagcacagcctggggagggggtcattgttctcctcgtccatcagggatctcagaggctcagagactgcaagctgcttgcccaagtcacacagctagtgaagaccagagcagtttcatctggttgtgactctaagctcagtgctctctccactaccccacaccagccttggtgccaccaaaagtgctccccaaaaggaaggagaatgggatttttcttttgaggcatgcacatctggaattaaggtcaaactaattctcacatccctctaaaagtaaactactgttaggaacagcagtgttctcacagtgtggggcagccgtccttctaatgaagacaatgatattgacactgtccctctttggcagttgcattagtaactttgaaaggtatatgactgagcgtagcatacaggttaacctgcagaaacagtacttaggtaattgtagggcgaggattataaatgaaatttgcaaaatcacttagcagcaactgaagacaattatcaaccacgtggagaaaatcaaaccgagcagggctgtgtgaaacatggttgtaatatgcgactgcgaacactgaactctacgccactccacaaatgatgttttcaggtgtcatggactgttgccaccatgtattcatccagagttcttaaagtttaaagttgcacatgattgtataagcatgctttctttgagttttaaattatgtataaacataagttgcatttagaaatcaagcataaatcacttcaactgctcttc

SEQ ID NO: 3384 - protein, 72 aa, Homosapiens; identical to SEQ ID NO: 3378

SEQ ID NO: 3385 - DNA, 2654 bp, Homosapiens
cgacgccaaggggagggggctgacctgtgcttggtccaccccaggtaggggctgagagaggcttgaggtggaagtgggggtcgggcactctgacctggtcgaggaggggctagggtttgaaccggggacagagtctaggtgagctggggcttgggagctattagcgtagaggatccgggttcggttgctctggcgagggctccagcatcacaggcggcggctgcgggcgcagagcggagatgcagcggcttggggccaccctgctgtgcctgctgctggcggcggcggtccccacggcccccgcgcccgctccgacggcgacctcggctccagtcaagcccggcccggctctcagctacccgcaggaggaggccaccctcaatgagatgttccgcgaggttgaggaactgatggaggacacgcagcacaaattgcgcagcgcggtggaagagatggaggcagaagaagctgctgctaaagcatcatcagaagtgaacctggcaaacttacctcccagctatcacaatgagaccaacacagacacgaaggttggaaataataccatccatgtgcaccgagaaattcacaagataaccaacaaccagactggacaaatggtcttttcagagacagttatcacatctgtgggagacgaagaaggcagaaggagccacgagtgcatcatcgacgaggactgtgggcccagcatgtactgccagtttgccagcttccagtacacctgccagccatgccggggccagaggatgctctgcacccgggacagtgagtgctgtggagaccagctgtgtgtctggggtcactgcaccaaaatggccaccaggggcagcaatgggaccatctgtgacaaccagagggactgccagccggggctgtgctgtgccttccagagaggcctgctgttccctgtgtgcacacccctgcccgtggagggcgagctttgccatgaccccgccagccggcttctggacctcatcacctgggagctagagcctgatggagccttggaccgatgcccttgtgccagtggcctcctctgccagccccacagccacagcctggtgtatgtgtgcaagccgaccttcgtggggagccgtgaccaagatggggagatcctgctgcccagagaggtccccgatgagtatgaagttggcagcttcatggaggaggtgcgccaggagctggaggacctggagaggagcctgactgaagagatggcgctgagggagcctgcggctgccgccgctgcactgctgggaggggaagagatttagatctggaccaggctgtgggtagatgtgcaatagaaatagctaatttatttccccaggtgtgtgctttaggcgtgggctgaccaggcttcttcctacatcttcttcccagtaagtttcccctctggcttgacagcatgaggtgttgtgcatttgttcagctcccccaggctgttctccaggcttcacagtctggtgcttgggagagtcaggcagggttaaactgcaggagcagtttgccacccctgtccagattattggctgctttgcctctaccagttggcagacagccgtttgttctacatggctttgataattgtttgaggggaggagatggaaacaatgtggagtctccctctgattggttttggggaaatgtggagaagagtgccctgctttgcaaacatcaacctggcaaaaatgcaacaaatgaattttccacgcagttctttccatgggcataggtaagctgtgccttcagctgttgcagatgaaatgttctgttcaccctgcattacatgtgtttattcatccagcagtgttgctcagctcctacctctgtgccagggcagcattttcatatccaagatcaattccctctctcagcacagcctggggagggggtcattgttctcctcgtccatcagggatctcagaggctcagagactgcaagctgcttgcccaagtcacacagctagtgaagaccagagcagtttcatctggttgtgactctaagctcagtgctctctccactaccccacaccagccttggtgccaccaaaagtgctccccaaaaggaaggagaatgggatttttcttttgaggcatgcacatctggaattaaggtcaaactaattctcacatccctctaaaagtaaactactgttaggaacagcagtgttctcacagtgtggggcagccgtccttctaatgaagacaatgatattgacactgtccctctttggcagttgcattagtaactttgaaaggtatatgactgagcgtagcatacaggttaacctgcagaaacagtacttaggtaattgtagggcgaggattataaatgaaatttgcaaaatcacttagcagcaactgaagacaattatcaaccacgtggagaaaatcaaaccgagcagggctgtgtgaaacatggttgtaatatgcgactgcgaacactgaactctacgccactccacaaatgatgttttcaggtgtcatggactgttgccaccatgtattcatccagagttcttaaagtttaaagttgcacatgattgtataagcatgctttctttgagttttaaattatgtataaacataagttgcatttagaaatcaagcataaatcacttcaactgctcttc

SEQ ID NO: 3386 - protein, 350 aa, Homosapiens; identical to SEQ ID NO: 454

SEQ ID NO: 3387 - DNA, 2804 bp, Homosapiens
agtgaaggagatggctgccttcggtagagctggtcgctgaggcagaagaggagggcgtggggcgtggggcgtgaggtggccggcgccccggctggccaatggccgggctgcggcccctccgcggggcggggtgggcctggtgggcgggcggggctcggggcgggggcggagagggagcctggtgggcgggcggggcgcgtcttgcgggctccctcgggtaccggcgctgccgcaccccgccgcgctcccgcacccgcggcccgcccaccgcgccgctcccgcatctgcacccgcagcccggcggcctcccggcgggagcgagcagatccagtccggcccgcagcgcaactcggtccagtcggggcggcggctgcgggcgcagagcggagatgcagcggcttggggccaccctgctgtgcctgctgctggcggcggcggtccccacggcccccgcgcccgctccgacggcgacctcggctccagtcaagcccggcccggctctcagctacccgcaggaggaggccaccctcaatgagatgttccgcgaggttgaggaactgatggaggacacgcagcacaaattgcgcagcgcggtggaagagatggaggcagaagaagctgctgctaaagcatcatcagaagtgaacctggcaaacttacctcccagctatcacaatgagaccaacacagacacgaaggttggaaataataccatccatgtgcaccgagaaattcacaagataaccaacaaccagactggacaaatggtcttttcagagacagttatcacatctgtgggagacgaagaaggcagaaggagccacgagtgcatcatcgacgaggactgtgggcccagcatgtactgccagtttgccagcttccagtacacctgccagccatgccggggccagaggatgctctgcacccgggacagtgagtgctgtggagaccagctgtgtgtctggggtcactgcaccaaaatggccaccaggggcagcaatgggaccatctgtgacaaccagagggactgccagccggggctgtgctgtgccttccagagaggcctgctgttccctgtgtgcacacccctgcccgtggagggcgagctttgccatgaccccgccagccggcttctggacctcatcacctgggagctagagcctgatggagccttggaccgatgcccttgtgccagtggcctcctctgccagccccacagccacagcctggtgtatgtgtgcaagccgaccttcgtggggagccgtgaccaagatggggagatcctgctgcccagagaggtccccgatgagtatgaagttggcagcttcatggaggaggtgcgccaggagctggaggacctggagaggagcctgactgaagagatggcgctgagggagcctgcggctgccgccgctgcactgctgggaggggaagagatttagatctggaccaggctgtgggtagatgtgcaatagaaatagctaatttatttccccaggtgtgtgctttaggcgtgggctgaccaggcttcttcctacatcttcttcccagtaagtttcccctctggcttgacagcatgaggtgttgtgcatttgttcagctcccccaggctgttctccaggcttcacagtctggtgcttgggagagtcaggcagggttaaactgcaggagcagtttgccacccctgtccagattattggctgctttgcctctaccagttggcagacagccgtttgttctacatggctttgataattgtttgaggggaggagatggaaacaatgtggagtctccctctgattggttttggggaaatgtggagaagagtgccctgctttgcaaacatcaacctggcaaaaatgcaacaaatgaattttccacgcagttctttccatgggcataggtaagctgtgccttcagctgttgcagatgaaatgttctgttcaccctgcattacatgtgtttattcatccagcagtgttgctcagctcctacctctgtgccagggcagcattttcatatccaagatcaattccctctctcagcacagcctggggagggggtcattgttctcctcgtccatcagggatctcagaggctcagagactgcaagctgcttgcccaagtcacacagctagtgaagaccagagcagtttcatctggttgtgactctaagctcagtgctctctccactaccccacaccagccttggtgccaccaaaagtgctccccaaaaggaaggagaatgggatttttcttttgaggcatgcacatctggaattaaggtcaaactaattctcacatccctctaaaagtaaactactgttaggaacagcagtgttctcacagtgtggggcagccgtccttctaatgaagacaatgatattgacactgtccctctttggcagttgcattagtaactttgaaaggtatatgactgagcgtagcatacaggttaacctgcagaaacagtacttaggtaattgtagggcgaggattataaatgaaatttgcaaaatcacttagcagcaactgaagacaattatcaaccacgtggagaaaatcaaaccgagcagggctgtgtgaaacatggttgtaatatgcgactgcgaacactgaactctacgccactccacaaatgatgttttcaggtgtcatggactgttgccaccatgtattcatccagagttcttaaagtttaaagttgcacatgattgtataagcatgctttctttgagttttaaattatgtataaacataagttgcatttagaaatcaagcataaatcacttcaactgctcttc

SEQ ID NO: 3388 - protein, 447 aa, Homosapiens; identical to SEQ ID NO: 3382

SEQ ID NO: 3389 - DNA, 844 bp, Homosapiens
gccagcggtgatggcttgaatgccaggctgggggctgggatttttcctgaggatttcacaggacagaggttggcttggaaagaccaaggcggcggctgcgggcgcagagcggagatgcagcggcttggggccaccctgctgtgcctgctgctggcggcggcggtccccacggcccccgcgcccgctccgacggcgacctcggctccagtcaagcccggcccggctctcagctacccgcaggaggaggccaccctcaatgagatgttccgcgaggttgaggaactgatggaggacacgcagcacaaattgcgcagcgcggtggaagagatggaggcagaagaagctgctgctaaagcatcatcagaagtgaacctggcaaacttacctcccagctatcacaatgagaccaacacagacacgaaggttggaaataataccatccatgtgcaccgagaaattcacaagataaccaacaaccagactggacaaatggtcttttcagagacagttatcacatctgtgggagacgaagaaggcagaaggagccacgcagataactggagctgcagaaaggagtctggtggagagggaggcaggctggtggctggacgctggcctccttgctgccacattgtgcataggatgagctgctcttgttaccgtgggatactcagcctggccatctttttggatcccggaccccatctgctgcctgacctagcaggagagccagctgctgcttcacatcccagctccagcactcactagctgtgtgactttggcaagttactcagcctttctgtgcctccatttcctcatctgtaaaatagaaaggaatagtaac

SEQ ID NO: 3390 - protein, 217 aa, Homosapiens
MQRLGATLLCLLLAAAVPTAPAPAPTATSAPVKPGPALSYPQEEATLNEMFREVEELMEDTQHKLRSAVEEMEAEEAAAKASSEVNLANLPPSYHNETNTDTKVGNNTIHVHREIHKITNNQTGQMVFSETVITSVGDEEGRRSHADNWSCRKESGGEGGRLVAGRWPPCCHIVHRMSCSCYRGILSLAIFLDPGPHLLPDLAGEPAAASHPSSSTH

SEQ ID NO: 3391 - DNA, 1958 bp, Homosapiens
cggcgctgccgcaccccgccgcgctcccgcacccgcggcccgcccaccgcgccgctcccgcatctgcacccgcagcccggcggcctcccggcgggagcgagcagatccagtccggcccgcagcgcaactcggtccagtcggggcggcggctgcgggcgcagagcggagatgcagcggcttggggccaccctgctgtgcctgctgctggcggcggcggtccccacggcccccgcgcccgctccgacggcgacctcggctccagtcaagcccggcccggctctcagctacccgcaggaggaggccaccctcaatgagatgttccgcgaggttgaggaactgatggaggacacgcagcacaaattgcgcagcgcggtggaagagatggaggcagaagaagctgctgctaaagcatcatcagaagtgaacctggcaaacttacctcccagctatcacaatgagaccaacacagacacgaaggttggaaataataccatccatgtgcaccgagaaattcacaaggtaagtcatggccagcacttcctcctttctatagcgtccagtcccatcagagaactaaggtttttttgtttttgttttttcatatgtgatatacaagcccaaactacaattgagaatcataaaatacggattgaaaaccagaaggagtaatgttactgttgaaagtggagagacaatgtatcaggatcctaaactgcttttgcatttaagcaatatatttaaccctaggcttcctgccagtccagttgcaaaggaatgtccagggattatcatttgaaaaaaagaaagcaaatggatgtctaaaaagaccctttcctagcattgaatttgtggaattgatctatctcataggtttttatgtatgtctcagtagggattgaactagagaccacgttatggtgaattgaccctcacttttttttaggaggaatgtaaatatgatataccccatttccaaaagagaaaccctctattgctacaaaattaaacattcatttgctggttgtgcgttcaaaattctctggcagatttttccccaaactaccacctgtctgagtgcctcttggtctaacatcatgcatgaagaacaaccaggttcattcccattctgacctgatgaagaaagctctgcgaatctcaaggaacatagcactagcttgcccctggtgtgcaatgtctctgacatgatttggcaggactctgagagcaaactgcctaagactgtgtgctgtgcagatattcagggtcgttgtgagcatcccgttgtgaatatcaaggagcctgccccctcagctcatctcaactcctgtatgcaagggcacagcggcttcacaaaagagcctcacttttattcaagtgcgcaggtaattacttggttgaaacaatagtgtttctgtgccacagagcacaggggatcaatttttatgtgccgttgccttgactataaagtagcttttgtgtggcacttctcccactgcatcgtaatgggctcagttagatggatcagctacagagtgtatgagctccaggtaaatgaatgagtttaccagcagaacataatcctttggcattgctcatctgcgactgaagaatgttttcaaagtgattattttattcttgtcaaaaccaatatcaagtcaccctttctgacaataattaaccaacaggtttggttgcttcttaaagttgcttcttgtaaatgtcagaatacctgagtgtgagtcctaccagtcactagtgtgatttttgaaaaattacttaaatgtcctgattctcactaactgcatttatgaaataaggatatcaacatctacattacagtactgtgcaggtcaaatgacctaaagtatatgaaagttcattgtaaactgtaaaatgcaatgcaaaaaccactgttcttattattactgttattataataaagttatgttattaacaca

SEQ ID NO: 3392 - protein, 166 aa, Homosapiens
MQRLGATLLCLLLAAAVPTAPAPAPTATSAPVKPGPALSYPQEEATLNEMFREVEELMEDTQHKLRSAVEEMEAEEAAAKASSEVNLANLPPSYHNETNTDTKVGNNTIHVHREIHKVSHGQHFLLSIASSPIRELRFFCFCFFICDIQAQTTIENHKIRIENQKE

SEQ ID NO: 3393 - DNA, 1493 bp, Homosapiens
acggcagactaaggccagcggtgatggcttgaatgccaggctgggggctgggatttttcctgaggatttcacaggacagaggttggcttggaaagaccaaggcggcggctgcgggcgcagagcggagatgcagcggcttggggccaccctgctgtgcctgctgctggcggcggcggtccccacggcccccgcgcccgctccgacggcgacctcggctccagtcaagcccggcccggctctcagctacccgcaggaggaggccaccctcaatgagatgttccgcgaggttgaggaactgatggaggacacgcagcacaaattgcgcagcgcggtggaagagatggaggcagaagaagctgctgctaaagcatcatcagaagtgaacctggcaaacttacctcccagctatcacaatgagaccaacacagacacgaaggttggaaataataccatccatgtgcaccgagaaattcacaaggaggaatgtaaatatgatataccccatttccaaaagagaaaccctctattgctacaaaattaaacattcatttgctggttgtgcgttcaaaattctctggcagatttttccccaaactaccacctgtctgagtgcctcttggtctaacatcatgcatgaagaacaaccaggttcattcccattctgacctgatgaagaaagctctgcgaatctcaaggaacatagcactagcttgcccctggtgtgcaatgtctctgacatgatttggcaggactctgagagcaaactgcctaagactgtgtgctgtgcagatattcagggtcgttgtgagcatcccgttgtgaatatcaaggagcctgccccctcagctcatctcaactcctgtatgcaagggcacagcggcttcacaaaagagcctcacttttattcaagtgcgcaggtaattacttggttgaaacaatagtgtttctgtgccacagagcacaggggatcaatttttatgtgccgttgccttgactataaagtagcttttgtgtggcacttctcccactgcatcgtaatgggctcagttagatggatcagctacagagtgtatgagctccaggtaaatgaatgagtttaccagcagaacataatcctttggcattgctcatctgcgactgaagaatgttttcaaagtgattattttattcttgtcaaaaccaatatcaagtcaccctttctgacaataattaaccaacaggtttggttgcttcttaaagttgcttcttgtaaatgtcagaatacctgagtgtgagtcctaccagtcactagtgtgatttttgaaaaattacttaaatgtcctgattctcactaactgcatttatgaaataaggatatcaacatctacattacagtactgtgcaggtcaaatgacctaaagtatatgaaagttcattgtaaactgtaaaatgcaatgcaaaaaccactgttcttattattactgttattataataaagttatgttattaacaca

SEQ ID NO: 3394 - protein, 137 aa, Homosapiens
MQRLGATLLCLLLAAAVPTAPAPAPTATSAPVKPGPALSYPQEEATLNEMFREVEELMEDTQHKLRSAVEEMEAEEAAAKASSEVNLANLPPSYHNETNTDTKVGNNTIHVHREIHKEECKYDIPHFQKRNPLLLQN

SEQ ID NO: 3395 - DNA, 3308 bp, Homosapiens
aagtttcctgaggcctccctagaagccagtatgcttcctatacagcctgcagaaccctcaggattctcacggtgtggctgctgcagggaagtcagatcacctacgtggaggcccaggggcctggctctggaaacaggaggcagaagctgccagtctctagtcttgggcctggcaactggcatagcattacttccgccctattccatcgctcaagcagtcacagaacccacctggcttcagcaggaaggggcaaggaccccgcctcctaatgggagcagtggtgaagaatttacagtcatctttaatctgtcatacccgctgagaagaaatagattttctgccacctgaaaagttgaaagtcacatgtgtttttctcttacatcatggctttcctgaggtgatggcagcagctcagtccagctgccgtctgattgggcgaagggtcctagaagaaggaaatacaggaggggaggaatcttggctatttcaaaatgtcattccttgcatttatgcaaccaaggaatccacgaagtcaaatcatacgtaacaattcaaaagatcttcagaaagatctttttaaaattttttcttttttaaaaaatatattttttcttttgagacaatctcacgttgtcgccccgcctagctagttttgcatgtagctatcaatacttacgtattcatgtttttaaaagtaatatcgtattgtaaacagaatttgtaacctggtttttatgcttaccattttatcttcaaaagatcttggctcactgcaatttctgcctcctgggttcaagcgattctctgtctcagcctcccaagtagctgggattacatgtgtgcaccaccacacctggctaattttttgtattagtagagaccaggtttcactatgttggccaggctggtctcaaattcttggcctcaaatgatcctcctgtcttggcctcccacagtgctgggattacaggcatgagccactgcacccagcacataaagatcttttgattctaacacattttaatgttttctgtttgtgtgtttttttgatattttataacatgaatacatgtcttttttatttcaggaaaaaagagattataaaacaaaaagaaaatactgttacaatgaactgaatgtttgtgtccctataaaatgtttatgttgaagctctaatcccaaagtgatggtattaggaggtagggactttgggaagtaattaggtcatgatggtggagccctcataaacaggatgagtactcttataaaagggaccccaggctgggcatggtagctcatccctgtaatcccagcacttgggaggctgatgtgggcagattgcttgagtccaggagttcgagactagcctgggcaacatggcgaaacctcatctctactaaaaatacaaaaattagctgggcatgggtggtgcatgcctatagtcccagctactctggaggctgaggtgggaagatcacttgagcccaggaggcagaggcagcagtgagctgtgatggcaccactgtactccagcctgggtgacaaagtgagaacctgtctcaaaaacaaaaaacaaaaaagccaccccagagagctcctgtgctttctttccaataagaagttggcagtctgcaagccatagagggcccacaccagaaccatgctggcaccctgatcttggacttccagcttccaaaattgagaaataggcggggtgcagtggctcacgcctgtaatcccaacactttgggaggctgaagcaggcagatcacttgaggtcaggagtttgagaccagcctggccaacatggcaaaaccccgtctctactaaaaatacaaaaattagccaggtgtggtgtcatatgcctgtaatcccagctactcgggaggctgaggcaggagaatcgcttgaaccccggaggtggaggttgcagcaagccaagatcacaccactgcaatccagcctgggctacaaagacagattccatctctaaataaataaatgctgttgtttttaacccacccagtttatgatattttgctatagcagcctcaacaggctaaggcaactgtcctgtggattattaactagttggctctttatacaaattctattgagcacctagcacgtaccaattaccagtctattcactgcaataagcaagccagacagggtccctgtcctcctggagctcatggtctggagaagcacctggactgttctttggtagtggcatctgaatccagagcttcctgagttttgctcctagaggaccttgtgcagagctgcctgctgagggggaacagcccaatggcttcctagcgcacttgccaaatacctgcctccaagccgtctgcttcttccatcaggtccttgcttttggatcccagagacttcatttcctgccctacttttccttccaagagctcagtggagagttctcttcctaaaaaaagagaagcttacttcctcagcagtgttatctctgggtctcaaccataaggctggaattttcccactcagccatggagtagtgttgccctttccatcttcctgaagccagagcatgcaacatgtggtagaagccattagtaagagatgggtagcagtcaagggcatggccccaagtctggactcgtggctactggggagaaagggaaattgatgaagctcctatagtgtgactgctattgtgtgctacattcacagaatccccaactgccctatgatgcagaccaggctctccaaggctgggtcctgagaaatggtactttcttcagatgttaatagattctgtgtgcaattttgggaaattctatagttctttgttcagtgcttttaataggctaatgtgcatggtgaaactcaaagggggaggttatgacaggcagtctcccccaaatttatttcacccaaatgccccatactagattgaatagtgtccccccaaaattcaagtccacccagaacctcggaatgtggccttatttggagatagtctttgcaggcataattaatcaaggtgatgccacgctggagtagagggagccctaacccaatgacggatgtccttagaagacgagaaaacagagacacatggcgaagaaggccatgtgatgagagggtcagagactggagagattcatccacaaaccaaggaacgtcaaggggtgccggaaacccccgaagctaagaagaagcaaaaaaggagctttcccctcagggttcagagggagcatggcctggctgacacctcgattttggacatctagctccagaactgtgagaaaataaatttctgttgtttt

SEQ ID NO: 3396 - protein, 105 aa, Homosapiens
MLPIQPAEPSGFSRCGCCREVRSPTWRPRGLALETGGRSCQSLVLGLATGIALLPPYSIAQAVTEPTWLQQEGARTPPPNGSSGEEFTVIFNLSYPLRRNRFSAT

SEQ ID NO: 3397 - DNA, 1238 bp, Homosapiens
cgaggctgcctgccctggtgtttggcttcaggcagctctgacatcaatctgtcattccagaggacacttttagataaacagtcttgctctgttgccaggctggagtacagtggcacgatcttggctcactgcaatctccacctcccaggttcaagcgattctcctgcctcagactcctgaatagctgggactacaggcatgtgccaccacatccggctaattttttgtatttttttagtagagatgtggtttcaccatgttggccaggatggtctcaatctcctgacctcatgatccacccgccttggcctcccaaagtgctgggattgcaggcatgagccactgtgcccggcctgcaaattcttttaaagtacacttttatagttgtataatgccagtgtagactaacctctgtaacaaccaaccttcaaatgtcaatgtcttaatatcttactttcgtatcaaaatacaaagtgagtcagcagggagactgttccagtgtcattcagggaccctgacttcttccatcctgtggttctaccttaccctgggtactcttcactcaacttatggatgggcaaagggaagcgttcatctgaggtggtcgtgtgagtctgtgtgagcctgcaagcactgcccatctcttacacccacaccccattggccagaactctgttctctgataaacagtggcatcgttgttgtgcttgaccacaagaaaaggaattgtgtgtccaggaaagagagaagatgcatgtagctgaggagtggcagtttcggctgtaaatatataacctcacccaagggggtgcttcacctaaaaacttgcagtaggcagaatgatggtgtccccagtgacgtccacgtcctcatcccagaatctgtgactatgtcaccttacatgcacaaggaccttgcagatgggattaagctgagaatcctgagatggggatgttttcctggataatctgggcaggcccagtatcatcacaaaggtccttagaagtggaagagggaggcaggagagtcagagagaggtttgaagatgccgtactgaaggctttgaaggtggaggaaagggcaaggaacccaggcagcctctggaagcaggaaaaggtgaaggaatgaatccctggaggacgcagccctgccaacacctcaatttcagcacagtgagacccattttggacctctgatctttaagactatgagataataaatctgcattgttgtaagcc

SEQ ID NO: 3398 - protein, 60 aa, Homosapiens [sequence omitted]

SEQ ID NO: 3399 - DNA, 549 bp, Homosapiens
aactgggaggagaacaaggagatcacaggctccaaacaagaccaagctttctcttgggaaatgagcttttctcccagatggagctccatctgcccttgcaggatcagctcccccaagtgtgccctgctccaccctggggttgaccagccagctcagcctgcctgccaatatgatgcctggaattgtctgtggttctgggggccaagccttgtcaggatcatcacgtaagggtctccatcttccttgcagcactgctttctgtccagcctccctgcatacccacttcatcacacagggaatggcaaacactgagctgctgggggaaaggcctgcagggcccttctgagctttgtcgccagctctggggtcagcaggaaagaatgcagtgactgaccagtgatcactgcctcaaggaccacgagaagaggggaaagccctggtatgaatgagcttgtacccttcacctcgctgcgtcttggtttcctcttttacatttttctaaggattcttcagtatggatatgaggaaatataattgtctaatttcatt

SEQ ID NO: 3400 - protein, 58 aa, Homosapiens
MMPGIVCGSGGQALSGSSRKGLHLPCSTAFCPASLHTHFITQGMANTELLGERPAGPF

SEQ ID NO: 3401 - DNA, 421 bp, Homosapiens
cagtccattctgctgagagtgtgagtaccgagaaagcatggcactgggcttgaaggatgaggagttcgccagacacagaggatgaggagagcagcactgtagtaaacttccagccacctgaatgaaattcacctaatttaacaaactgcacgagaagcaaagcaactcccggagcatacacagcaaacaacgttctaagaattttacatatattgacttatggaagcctgacaacatcactgtgatgtaagtgctattgttatttacattttatggatgaggacaaggaggcactgaacagcaaagtatttgccctggatcaccaggatttgggcaaaggtatgctctgagacctttttccccgccttatgcccattacaaggtaccttgaatgaaaaaatacacaagaacattgcatgga

SEQ ID NO: 3402 - protein, 39 aa, Homosapiens
NSPNLTNCTRSKATPGAYTANNVLRILHILTYGSLTTSL

SEQ ID NO: 3403 - DNA, 1111 bp, Homosapiens
aggcgctcggctggctaagcctgcgccgggccgcctcgctcgctcccagctctgtcagtggcccgcggggcccgatcgctgcgcccgcggccagggccgaggcaggcctgacccggggccgggcagcccgcgcgactttcggaacatggcaacccgtgtgtgtctcatcccagaaagagaagactttaaccactgtgatgcctgagaatccagtgagtgtgacgtttctccagatacttcatgctgttcacctgtgtcctcgccgcaccactgccgcacacgactcctgaaccatgggggaaaacgaggatgagaagcaggcccaggcggggcaggtttttgagaactttgtccaggcatccacgtgcaaaggtaccctccaggccttcaacattctcacacgacacctggacctagaccctctggaccacagaaacttttattccaagctcaagtccaaggtgaccacctggaaagccaaagccctgtggtacaaattggataagcgtggttcccacaaagagtataagcgagggaagtcgtgcacgaacaccaagtgtctcatagttgggggaggaccctgtggcttgcgcactgccattgaacttgcctacctgggagccaaagtggtcgtggtggagaagagggactccttctcccggaacaacgtgctacacctctggcctttcaccatccatgaccttcgtggcctgggagccaagaagttctatgggaagttctgtgctggctccatcgaccatatcagtattcgccaactacagctcatcctattcaaggtggccctgatgctgggagttgaaatccatgtgaatgtggagttcgtgaaggttctagagcctcctgaagatcaagaaaatcaaagtacagtataattttctttttctgcctagaaagcagatactacaaaatagaaattccacttgctgcttccaaagggtgtttctgtaggagttattcttactgggagctggttggcataatgccactgaagggtattttactgttttttttttaccattgctatgactttaggtttgctgtttggctccaaggggatttatgattaagccattaaacctgtaatttggtt

SEQ ID NO: 3404 - protein, 199 aa, Homosapiens
MGENEDEKQAQAGQVFENFVQASTCKGTLQAFNILTRHLDLDPLDHRNFYSKLKSKVTTWKAKALWYKLDKRGSHKEYKRGKSCTNTKCLIVGGGPCGLRTAIELAYLGAKVVVVEKRDSFSRNNVLHLWPFTIHDLRGLGAKKFYGKFCAGSIDHISIRQLQLILFKVALMLGVEIHVNVEFVKVLEPPEDQENQSTV

SEQ ID NO: 3405 - DNA, 3913 bp, Homosapiens
aggcgctcggctggctaagcctgcgccgggccgcctcgctcgctcccagctctgtcagtggcccgcggggcccgatcgctgcgcccgcggccagggccgaggcaggcctgacccggggccgggcagcccgcgcgactttcggaacatggcaacccgtgtgtgtctcatcccagaaagagaagactttaaccactgtgatgcctgagaatccagtgagtgtgacgtttctccagatacttcatgctgttcacctgtgtcctcgccgcaccactgccgcacacgactcctgaaccatgggggaaaacgaggatgagaagcaggcccaggcggggcaggtttttgagaactttgtccaggcatccacgtgcaaaggtaccctccaggccttcaacattctcacacgacacctggacctagaccctctggaccacagaaacttttattccaagctcaagtccaaggtgaccacctggaaagccaaagccctgtggtacaaattggataagcgtggttcccacaaagagtataagcgagggaagtcgtgcacgaacaccaagtgtctcatagttgggggaggaccctgtggcttgcgcactgccattgaacttgcctacctgggagccaaagtggtcgtggtggagaagagggactccttctcccggaacaacgtgctacacctctggcctttcaccatccatgaccttcgtggcctgggagccaagaagttctatgggaagttctgtgctggctccatcgaccatatcagtattcgccaactacagctcatcctattcaaggtggccctgatgctgggagttgaaatccatgtgaatgtggagttcgtgaaggttctagagcctcctgaagatcaagaaaatcaaaaaattggctggcgggcagaatttctccctacagaccattctctgtcggagtttgagtttgacgtcatcattggtgccgatggccgcaggaacaccctggaagggttcagaagaaaagaattccgtgggaagctggcgattgccatcaccgccaacttcataaacagaaacagcacagcggaagccaaggtggaagagattagtggtgtggctttcatcttcaatcagaaattttttcaggaccttaaagaagaaacaggcatagatcttgagaacattgtttactacaaggactgcacccactattttgtaatgacagccaagaagcagagcctgctcgacaaaggtgtcatcattaacgactacatcgacacagagatgctgctgtgtgcggagaacgtgaaccaagacaacctgctatcctatgcccgggaagctgcagactttgccaccaactaccagctgccatccttagactttgccatgaaccactatgggcagcctgatgtggccatgtttgactttacctgcatgtatgcctcagagaacgcggccctggtgcgggagcggcaggcgcaccagctgctcgtggcccttgtgggtgacagcttgcttgagccattttggcccatgggtacaggctgtgcccgtggcttcctggcagcctttgacacggcatggatggtgaagagctggaaccagggcacccctcccctggagctgctggctgaaagggaaagtctctaccggctgttacctcagacaaccccggagaacatcaacaagaactttgagcagtacacgttggacccagggacacggtacccaaacctcaactcacactgtgtcaggccccatcaggcaacatttgtatatcactaaggagctggagcactaccctctcgagagactgggctcggtgaggagatctgtcaacctctccaggaaggagtcagatatccggcccagcaagctcctgacctggtgccagcagcagacagagggctaccagcatgtcaacgtcaccgacctgaccacatcctggcgcagtgggttggccctgtgtgccatcatccaccgcttccggcctgagctcatcaactttgactctttgaatgaagatgatgctgtggagaacaaccagctcgcatttgatgtggccgagcgagagtttgggatccctccagtgaccacgggcaaagagatggcatctgcccaggagcctgacaagctcagcatggtcatgtacctctccaagttctacgagctcttccggggcaccccactgaggcccgtggattcttggcgcaaaaactatggagaaaatgctgacctcagcttggccaaatcatccatttctaataactatctcaacctcacatttccaaggaagaggactccacgggtggatggtcaaaccggagagaatgacatgaacaaacggagacggaagggcttcaccaacctggacgagccttcaaacttttccagccgtagcttgggctccaatcaagagtgtgggagcagtaaggaaggtggaaatcagaacaaagtcaagtccatggcgaatcagctgctggccaagtttgaggagagcactcggaacccctcactcatgaagcaggaacgccgtgtctcagggataggtaagccggtcctgtgctcttcctccggccctcctgttcactcttgctgccccaagccggaggaggccacacccagcccatcacctcctctgaaaaggcagttcccctctgtggtcgtgacggggcacgtgctcagagagctcaagcaagtgtctgctggcagtgagtgcctgagcagaccttggagagccagagccaagtctgacctacagctgggtgggacagaaaatttcgctaccctgccttctacccgcccgagggcgcaggctctttccggggtgctgtggcggctgcagcaagtggaggaaaagattctccagaagagggctcagaacttggccaacagggaatttcacacaaagaacattaaggagaaggcggctcaccttgcctccatgtttggacacggggatttcccgcagaataaactactctctaaaggcctgtctcatactcatcctccatctcctccctctcgccttccgtctcctgatccagctgcttcttcctctccatcaactgttgactctgcttctcctgccagaaaggaaaagaagtcaccttcagggttccattttcatcccagccatttgagaacagtgcatcctcagctgacggtagggaaagtgtccagcggaataggggctgcagctgaagtcctggtcaatctgtacatgaatgatcacagacctaaggcccaggccacctctccagacctggaatctatgcgaaagtcatttccccttaacctgggaggcagcgacacgtgttacttctgtaagaaacgtgtgtacgtgatggaacggctgagcgccgagggccacttcttccaccgggagtgtttccgctgcagcatctgtgccaccaccttgcgcctggccgcctacacctttgactgcgatgaaggcaaattttactgcaagcctcacttcattcactgtaaaaccaatagcaaacaacggaagagacgggcagagttgaagcaacaaagagaggaggaggcaacatggcaagagcaggaagcccctcggagagacactcccaccgaaagttcttgcgcagtggccgccattggcaccctggaaggcagccccccagttcatttcagccttccagtgctacacccacttcttggctgacacacttctgctctaagagtctccctccctttatagaatgtcaaccaaagagtgccctcctcccctctcagcctcctctttagctagcctccccatctcatcacaacgcatgtctgtgacctttggtaatcatttacagtgccacacggaaccctgtattttgcacacagcaaaacaaacaatgtttagctttatttatggtatttgatgctgtaaatggaaataaatattgttctttataaagctc

SEQ ID NO: 3406 - protein, 526 aa, Homosapiens
MASAQEPDKLSMVMYLSKFYELFRGTPLRPVDSWRKNYGENADLSLAKSSISNNYLNLTFPRKRTPRVDGQTGENDMNKRRRKGFTNLDEPSNFSSRSLGSNQECGSSKEGGNQNKVKSMANQLLAKFEESTRNPSLMKQERRVSGIGKPVLCSSSGPPVHSCCPKPEEATPSPSPPLKRQFPSVVVTGHVLRELKQVSAGSECLSRPWRARAKSDLQLGGTENFATLPSTRPRAQALSGVLWRLQQVEEKILQKRAQNLANREFHTKNIKEKAAHLASMFGHGDFPQNKLLSKGLSHTHPPSPPSRLPSPDPAASSSPSTVDSASPARKEKKSPSGFHFHPSHLRTVHPQLTVGKVSSGIGAAAEVLVNLYMNDHRPKAQATSPDLESMRKSFPLNLGGSDTCYFCKKRVYVMERLSAEGHFFHRECFRCSICATTLRLAAYTFDCDEGKFYCKPHFIHCKTNSKQRKRRAELKQQREEEATWQEQEAPRRDTPTESSCAVAAIGTLEGSPPVHFSLPVLHPLLG

SEQ ID NO: 3407 - DNA, 6309 bp, Homosapiens
agacagatgtgggtccatgttctagctttgctctgtgtcgccttgagcaagtcatttaactttgttaagcctcaatttctcatctacagaatgagaataataacgattccaaagggccactgtaagagttagatgagaaaacacagagctcttggtgcataatcccgctcagtaatgatcattgttggtatactgctgtgctcaaaggtcactgagcggcagtgattatgtagcattctgcatataggtggtgttcaggtattgctgtgacagttcctctctccttcctgcctgacaggtattcgccaactacagctcatcctattcaaggtggccctgatgctgggagttgaaatccatgtgaatgtggagttcgtgaaggttctagagcctcctgaagatcaagaaaatcaaaaaattggctggcgggcagaatttctccctacagaccattctctgtcggagtttgagtttgacgtcatcattggtgccgatggccgcaggaacaccctggaagggttcagaagaaaagaattccgtgggaagctggcgattgccatcaccgccaacttcataaacagaaacagcacagcggaagccaaggtggaagagattagtggtgtggctttcatcttcaatcagaaattttttcaggaccttaaagaagaaacaggcatagatcttgagaacattgtttactacaaggactgcacccactattttgtaatgacagccaagaagcagagcctgctcgacaaaggtgtcatcattaacgactacatcgacacagagatgctgctgtgtgcggagaacgtgaaccaagacaacctgctatcctatgcccgggaagctgcagactttgccaccaactaccagctgccatccttagactttgccatgaaccactatgggcagcctgatgtggccatgtttgactttacctgcatgtatgcctcagagaacgcggccctggtgcgggagcggcaggcgcaccagctgctcgtggcccttgtgggtgacagcttgcttgagccattttggcccatgggtacaggctgtgcccgtggcttcctggcagcctttgacacggcatggatggtgaagagctggaaccagggcacccctcccctggagctgctggctgaaagggaaagtctctaccggctgttacctcagacaaccccggagaacatcaacaagaactttgagcagtacacgttggacccagggacacggtacccaaacctcaactcacactgtgtcaggccccatcaggcaacatttgtatatcactaaggagctggagcactaccctctcgagagactgggctcggtgaggagatctgtcaacctctccaggaaggagtcagatatccggcccagcaagctcctgacctggtgccagcagcagacagagggctaccagcatgtcaacgtcaccgacctgaccacatcctggcgcagtgggttggccctgtgtgccatcatccaccgcttccggcctgagctcatcaactttgactctttgaatgaagatgatgctgtggagaacaaccagctcgcatttgatgtggccgagcgagagtttgggatccctccagtgaccacgggcaaagagatggcatctgcccaggagcctgacaagctcagcatggtcatgtacctctccaagttctacgagctcttccggggcaccccactgaggcccgtggattcttggcgcaaaaactatggagaaaatgctgacctcagcttggccaaatcatccatttctaataactatctcaacctcacatttccaaggaagaggactccacgggtggatggtcaaaccggagagaatgacatgaacaaacggagacggaagggcttcaccaacctggacgagccttcaaacttttccagccgtagcttgggctccaatcaagagtgtgggagcagtaaggaaggtggaaatcagaacaaagtcaagtccatggcgaatcagctgctggccaagtttgaggagagcactcggaacccctcactcatgaagcaggaatctatgcgaaagtcatttccccttaacctgggaggcagcgacacgtgttacttctgtaagaaacgtgtgtacgtgatggaacggctgagcgccgagggccacttcttccaccgggagtgtttccgctgcagcatctgtgccaccaccttgcgcctggccgcctacacctttgactgcgatgaaggcaaattttactgcaagcctcacttcattcactgtaaaaccaatagcaaacaacggaagagacgggcagagttgaagcaacaaagagaggaggaggcaacatggcaagagcaggaagcccctcggagagacactcccaccgaaagttcttgcgcagtggccgccattggcaccctggaaggcagccccccaggtatctccacctccttctttaggaaggtgctgggctggcccctcaggctgccgagggacctgtgtaactggatgcagggactcctgcaagctgctggcctccatatcagggacaatgcttacaactactgctacatgtacgagctcctgagcctggggctgccactcctctgggcgttctctgaggtcctggcagccatgtacagggaatctgagggctccctcgagagcatctgcaactgggtgctcaggtgcttcccagtcaagctccgctgacatggctggctgccccaaagtgccttcacatttccagggaggcttcagatggcagtgcgtttgcagtttgctcaggctctggccaggaagcctagcattctctaagcaattagctcaaagccaaagaatttcacatgggccacctccgcctggccttatcagggtgaacatctactcacggtgctagggccagggatgatatgaaggatcttttctatagctttgtgagccatacttctgggtttacatttcaatttttttaattttaattagcccagagaaagcatttttttctatgagtgtcaatttttctaaacatgggtttgaagcttataaccagttttataaaccccttgaacactgcagtgagttatcaaagccactgcctgcaaagtggatgatttaagattttacacgcatgaaaatgagtgtgccatctcctgaccagtgccttttgacttaggtacccagatgccacttgtcagcagcaggatactttttacaacacgaaagcataattattttagaagaagagagtagaagggcagaatagaattcaacttacagaagcacggagcagtgtgtggttggctgttatctgtccccctgggaggaggactgttttgctcccttgttttgatgttaaacagtagcttaaaggctttcccccccataccaactcacagccaaatgacaaagaaccgtggggtttcaacagattctacaaacatgcattttcccttcccactaatgggcactgcagggaaagcccattggcatttgaccatggagctgatgcagtgccaaagatgagctctttcaactgatggcattttagcccctgtggctcccagcggatcccccagcccgggctgcaggctgagccaaggctgtgcagggtccatattggtcaggccaagtggagtggaagactctgtccacttatgtggtgtcctttgggactgagggggtttgttagcacatcaggctattgctgggaagcgtggcctgcccagtgagcattgcctgtggacatcctgactgcttagctgctccgctgccacacatatgtggtcaaaacagaaaccaatttcacactgccctgggaaaggaatgggtctgacctccaggggaagctctaccatatcttgactggcagggaaggctgggagtggaagctatttatggactgatccaaaggacatatgcatgagtaagggtaaaaatgagcatgcaggtccacctgtgttcttactctgggtatctagaagagtcctcagctctccctactccacgctgcctagacatacacagctgcagggtctggctgaacaatcaaggggccgccagagaaaggccatctacggtgcgcagtgtatctggagttgctgggcccaagatagctctgtggagttatcactagagatgcctctggattaactaagaggtgtgcctgggtgtgggtgaggagtcagaacctttgagagctttgagatgacagtttctatggggcgggaagaaggaggtgcatttctacaaacacttccctgaaatccttgggaaaaacagaggcatggccgtggccaactctgtgggaactggcgcctctgtccttgttggcactgttctcagtccgatgacttgcattgtgttttctccaatttttgctgggattttaatgttcagcatggtgggaggaacccttgattccttttgtttgagtatagaaagtaaatttttgaggtcatgatgtgaacggccatgttattgtgattatcttcagctcaggataggctgagatgctttgtggagtgttccatgaagcccgagtcggaatctctgactgtcgtgtacagccataaggagactggtttgaattactgtggcgagacagggcgtgcctgtcagaaatctgagatgtttgtacgctctgagatgttgaacctttctggtgggcagcaccgacacccaggggtggacccccgaggatgaatgcctctaggcctccgcaacatattcaagaatgaatgggagacgctagagtaaaatgggggcagagaggatatcagggagcaagatgcaaactgtgtgcatccactctcgtaaacaagtagctggtcacaaccagaaaggttcatctctcctaagcaaacagcgactctttcagaggaagtttccctctttcaatcgtggccttattttcaactccggtgccttctcgtgatgttaatcatttccttttttccccacactaagctctcttttctatctttctctctctttccaatcttacgccatggccatcagttcatttcagccttccagtgctacacccacttcttggctgacacacttctgctctaaggtgactggttttcttgccaattttcaaagagtggtactaacccccaacccgctttccgcaccccgtcctctccgccagcagtactggttgcactaactgtgagtgtcttgcatactgatggactcatttggtggcatggttggctaacagcatggcggggggtgttcagcttgagacccatgcctgtgttcatttcccatggagctggcagcctggtctaccccaagtgcatgccccgcctctcctctctcccttgggtctgcctgcgtgcatgcttctccagttgcgtctgcgaagctacctactttcttgggagggtcgaccttgatcatgaaacaataccatgagggggcctctgtcacctttgaaaagaacactttttgagcagcctcaaaaagctcatacataccagcgccttcttaaattggctctaatgtaaagattgttaatgtcatttatcaaaaccataggtgattatttggagggatttaaaaaacttaattactctcaggcctcatcccaagcttgacacatgctctgtaggttgaacacataatcacaaatattctagcaaatgctgccttggttgcagcctgcactgtagacccaagggttttgctgtggctcttcttatctcccttggctcataaagccccagatgatgccagagcttcaattagagccatcatcatcccaggcagggatatctttgagaaatgactcagttcagccccaggcccctgtgactctgcttaaagcacacatttctgctgactcttgtacctggggcagcaggataatcaccaacacactcttaacgagaaacaacacaccaagcaccgtggagctgtcctaggcaacactcgcggtctcaggctgcggtgggcgtctgtcctgcatgtggcccagaccaccctgacccccgggcctgcctgcctggccctgcatgctgcacgctcactgtatttgtgcagatcctggccagtacaaagtcgttgctcttgtcttatcttctcttacagagtctccctccctttatagaatgtcaaccaaagagtgccctcctcccctctcagcctcctctttagctagcctccccatctcatcacaacgcatgtctgtgacctttggtaatcatttacagtgccacacggaaccctgtattttgcacacagcaaaacaaacaatgtttagctttatttatggtatttgatgctgtaaatggaaataaatattgttctttataaagctc

SEQ ID NO: 3408 - protein, 357 aa, Homosapiens
MASAQEPDKLSMVMYLSKFYELFRGTPLRPVDSWRKNYGENADLSLAKSSISNNYLNLTFPRKRTPRVDGQTGENDMNKRRRKGFTNLDEPSNFSSRSLGSNQECGSSKEGGNQNKVKSMANQLLAKFEESTRNPSLMKQESMRKSFPLNLGGSDTCYFCKKRVYVMERLSAEGHFFHRECFRCSICATTLRLAAYTFDCDEGKFYCKPHFIHCKTNSKQRKRRAELKQQREEEATWQEQEAPRRDTPTESSCAVAAIGTLEGSPPGISTSFFRKVLGWPLRLPRDLCNWMQGLLQAAGLHIRDNAYNYCYMYELLSLGLPLLWAFSEVLAAMYRESEGSLESICNWVLRCFPVKLR

SEQ ID NO: 3409 - DNA, 3344 bp, Homosapiens
gagtggtgctgtgggtttcttggcctgaatggtcacagggagtcttgagggctctcacggggggctcagatccttggcagagtctgtctttccaggctgtggactgtgagacctatgcccagttttatgtccccagaaccatttcctcatctatcccaccaaaccagccctcttctgtgatctcagctccctatcagccgttagttactttcgctcttccagaagggaggccactgtgctgctctggcccatggaatggctattggctgctggctgtttgccatgccgttgagctcttgcaggaacaagaaggcactgagcgtttgcacagctgggcaagtgggaggggtgggggccttcactgggctgggaattgcccctcagtcctccagggtcagaagagcactgagcattgcaaaaggagctttctctacccttggggtgtttgttttaaaactggatttgcagggtttactcgagagatttgcatagtagagagaaacagggaaatgctgggaagttttgtctggggcatcccgcctttgtttgacctggtaggaggataaatctcagggacaggtctcaaggctgcctccaacctcactgttcctccttctatcctgggaatagagctaggcaaccttttggaggtctcctgtgtgcatcccagcttgggggattttaatttgcgtagtgctggtgtggaagaaggatatgagtttcaaatcagacttcagttcagagcaccaattactcactgtgtggccttggacaagtttgtgaacctctctgagcattagtttcttaacctataaagtggagaggacagcaactactcttgagggtaactggaatactgcaatgtcctaacctatgcaaaatgcctgaagtatcctgtaaagcttctctttccccagtggaagagaattcggaaagaaagcttatttacctaaaatgcatgttgatccctctctttctaaaggaaaagaagtcaccttcagggttccattttcatcccagccatttgagaacagtgcatcctcaggtgagttagagcctccctgaacttcagctgcctcacctgcaaagggggattatcagacccacctgcagggctctgggagttaagcgcatatgatcagcagcagtacagtgcctggcaccaggggacgaaggtgggcagacatgtgcttgtactgggagctcacagcccctaaggcctgcctgcgtctcagctctgaacttgtaatttccagacacccttgaacacagtgatttcagttctttgcctgccctcctacccccagccctgggcatatggccgaggaatcagatccaacaggctgtcctctgatgtcttctcatacagggactcctcagtgaggatgtccttgcccaagtggatccaacagaccacctctagccctacgtgtcaaaagctccccttcctgtgagccctctcttctgaggccctgcacattctgctctcactgctgccttacccacgtgggcttgctcgatgctcctggcaggctgtgtggccacaggtggccaaactcagcggagaagtgtagccgggacacctggtaatcttggctcagttccaggcacagggaggaacgtttccattgttctcacacaaacagggcctggagcctgctttttcctgcattcgcagtttctgccttgtgccaggaatgtcgaggtgaataagacaggtcactcagggagtgcaaactgaggaagagatgggccagctcggtgcagtgtgaggaacgctctgatatctaggcggggaccatcattctgcgtggggtcacaggatcacttggaaaatgcctctttgtagaggtctagccatcgtctgcagcctctggcatgggtgcgtgtgacaacagctgcgtcgccgtgtttctatctagattggctctggggagaggaggcagggagctcgtcctgtgtgggccatgccactcttgtgcagaggaaagtgatttaagacaagagagaagtcccagaacatggaaatgcaaagctgcacaaacggccgtgctttgttttaatttttgtgggtacgtagtaggtgtatatatgcatggggtacatgagatgtttgaatacaggcatgcaatgtgaaataagcacatcacagagaatggggtatccattccctcaagcatttatcccaatggccgtgctttggactcactatctgccgcgtgcctcctgcatggcccaggttctttcaggagtcttttcctcagccctgcaaggttggtggaagtctctccattttacagatgaagaagttgaggctcacagaagggaaatggcgtatgtgaggttaacctcgtgtaatgtgagatgattgccctcctgaaatgttctaattaatttgctgaaaaataattagaattcaaaaggcaggaaaaggtaatgaaaagcacctaaattcttgaaaattacaagaatattgagagatatttaaagggttgcaaaagcagtcccatgggactttgaaattactagttcttaaaaaaactagaggctggaacatgatcatctttgaccagatcatcagattgtccaactttgcatttagatgaattgttcccagcctaattataagctcttctcttgaccagcctccccaggagtgtggtgtcttgccatcaatgcatgcttctgtttggtaggaaccactggactggctctaaccctgaggtccacaccagggtgacttatctaggatttctccatgagttgagcatttatttctcaggatcgtgagaacctgagcagtgctactcaaagtgtgggccacaggcagggactgggctgtaatcccatgattatagcaagtgagagagagtaagtgttggaaacttgtagaaccatttgatattgccacacattcaagtgtgtgatcatatttctagtttattttcattgtatctggaaataacaggccataatggattaaatgtttaaaaagaaaaaacctgtcattagccacagatagtttgaggagcatgagctagcagaagccagctagttagttatatcctcactctgagagccggtaaggccgtcctgctgtcaagaaatagaagataacccttgatgcccagggcaacattcaccttcacattggcctttggggttggcttcaaaggctctcccctcatcccaggagacaagttctccatcaccttatttccctgtggcctctcaaagaagtgctggtctacctcttggtgattctggaatgcatttcatcaggttgggaagggcaggtaggagacccagtactgatttccttaagggtgcttccatttcacttt

SEQ ID NO: 3410 - protein, 90 aa, Homosapiens [sequence omitted]

SEQ ID NO: 3411 - DNA, 3984 bp, Homosapiens
ttgggcttcctaatcagaaagggagcaaggagctcctgggctttgtttgcaccagtctgccaggcactcctttccctgctcagccctatttagtgcctgtgctttcgctggaagccagtgagttagccttaggccctgaggatgggcactgctaccaggaataggggagctgtggtgagcccgtcatctgctttgcagttccctggactccctgctttatgtttgaggctttctcttatcagtttagatgtgacctcccaagggcagtcttgggttttgatggaagtcatcatttcacccacacacaagttactgttatttggtgtggtgatggatatcaacccctgcccagaggccctgcagcctccattgctgctctctctggccacatctcccagaggctgggttcagaagctggggaggacctagagcttccctcactctacgatcctgggatcaggagcagtgtttctagaatctcatgctatgtgtatttacctcccacaagaagagactgcagcgataccagggtgggcttccagagcaggcttccagagctgggggtgaggggtgaaggggagagcaagctggggtttgcagaagggggtatgtataattgtgccatgctctttgggctgtcagcttccaccccttccccagctctttgacaccttggtgggggtccaggcatttgtaggtaccctcaggagcacaggcacccacaacctgtcactgggccatgcaccccagggcccaggcagagctgccacctcgctgtctccaagccgaccttgcctggcgctagctctggagcctgctgcagtccccatcctgtcctacctgcccagtgtgcgcccattccacatactgctcttgttggcagggtgggctgtggtcctgctgggagggacctgggagcttcaaggcaggctagggcaggctgaatctagaggagggaagggagggaggaagcaaggtataagaaaaaaactgcttctctctactctcacaccactcacctctggtcaccaaataaagtggggatgtttctccccaccaacaaaatctataaatggaaaggttttccctgagttctacgagcgatccttgcaaattagttaaacccgaggagggaaacacggttactggtttattatacaggatcttatcaaggatagggaggaacagccaggtgaggagaggcacagggcagggcatgtgggaaagggtgggcacctctctgccgtctctggggcactgcccttcaggggcctctgcatggtccaccctccagaagctccaaaccctaaccttttcggtttctatggaggcttcgttatgaagggcatgatcgattacatcactggctgttggtgattaactcaaccttcagcctctccgcccttgtaggtcagtgtgtgggactgaaagttccaaccctttaatcacagggttggttcccctggcaaccagccccatcctgaagctatccaggagctcaagagtcacctcgttccagcaaaggatgctcctatcacccaggaaatcccaggggctttaggatctctgcatcagatgctgctgtcactcagaaaggtacaaaggtcttaggagctctgcctcaggaaccagggggcagagtccaaatatgtatttccgaccatatcacaatatcacacaaggtagtcctggcccagagcctgccaagtgccaggcaataggacacacattctctcgtgcagtccttcccacaaactcgggagacaggtataactctccccattttactaaatgaggaactgagctcagaagttctgtgctttacgccaagtctcagcactggcccatggtggagctgggcccatacccttcccctggtcttcctggtccctgagcagctgcctgcagccctccggggacaaggggtctctggaagagggtggccgcagtctggcagtctacctttctgtctgagggggcttggttcctgattttcttctcctctttgcttggcttgtctaactcgcaggtttttggggcttttgggtaatgattgggtctgagtaccacgtttaccccatgcccctgctgagtgaagctgtgaatgccccagggctggggggcaggagaccagagtacagtctggaatcttgaatttatttgctaagcggcctcagatagaccgttcccttctctgggattcatgtacatatctgtgcaatgagaggctcaggaactttggaaggccttgcaccccacggtgaatgtaacagtcccatggcccacccaggactaaaaggcttttggtttttaatcttttttttcctcgaatttttttattgtgttaaaacatacatgacgtaaaatttaccaccttaacttttttttttttttttttttttttgagacagtgttttactcttgttgctcaggctggagtacaatggtacgatctcagctcactgcaacctctgcctcccaggttcaagtgattctccagcctcagcctcccaagtagctgagattacaggcatgcaccaccatgcctggctaattttgtgtttttagtagagacgtggtttctctatgttggtcaggctggtcttgaactccggacctcaggtgatccacccatctcggcctcccaaagtactgggattacaggcgtgagccaccacacccggccagccttaaccattttttaagggtacggtttagtggtattaaatacatccttcgtgtgcaaccctcaccatcctcccactccagaactcttagttgttgtaaaactggaactctgtacccactaaacaacagcaaccactgttctactgcctgtctctacgattttgactactctaggtaccacatataagtggaatcctagagtacttgtgtttttgcggccacagggttttatttattttcttttctccacctccagaatccccgcgttctgctcctggctggttttgcttctcctgggtcgtggggtgctatttgcatgtgggtgaggagccctctccccatccatcctgcttgtgttttcctcctgggtgctaactggcctctacctttgtctctgtctcctctgcctctgctcttggttagctgacggtagggaaagtgtccagcggaataggggctgcagctgaagtcctggtcaatctgtacatgaatgatcacagacctaaggcccaggccacctctccagacctggaatctatgcgaaagtcatttccccttaacctgggaggcagcgacacgtgttacttctgtaagaaacgtgtgtacgtgatggaacggctgagcgccgagggccacttcttccaccgggagtgtttccgctgcagcatctgtgccaccaccttgcgcctggccgcctacacctttgactgcgatgaaggcaaattttactgcaagcctcacttcattcactgtaaaaccaatagcaaacaacggaagagacgggcagagttgaagcaacaaagagaggaggaggcaacatggcaagagcaggaagcccctcggagagacactcccaccgaaagttcttgcgcagtggccgccattggcaccctggaaggcagccccccagttcatttcagccttccagtgctacacccacttcttggctgacacacttctgctctaaggtgactggttttcttgccaattttcaaagagtggtactaacccccaacccgctttccgcaccccgtcctctccgccagcagtactggttgcactaactagtctccctccctttatagaatgtcaaccaaagagtgccctcctcccctctcagcctcctctttagctagcctccccatctcatcacaacgcatgtctgtgacctttggtaatcatttacagtgccacacggaaccctgtattttgcacacagcaaaacaaacaatgtttagctttatttatggtatttgatgctgtaaatggaaataaatattgttctttataaagctc

SEQ ID NO: 3412 - protein, 154 aa, Homosapiens
MNDHRPKAQATSPDLESMRKSFPLNLGGSDTCYFCKKRVYVMERLSAEGHFFHRECFRCSICATTLRLAAYTFDCDEGKFYCKPHFIHCKTNSKQRKRRAELKQQREEEATWQEQEAPRRDTPTESSCAVAAIGTLEGSPPVHFSLPVLHPLLG

SEQ ID NO: 3413 - DNA, 5240 bp, Homosapiens
ctcaggagcacaggcacccacaacctgtcactgggccatgcaccccagggcccaggcagagctgccacctcgctgtctccaagccgaccttgcctggcgctagctctggagcctgctgcagtccccatcctgtcctacctgcccagtgtgcgcccattccacatactgctcttgttggcagggtgggctgtggtcctgctgggagggacctgggagcttcaaggcaggctagggcaggctgaatctagaggagggaagggagggaggaagcaaggtataagaaaaaaactgcttctctctactctcacaccactcacctctggtcaccaaataaagtggggatgtttctccccaccaacaaaatctataaatggaaaggttttccctgagttctacgagcgatccttgcaaattagttaaacccgaggagggaaacacggttactggtttattatacaggatcttatcaaggatagggaggaacagccaggtgaggagaggcacagggcagggcatgtgggaaagggtgggcacctctctgccgtctctggggcactgcccttcaggggcctctgcatggtccaccctccagaagctccaaaccctaaccttttcggtttctatggaggcttcgttatgaagggcatgatcgattacatcactggctgttggtgattaactcaaccttcagcctctccgcccttgtaggtcagtgtgtgggactgaaagttccaaccctttaatcacagggttggttcccctggcaaccagccccatcctgaagctatccaggagctcaagagtcacctcgttccagcaaaggatgctcctatcacccaggaaatcccaggggctttaggatctctgcatcagatgctgctgtcactcagaaaggtacaaaggtcttaggagctctgcctcaggaaccagggggcagagtccaaatatgtatttccgaccatatcacaatatcacacaaggtagtcctggcccagagcctgccaagtgccaggcaataggacacacattctctcgtgcagtccttcccacaaactcgggagacaggtataactctccccattttactaaatgaggaactgagctcagaagttctgtgctttacgccaagtctcagcactggcccatggtggagctgggcccatacccttcccctggtcttcctggtccctgagcagctgcctgcagccctccggggacaaggggtctctggaagagggtggccgcagtctggcagtctacctttctgtctgagggggcttggttcctgattttcttctcctctttgcttggcttgtctaactcgcaggtttttggggcttttgggtaatgattgggtctgagtaccacgtttaccccatgcccctgctgagtgaagctgtgaatgccccagggctggggggcaggagaccagagtacagtctggaatcttgaatttatttgctaagcggcctcagatagaccgttcccttctctgggattcatgtacatatctgtgcaatgagaggctcaggaactttggaaggccttgcaccccacggtgaatgtaacagtcccatggcccacccaggactaaaaggcttttggtttttaatcttttttttcctcgaatttttttattgtgttaaaacatacatgacgtaaaatttaccaccttaacttttttttttttttttttttttttgagacagtgttttactcttgttgctcaggctggagtacaatggtacgatctcagctcactgcaacctctgcctcccaggttcaagtgattctccagcctcagcctcccaagtagctgagattacaggcatgcaccaccatgcctggctaattttgtgtttttagtagagacgtggtttctctatgttggtcaggctggtcttgaactccggacctcaggtgatccacccatctcggcctcccaaagtactgggattacaggcgtgagccaccacacccggccagccttaaccattttttaagggtacggtttagtggtattaaatacatccttcgtgtgcaaccctcaccatcctcccactccagaactcttagttgttgtaaaactggaactctgtacccactaaacaacagcaaccactgttctactgcctgtctctacgattttgactactctaggtaccacatataagtggaatcctagagtacttgtgtttttgcggccacagggttttatttattttcttttctccacctccagaatccccgcgttctgctcctggctggttttgcttctcctgggtcgtggggtgctatttgcatgtgggtgaggagccctctccccatccatcctgcttgtgttttcctcctgggtgctaactggcctctacctttgtctctgtctcctctgcctctgctcttggttagctgacggtagggaaagtgtccagcggaataggggctgcagctgaagtcctggtcaatctgtacatgaatgatcacagacctaaggcccaggccacctctccagacctggtaaggacatgcacccccagccttcacccacagacactggctctggcatcccagggcgggcacatgggatgtcgagaggatgccctggccctcccgaggctcctcttctcttggaacaagagggggctgagaatgagctgaatcagggcagaagttaaaaggagcctgcttttccttaaagacagatctcactcaggtcccctgtggtctttttgaaaatagagatcttcctgctctctgtggctttggagaacggcctggtagaaaggcccaggtgaggccgtgagcataattgaatggccctcactttcagtgtttagtgtccaacctgaacagactctgtgcattggattgagaaaaaggtcatggggaaaatagccctttgatttgaattctccctttctctaaactgggctgctcgctgccatcaccaggaattttagttgaccattctttctgtttccttttggcccattgccctggaatcgcccaggggtactgctgccctggcccgtgccctcccaattcacaactaggactataactgaccagatttgatgccacaagctttcctcacccaacctgtgccactgcaggggaacaggacacctaaaacatcctcagcgggccagtttcaggacctttgtccagaaccaggtgacacttaatcccaaggacagatcctggaaagaatatcctggggtggacagggttgtgagtaaagcccactccgtcagaccaggatcactcccaccccaaaaccagagcagccaacctcggggagagcccctcccgggcccaccttgttgtctcgggcctgtctgggagtacagttaacagaagcccctgcagggttggggtctgggttgggggtgtatcttcctacccctccctctttgctgcagtggcagtagcaggaagcagaagcccacgaggtccccagcattcagtgtggaatttctaaaagccttggcctggcatttgaaggctcgggataagccataatacacccactcttctctcccgatccccaggaatctatgcgaaagtcatttccccttaacctgggaggcagcgacacgtgttacttctgtaagaaacgtgtgtacgtgatggaacggctgagcgccgagggccacttcttccaccgggagtgtttccgctgcagcatctgtgccaccaccttgcgcctggccgcctacacctttgactgcgatgaaggcaaattttactgcaagcctcacttcattcactgtaaaaccaatagcaaacaacggaagagacgggcagagttgaagcaacaaagagaggaggaggcaacatggcaagagcaggaagcccctcggagagacactcccaccgaaagttcttgcgcagtggccgccattggcaccctggaaggcagccccccagttcatttcagccttccagtgctacacccacttcttggctgacacacttctgctctaaggtgactggttttcttgccaattttcaaagagtggtactaacccccaacccgctttccgcaccccgtcctctccgccagcagtactggttgcactaactgtgagtgtcttgcatactgatggactcatttggtggcatggttggctaacagcatggcggggggtgttcagcttgagacccatgcctgtgttcatttcccatggagctggcagcctggtctaccccaagtgcatgccccgcctctcctctctcccttgggtctgcctgcgtgcatgcttctccagttgcgtctgcgaagctacctactttcttgggagggtcgaccttgatcatgaaacaataccatgagggggcctctgtcacctttgaaaagaacactttttgagcagcctcaaaaagctcatacataccagcgccttcttaaattggctctaatgtaaagattgttaatgtcatttatcaaaaccataggtgattatttggagggatttaaaaaacttaattactctcaggcctcatcccaagcttgacacatgctctgtaggttgaacacataatcacaaatattctagcaaatgctgccttggttgcagcctgcactgtagacccaagggttttgctgtggctcttcttatctcccttggctcataaagccccagatgatgccagagcttcaattagagccatcatcatcccaggcagggatatctttgagaaatgactcagttcagccccaggcccctgtgactctgcttaaagcacacatttctgctgactcttgtacctggggcagcaggataatcaccaacacactcttaacgagaaacaacacaccaagcaccgtggagctgtcctaggcaacactcgcggtctcaggctgcggtgggcgtctgtcctgcatgtggcccagaccaccctgacccccgggcctgcctgcctggccctgcatgctgcacgctcactgtatttgtgcagatcctggccagtacaaagtcgttgctcttgtcttatcttctcttacagagtctccctccctttatagaatgtcaaccaaagagtgccctcctcccctctcagcctcctctttagctagcctccccatctcatcacaacgcatgtctgtgacctttggtaatcatttacagtgccacacggaaccctgtattttgcacacagcaaaacaaacaatgtttagctttatttatggtatttgatgctgtaaatggaaataaatattgttctttataaagctc

SEQ ID NO: 3414 - protein, 137 aa, Homosapiens
MRKSFPLNLGGSDTCYFCKKRVYVMERLSAEGHFFHRECFRCSICATTLRLAAYTFDCDEGKFYCKPHFIHCKTNSKQRKRRAELKQQREEEATWQEQEAPRRDTPTESSCAVAAIGTLEGSPPVHFSLPVLHPLLG

SEQ ID NO: 3415 - DNA, 8192 bp, Homosapiens
tctcatgatgccggcagcagtcaccctcattgcaaaggcagtggtgccgagtgaggttcccgagtggattttaagaagacaggaagacctttgaagaggtggtgctgatttccttggctggcgggaactctgtctggctgttgcatgcatcacttttgtgtgggttattttgttcctctgtggatttggaagcatcgctgaaggagagagaggattttatttctgggaaatggaatcggtttctgagtccagccaacagcagaagagaaagccagttatccacggactggaagatcaaaagaggatctacacagactgggccaatcattacctagccaaatccggccacaagcgtctcatcagggatctccagcaagatgtgacagatggcgtcctcctggcccagattatccaggttgtggcaaatgaaaagattgaagacatcaatggctgtccgaagaacagatcccaaatgattgaaaacatagatgcctgcttgaatttcctggcagctaagggaataaacatccaggggctgtctgcagaagagatcaggaatggaaacctcaaggccattctaggcctcttcttcagcctctcccgatacaagcagcagcagcagcagccccagaagcagcacctctcctcacctctgccgcccgccgtatcccaggtggccggggccccctcccagtgccaggctggcacccctcagcagcaggtgccagtcactccccaagccccgtgccagcctcaccagccagcgccacatcagcagtcaaaagcacaagctgaaatgcagtccagacttccaggtcctaccgcgagggtatccgctgcaggcagcgaggccaaaacacgcggagggtcaactactgctaacaaccgacgcagccagagctttaacaactatgataaatccaaaccagtcacctccccacccccaccgccaagcagccacgagaaagagcctttggcaagttcagcctcctcccaccccggaatgagtgacaatgcacctgcttccttggagagcggcagcagctccacccctactaattgcagtacctcctcggccatcccgcagcccggtgcagccaccaagccttggcgcagcaaatccctcagcgtgaagcacagtgccacggtatccatgctctcggtcaagcctcctgggcctgaggcccccaggcccacacctgaagccatgaagccggcccccaacaatcagaagtccatgctggaaaagctgaaacttttcaacagtaaagggggctcaaaggcaggtgaggggccggggtcccgggacacaagctgtgagcggctggagactctgcccagcttcgaagagagcgaggagctggaggccgccagtcgcatgctcaccaccgtgggccctgcttccagcagccccaagattgcactcaagggcattgcccagaggacttttagccgggcactgaccaacaagaagagttctctgaaaggcaatgagaaagagaaggagaaacaacagcgggagaaggataaggagaaaagcaaggaccttgccaagagagcctctgtgacggagaggctggacctcaaggaggagccaaaagaagaccccagtggagcagctgtgcccgagatgccaaaaaagtcctccaagattgccagcttcatccccaaaggggggaagctcaacagtgccaagaaggagcccatggccccttcccacagtggaataccaaaaccaggaatgaaaagcatgcccgggaaatccccaagtgccccagcgccttccaaggaaggggagcggagccggagtgggaagctgagctcaggactcccccagcagaagccccagctggacggcagacactccagttcctcttccagcctggcgtcctcagaaggaaaaggcccaggagggaccaccctgaaccacagcatcagcagccagactgtcagtgggtctgtcgggaccacccagaccacaggaagcaataccgtcagtgttcagctacctcagccccagcagcaatacaaccatcccaacactgccacggttgcacctttcctgtacaggtctcagacggacactgaagggaatgttactgccgagtcaagctcaacaggtgtgagcgtggagcccagccacttcaccaagactggacagcctgctctggaagaactcactggggaagatcctgaggctcggcggctgcggacagtgaagaacatcgctgatctgcggcagaatttggaggaaaccatgtccagtttaaggggaactcaggttacacacagcacattggaaaccacgtttgacaccaatgtcaccacggagatgagtggccgtagcatactcagcttgacagggaggcccacacctctgtcctggagactgggccagtccagccctcggctccaagcaggagacgccccctcaatgggcaatgggtatccccctcgagccaacgccagcaggttcatcaacactgagtcaggtcgctatgtgtactccgcccctctgagaaggcagctggcctcccggggcagtagtgtctgccatgtggacgtctcagacaaggcaggagatgagatggacctggaaggcatcagcatggatgcccccggctacatgagcgacggggatgttctgagcaagaacatccggaccgatgacattacaagcggatacatgactgatggtggacttggcctctatacccgtcgcctgaaccggctccctgatgggatggctgtggtacgggagaccctgcaacgaaatacctccctgggcctcggagacgctgacagctgggacgacagcagctccgtcagcagcggcatcagcgacaccatagacaacctcagcactgatgacatcaacaccagctcctccatcagctcttatgccaacacacctgcctcctctcgaaaaaacctggatgtgcagactgatgctgagaagcactcacaggtggagaggaattccctgtggtctggtgatgatgtcaagaaatcagacggaggctcagacagcggcataaaaatggagccaggttccaagtggaggcggaatccttctgatgtgtctgacgagtccgacaaaagcacgtcgggcaagaagaatcctgtcatctcccagacaggctcatggcggcgaggcatgacagctcaggtgggcatcaccatgccaaggacgaagccttcagccccggcaggcgcactgaagaccccaggaactggaaaaacagacgacgcaaaggtgtctgagaaaggaaggctttctcctaaagcctcccaggtgaagcgctccccatcagatgcaggccggagcagtggtgacgaatccaaaaagcccctccccagcagctctaggacacctactgccaatgccaacagctttgggttcaagaagcagagtggttccgccgccggcctggccatgatcacagccagcggggtgactgtcaccagcaggtcagccacactgggcaaaatcccaaagtcatctgcactcgtcagtcggtctgctggtcggaagtcaagtatggatggggctcagaatcaggatgacgggtatctagccctaagctcccggacaaaccttcagtaccggagtttgccgaggcccagtaagtccaacagccggaacggggctgggaacaggtctagcaccagcagcatagattccaacattagcagcaagtccgcaggcctgccagtgcccaaactgagggagccttccaaaacagccctaggcagctctctaccaggtctggtcaaccaaacagacaaggagaaaggcatctcatcagacaacgagagtgtggcttcctgtaactcggtgaaagtgaatccggcagcccagcctgtgtccagtccggctcagaccagtctccagcctggagccaagtacccagatgtggcctctcccacactccgcagactctttggtgggaagcctaccaagcaagtgcccatcgccacagctgaaaacatgaaaaattcggtggtcatctccaatcctcatgccaccatgactcagcaaggtaacctagactccccgtcaggcagtggcgtcctgagcagtgggagcagcagtcctctctacagcaagaatgtggacctcaaccagtctccgctagcctccagccccagctcagcccactcggccccttccaacagcctcacctggggcaccaacgccagcagctcctccgcagttagcaaggatggcctgggctttcagtctgtcagcagcctccacaccagctgtgagtccatcgacatctccctcagcagtggaggggtccccagccacaattcttccactggcctcatcgcctcctccaaggacgactccttgactccctttgtcagaactaacagtgtgaagaccacactgtcagaaagccctctctcttcccctgctgctagccctaagttctgcagaagtactctgcccaggaaacaggacagtgacccgcaccttgataggaacactttgcctaagaaaggactcaggtatactcccacctcccagcttcgcacgcaagaagatgcaaaagaatggttacggtcccattctgcaggaggccttcaggacaccgctgccaattcccccttttcctctggctccagcgtgacttctccctccggaacaagattcaacttttcccagcttgcgagtcccaccactgtcacccagatgagcttgtccaacccgaccatgctgaggactcacagcctctccaatgctgatgggcagtatgatccatacactgacagccgcttccggaatagctccatgtccctggatgagaagagcagaaccatgagccgttcaggctcattccgggatgggtttgaagaagttcatggatcctcactctccttggtttccagcacatcgtcagtttattctacaccagaagaaaaatgccagtcagagattcgcaagctgcggcgggaactggatgcctcccaggagaaagtttcagctttgaccacccagctgacagcaaatgctcaccttgtggcagcctttgaacagagtcttggtaacatgacaatcaggctccagagtctgaccatgacagctgagcagaaggactcagaactgaatgagttaagaaaaaccattgagctgctaaagaaacagaacgcagctgcccaggctgccattaatggagtaattaacacacctgagctcaactgcaaaggaaacggcactgcccagtctgcagacctccgcatccgcaggcagcactcctcagacagcgtctccagcatcaacagtgccaccagccactccagcgtgggcagcaacatagagagtgactcaaagaagaagaagcggaagaactggttacgcagctccttcaagcaagctttcgggaagaagaagtccccaaaatctgcgtcctctcattcagatattgaggagatgacggattcttctttgccttcctcaccaaagttaccgcacaatgggtccacaggttccaccccactgctgaggaattctcactccaactctctaatttcagaatgcatggatagtgaagctgagaccgtcatgcagctccgaaatgagttaagagacaaggagatgaagctgacggatatccgcttagaagctctcagttctgcccaccagctggaccagctccgggaggccatgaacaggatgcagagtgaaatagagaagctgaaagctgagaatgatcggctgaagtcagagtctcaaggcagtggctgcagccgggctccttcccaagtgtccatctctgcctccccgaggcagtccatgggcctctcccagcacagcttgaacctcactgagtcaaccagcctggacatgttgctggatgacactggtgaatgctcggctcggaaggaaggaggcaggcatgttaagatagttgtcagctttcaggaggaaatgaagtggaaggaggattccagaccacatctctttcttattggctgcattggagttagtggcaagacgaagtgggatgtgctcgatggggtggttagacggctgttcaaagaatacatcattcatgtcgacccagtgagtcagctagggctgaattcagacagcgttcttggctacagcattggagaaatcaagcgcagcaacacttccgaaacaccggagctgcttccttgtggctatctggttggagagaacacgaccatctcagtgactgtgaaagggctcgcagaaaacagcctggactcactggtgtttgagtccttgattcccaagcccatcctgcagcgctacgtctccctcctgatagagcaccgtcggatcattctctctggccccagcggcactgggaaaacctacctggccaaccggctgtctgagtatatagtgcttcgagagggacgggagttgacagacggggttatcgccacctttaacgtggaccataagtccagcaaggaattgcgccagtacctgtccaaccttgctgaccagtgcaacagtgagaacaatgctgtggacatgcccctcgtcatcatcctggacaacctacaccacgtgagctctctgggagagatcttcaatgggctgctcaactgcaagtaccacaaatgcccttacataattggcacaatgaaccaggctacctcttcgactcccaacctgcagcttcaccataacttcagatgggtgctttgtgccaaccacacggagcctgtgaagggtttccttggccgattcctgaggaggaagctcatggaaacagagatcagtgggcgggtgcgcaatatggagctggtaaaaatcattgactggattcccaaggtctggcatcacctcaaccgcttcctggaggctcacagttcctcggacgtcaccatcggcccccggctcttcctgtcatgccccatcgatgtggacggctcgagagtgtggttcaccgacttgtggaactattccattatcccctatctcctggaagccgtcagagaaggactccagctctatggaaggcgcgccccctgggaggatcctgccaagtgggtgatggacacatatccatgggcagccagcccacaacagcacgagtggcctcccctgctgcagttacggcctgaggatgtcggcttcgacggctactccatgcctcgggagggatcgacaagcaagcagatgccccccagtgatgctgaaggtgacccgctgatgaacatgctgatgaggctgcaggaggcagccaactactccagcccccagagctatgacagcgactccaacagcaacagccatcacgatgacatcttggactcctctttggagtccactctgtgacaggggcccggagcccagcgccctcctcttctcctcaccgcattccacctgcatcccccacatcaccctgaagatgacttcctgagccagcccccagccacagccttagagctgcgggaacaccgagaccccccgtccttcagcctcgacctgggtgcaggcatcccgggccagctgcctgcggaccgcttccttccacagcgagaactgcactaccttctgttgtactttaattattgttttgccttgttgctgtgacctccctaagacactgaagatacttctcgggaaaggatcatcgccgttgaaatgaaaagagagacagagagaaaaaaaaaaagagaacccacatgaagctctgaaaccaaacagcatcctgccatgagcttcccagagacagaagagactggagcaaagtcggaaacacagagaagcacggcttcccctcagcacagaccctccagactgggtctcagagccgtgccacccaccctcccacacagccggccacagggagaactggtgctaaccagggtgcttgctttggtcacgttcaacgcactacagagctacgacacagggaaaccttaggagcaaataaaccgtgctttcatgttttttaaatggtgctttccttacccgagaggtattttgcctgttccaatcaaaccaccccattcaggtccatcagcctctgattaatatccgtgagagtgagtgacggagtgagagtgtgagcgagtggatgtggctgtcagtgcagaacagcatgtgtctctttccttctgatatatgaatgaatcaggtttttttttttttttttctgcaaacactgtgtatagtgagacttgttctactttggaga

SEQ ID NO: 3416 - protein, 2365 aa, Homosapiens
MESVSESSQQQKRKPVIHGLEDQKRIYTDWANHYLAKSGHKRLIRDLQQDVTDGVLLAQIIQVVANEKIEDINGCPKNRSQMIENIDACLNFLAAKGINIQGLSAEEIRNGNLKAILGLFFSLSRYKQQQQQPQKQHLSSPLPPAVSQVAGAPSQCQAGTPQQQVPVTPQAPCQPHQPAPHQQSKAQAEMQSRLPGPTARVSAAGSEAKTRGGSTTANNRRSQSFNNYDKSKPVTSPPPPPSSHEKEPLASSASSHPGMSDNAPASLESGSSSTPTNCSTSSAIPQPGAATKPWRSKSLSVKHSATVSMLSVKPPGPEAPRPTPEAMKPAPNNQKSMLEKLKLFNSKGGSKAGEGPGSRDTSCERLETLPSFEESEELEAASRMLTTVGPASSSPKIALKGIAQRTFSRALTNKKSSLKGNEKEKEKQQREKDKEKSKDLAKRASVTERLDLKEEPKEDPSGAAVPEMPKKSSKIASFIPKGGKLNSAKKEPMAPSHSGIPKPGMKSMPGKSPSAPAPSKEGERSRSGKLSSGLPQQKPQLDGRHSSSSSSLASSEGKGPGGTTLNHSISSQTVSGSVGTTQTTGSNTVSVQLPQPQQQYNHPNTATVAPFLYRSQTDTEGNVTAESSSTGVSVEPSHFTKTGQPALEELTGEDPEARRLRTVKNIADLRQNLEETMSSLRGTQVTHSTLETTFDTNVTTEMSGRSILSLTGRPTPLSWRLGQSSPRLQAGDAPSMGNGYPPRANASRFINTESGRYVYSAPLRRQLASRGSSVCHVDVSDKAGDEMDLEGISMDAPGYMSDGDVLSKNIRTDDITSGYMTDGGLGLYTRRLNRLPDGMAVVRETLQRNTSLGLGDADSWDDSSSVSSGISDTIDNLSTDDINTSSSISSYANTPASSRKNLDVQTDAEKHSQVERNSLWSGDDVKKSDGGSDSGIKMEPGSKWRRNPSDVSDESDKSTSGKKNPVISQTGSWRRGMTAQVGITMPRTKPSAPAGALKTPGTGKTDDAKVSEKGRLSPKASQVKRSPSDAGRSSGDESKKPLPSSSRTPTANANSFGFKKQSGSAAGLAMITASGVTVTSRSATLGKIPKSSALVSRSAGRKSSMDGAQNQDDGYLALSSRTNLQYRSLPRPSKSNSRNGAGNRSSTSSIDSNISSKSAGLPVPKLREPSKTALGSSLPGLVNQTDKEKGISSDNESVASCNSVKVNPAAQPVSSPAQTSLQPGAKYPDVASPTLRRLFGGKPTKQVPIATAENMKNSVVISNPHATMTQQGNLDSPSGSGVLSSGSSSPLYSKNVDLNQSPLASSPSSAHSAPSNSLTWGTNASSSSAVSKDGLGFQSVSSLHTSCESIDISLSSGGVPSHNSSTGLIASSKDDSLTPFVRTNSVKTTLSESPLSSPAASPKFCRSTLPRKQDSDPHLDRNTLPKKGLRYTPTSQLRTQEDAKEWLRSHSAGGLQDTAANSPFSSGSSVTSPSGTRFNFSQLASPTTVTQMSLSNPTMLRTHSLSNADGQYDPYTDSRFRNSSMSLDEKSRTMSRSGSFRDGFEEVHGSSLSLVSSTSSVYSTPEEKCQSEIRKLRRELDASQEKVSALTTQLTANAHLVAAFEQSLGNMTIRLQSLTMTAEQKDSELNELRKTIELLKKQNAAAQAAINGVINTPELNCKGNGTAQSADLRIRRQHSSDSVSSINSATSHSSVGSNIESDSKKKKRKNWLRSSFKQAFGKKKSPKSASSHSDIEEMTDSSLPSSPKLPHNGSTGSTPLLRNSHSNSLISECMDSEAETVMQLRNELRDKEMKLTDIRLEALSSAHQLDQLREAMNRMQSEIEKLKAENDRLKSESQGSGCSRAPSQVSISASPRQSMGLSQHSLNLTESTSLDMLLDDTGECSARKEGGRHVKIVVSFQEEMKWKEDSRPHLFLIGCIGVSGKTKWDVLDGVVRRLFKEYIIHVDPVSQLGLNSDSVLGYSIGEIKRSNTSETPELLPCGYLVGENTTISVTVKGLAENSLDSLVFESLIPKPILQRYVSLLIEHRRIILSGPSGTGKTYLANRLSEYIVLREGRELTDGVIATFNVDHKSSKELRQYLSNLADQCNSENNAVDMPLVIILDNLHHVSSLGEIFNGLLNCKYHKCPYIIGTMNQATSSTPNLQLHHNFRWVLCANHTEPVKGFLGRFLRRKLMETEISGRVRNMELVKIIDWIPKVWHHLNRFLEAHSSSDVTIGPRLFLSCPIDVDGSRVWFTDLWNYSIIPYLLEAVREGLQLYGRRAPWEDPAKWVMDTYPWAASPQQHEWPPLLQLRPEDVGFDGYSMPREGSTSKQMPPSDAEGDPLMNMLMRLQEAANYSSPQSYDSDSNSNSHHDDILDSSLESTL

SEQ ID NO: 3417 - DNA, 3316 bp, Homosapiens
tatacatacatacagattccaaatttgcacttaactgctatattatgtatgtacttgttcatgacaccacttggaattcaggtagaggtattttcaatcagctccaacatccctttccttccttggatgtttccaagacaccatcaagccaggcacatttaggcagagaggttgctggggagaatagaacattgccaagctctggcgccaaatactgcactctggcaacgtgtaagtgtaaggcaggcattgtgggtgtgtgacctctgcaatcacacagggcctcatgctcaggagggccctgtgcttgattcaatactctgctggccccatcttgaaattcttaatgatttttgaacaaggggctccacatgtccatttatcagtgagcccctcaaattatatagccagttttgtgtgaggacaaagcaatggacagatactatgaagctcctttctgggtggcattttctctttcttttctccttcctttcagagctaccaagtcaccccacactctagctcaagagctctacctgaccaaaactcaatggcctttcctcaggaaatccagctatgctaatgccaccagaactgagtcagaactcctaactctacaaatatggctcctctgtattgagtgcctgctaggtgccaggcacaacactcaactgggaccaatattatttctgatctgggagatagataggtatgatcagccccatttcacagttgaggacattgaggctcagagagattcagtgacttgtccaaggtcacacagtgcatcaaacacaaatctgatgagccttctcaaaggctcttgatgccacctgcttccagaacattctgccactcactctgcctaggctgctgccctgcctgacttgagctcaggcagttctgccacttgggtcagatcggctacaagtcctggagtatgggcccttcctagccccatgcctatagtttctggctcctcttacctcttccagatttggatgaaaacactctccagcatggggtgggaactggtctcctgagaggctgccattaggactgggtgatacaatcctgaagtgcagaagagttaacccccactaggaaaactttgaccagtggaaaataggagttgagagggagcaggacacatacattccttcttcctctctccatggactgcttcatgacagtctgccttgccgctcatccagctgaatcccacgtgtcatgctgaaaggtcttgtgcagtgaccttctgggtgtctccatggctgtttgtgacataatagccatcaaggaaacacaccacttagtgtggctttgcatccttctttgcctcgcttccttgtgtctcacctttgctgccatggatttgcatcttccaaatgaaacatctcactttcaatttttgccccaggctctatcttctagagaagctagcctaacatacatataggaagggcagccttcccactcagcccagggtgtggtggaacttcatttaggctgcatgtgaaaattggccacctgctttgctgtaaatgtgatttgtggttctctactgtccaactgctgtaggaatggcccccacctgagagatgcaatggccattccagcttgctggccagtacaggccttccttcttctctctctccccactccatctgcatgacccgacccaccccacctcaaggcatggttaattgttcattagtgacacctggcccaagttgacccaatgaatctctccctctgttgggatttttaaactcaggactaagtgattccatctccgcttctttctacatactctctccaaaaccacatatgcagtgtctacagctctaagtaagaaatcctgggagtggtcagtggacatcctttctgttatgtgggtaatgtcaatctgcagcatgagagaagaattccaccaatatgcagagagaaacagaggcaggagctacagagaatgtcctaatggcagtctcaggcttggagtccttgacagattggaaactccagatttctatgacagtaggattgaagccttgaaagatcttaatgtcaccatcatgagcctaaaagagatctttgaaaaagatactacatggatcatatgtgtctttcacagagcagaaatttttaatttccagccattatattccttgacattcacctcaaagacttgaaaattatgtccatacaaaaacctgtacatggatatttattgcagctttatccacaattgccagaacttgtaagcaaccaagacatccttcagtaggtgactgtatccattgtggtacgttcaggctatggaatattgttcagcactaaaaggaaatgagctatcaagccatgaaaaacatggaggaaactcaacacatattactaagtgaaggaagacaatctgaaaaagctacaaattgtatgattccagccacatgacgctctggagaaggccaaactatggagaccgtaaaaagatcagtgtttcctgggagtaggaaggcgggagagatgaataagcagagcacagaggacttttagggcagtgaaactactgtgtatgataccataatggtggatacttatcattacacatttgcccaaacccatacaaggaacaacagcaagagtgaacctaatgtaaactatggactttgagtgattatgatgtgccagtgtaggttaatcaattataacaaatgtgctactttggtgacagatatcgataatggaggaggctgtgtatgtgtggggggcaaggggtatataggaaatctctgttaacttctgctccattttactgtaaatccaaaattgctctaaaaagaggtctattcaaaaaggcattatataactcaatttaatcaatttaatcaagaccatgtttacacagtactttgtgtccacacatcatgatcataagaccaaaatcatgttggaaactgaagaaagaaaattacctgacagtcttccaatccagaggcgaagtccaggtcccatctcctggaattctgataggttccatgcctacttcaactaacacaatgtggacactgccagtttccagagccaggacttatgaagctggcagtttgtattctccgctatttgaaatactgtctctgggagcaatggacttcaaactctgaagccaccatgctaatgtggctgcatgtaggtgttctagccaatagttacaactcatatgtaagttgctttgctggagggatggcttgaaagcctgcctgaatttctgacccacaaagttatatcataataaaatgatgttatcttaaactactaa

SEQ ID NO: 3418 - protein, 99 aa, Homosapiens
MWVMSICSMREEFHQYAERNRGRSYRECPNGSLRLGVLDRLETPDFYDSRIEALKDLNVTIMSLKEIFEKDTTWIICVFHRAEIFNFQPLYSLTFTSKT

SEQ ID NO: 3419 - DNA, 1372 bp, Homosapiens
aaatacaggttgacaagtgctaagagagaagtcagaggctgtgggaacagagaggaggagtatctaaccagcctggagtatctggaagacttcctgaaggaggagaaaacacctgggctaaatcttaaaggaagaccagaagctacccagggaaagaagtgaaggaaggcattataaacagagaggccaggagattccagcctcagcattcccagagaaggcccaggatctccctgagaggcccagttggtgtttgtggaatcatcactcctctggtgatcacgcagtttgcctcactttctccatggagctctttgctaaaggacattctcctccagctgtgaaggaaaagcccaacaaaaggcagggtactttgttctaactgaggatgtctactgacacagccaagctgtaaagcagaccacggacggcagtgcagcggggagaacaactctacatctggttggaggtggagtaatgtccagtctgggcacagagagatggcaggtgtgcagctgcactcagcatgggatagagcaccacctgccaggccagaacagaaagaagggcgacggagactggcagagaaacagcaattactgctcagtgagaagtaaacagcgtctgcttccagaggctttacggaccagaaagcccacaggaaatagctcctgcttcccagcctggaggtcctcatgcactagccctccctgctacaattttgatggtttttcgcatatttacagaattgtgcaaccatcaccatgatcagtcttagaagagttaatcacccctgaccccagaaaactctgtattcattagcagtcactccctttcccctttccacccctctccaacattaggcaaccactaatctactctctgtctccataaactggtctattttggacatttcacataagcctccctggatcccagtttaagcatcctggggtttgtctgcctgccagagccatggtgccactggggctacctgtcctgtgggatgacaaggcaggtccaaacctttgcctgctctcccatccattccttttgtgttagtccatgtgtctcccgactgttctctccaacaacaacacagactgacaaaacctactgacttggagtcaggaacagactttgctattttctggctgtgtgatcctgatgagtcccttgaacctcctggacttgttcctcagcctaaaaaccaagactaataaatcaagtctatctcacagccttacgtggggatcaaaaaacatggagcatgtgaacacacattgtacatcacgaagctgtatgcaaataaatatcgtgtaactccagccctttttgagtttataaataaaagtgaaaacctcataaccct

SEQ ID NO: 3420 - protein, 96 aa, Homosapiens
MSSLGTERWQVCSCTQHGIEHHLPGQNRKKGDGDWQRNSNYCSVRSKQRLLPEALRTRKPTGNSSCFPAWRSSCTSPPCYNFDGFSHIYRIVQPSP

SEQ ID NO: 3421 - DNA, 8192 bp, Homosapiens
aggaggaaatttgcaagaggcggcagcccctgagcgcccagagctcttgaaaggccacccaggagaggtgtgagacccggcggcagcatccgtccaggtgggacccgctgagcgccgtggccagtcccccattcccatcccggcaccccaaaggcgcgctcgcccgattgcttcgagttccccgacctggggattttttttttagccgctggtggtgggcgcctcgtgggctaaggcccggcgcctgctctgctacccgcgctgcctttagcggtcgcccccgccgccgctgccagggacgtgctgggaaagcccaagccccgggagaagatgccggccatcctggtcgcctccaaaatgaagtcgggactgcccaaacccgtgcacagcgccgcgcccatcctgcacgtgcccccggcccgggcgggcccccagccctgctacctgaagttgggaagcaaggtggaggtgagcaagaccacctatcctagccagatccccctgaaatcgcaggtgctgcaggggctgcaggagccagcgggggaggggctcccgctgcggaagagcggctcggtggaaaacgggttcgatacccagatctacacagactgggccaatcattacctagccaaatccggccacaagcgtctcatcagggatctccagcaagatgtgacagatggcgtcctcctggcccagattatccaggttgtggcaaatgaaaagattgaagacatcaatggctgtccgaagaacagatcccaaatgattgaaaacatagatgcctgcttgaatttcctggcagctaagggaataaacatccaggggctgtctgcagaagagatcaggaatggaaacctcaaggccattctaggcctcttcttcagcctctcccgatacaagcagcagcagcagcagccccagaagcagcacctctcctcacctctgccgcccgccgtatcccaggtggccggggccccctcccagtgccaggctggcacccctcagcagcaggtgccagtcactccccaagccccgtgccagcctcaccagccagcgccacatcagcagtcaaaagcacaagctgaaatgcagtccagacttccaggtcctaccgcgagggtatccgctgcaggcagcgaggccaaaacacgcggagggtcaactactgctaacaaccgacgcagccagagctttaacaactatgataaatccaaaccagtcacctccccacccccaccgccaagcagccacgagaaagagcctttggcaagttcagcctcctcccaccccggaatgagtgacaatgcacctgcttccttggagagcggcagcagctccacccctactaattgcagtacctcctcggccatcccgcagcccggtgcagccaccaagccttggcgcagcaaatccctcagcgtgaagcacagtgccacggtatccatgctctcggtcaagcctcctgggcctgaggcccccaggcccacacctgaagccatgaagccggcccccaacaatcagaagtccatgctggaaaagctgaaacttttcaacagtaaagggggctcaaaggcaggtgaggggccggggtcccgggacacaagctgtgagcggctggagactctgcccagcttcgaagagagcgaggagctggaggccgccagtcgcatgctcaccaccgtgggccctgcttccagcagccccaagattgcactcaagggcattgcccagaggacttttagccgggcactgaccaacaagaagagttctctgaaaggcaatgagaaagagaaggagaaacaacagcgggagaaggataaggagaaaagcaaggaccttgccaagagagcctctgtgacggagaggctggacctcaaggaggagccaaaagaagaccccagtggagcagctgtgcccgagatgccaaaaaagtcctccaagattgccagcttcatccccaaaggggggaagctcaacagtgccaagaaggagcccatggccccttcccacagtggaataccaaaaccaggaatgaaaagcatgcccgggaaatccccaagtgccccagcgccttccaaggaaggggagcggagccggagtgggaagctgagctcaggactcccccagcagaagccccagctggacggcagacactccagttcctcttccagcctggcgtcctcagaaggaaaaggcccaggagggaccaccctgaaccacagcatcagcagccagactgtcagtgggtctgtcgggaccacccagaccacaggaagcaataccgtcagtgttcagctacctcagccccagcagcaatacaaccatcccaacactgccacggttgcacctttcctgtacaggtctcagacggacactgaagggaatgttactgccgagtcaagctcaacaggtgtgagcgtggagcccagccacttcaccaagactggacagcctgctctggaagaactcactggggaagatcctgaggctcggcggctgcggacagtgaagaacatcgctgatctgcggcagaatttggaggaaaccatgtccagtttaaggggaactcaggttacacacagcacattggaaaccacgtttgacaccaatgtcaccacggagatgagtggccgtagcatactcagcttgacagggaggcccacacctctgtcctggagactgggccagtccagccctcggctccaagcaggagacgccccctcaatgggcaatgggtatccccctcgagccaacgccagcaggttcatcaacactgagtcaggtcgctatgtgtactccgcccctctgagaaggcagctggcctcccggggcagtagtgtctgccatgtggacgtctcagacaaggcaggagatgagatggacctggaaggcatcagcatggatgcccccggctacatgagcgacggggatgttctgagcaagaacatccggaccgatgacattacaagcggatacatgactgatggtggacttggcctctatacccgtcgcctgaaccggctccctgatgggatggctgtggtacgggagaccctgcaacgaaatacctccctgggcctcggagacgctgacagctgggacgacagcagctccgtcagcagcggcatcagcgacaccatagacaacctcagcactgatgacatcaacaccagctcctccatcagctcttatgccaacacacctgcctcctctcgaaaaaacctggatgtgcagactgatgctgagaagcactcacaggtggagaggaattccctgtggtctggtgatgatgtcaagaaatcagacggaggctcagacagcggcataaaaatggagccaggttccaagtggaggcggaatccttctgatgtgtctgacgagtccgacaaaagcacgtcgggcaagaagaatcctgtcatctcccagacaggctcatggcggcgaggcatgacagctcaggtgggcatcaccatgccaaggacgaagccttcagccccggcaggcgcactgaagaccccaggaactggaaaaacagacgacgcaaaggtgtctgagaaaggaaggctttctcctaaagcctcccaggtgaagcgctccccatcagatgcaggccggagcagtggtgacgaatccaaaaagcccctccccagcagctctaggacacctactgccaatgccaacagctttgggttcaagaagcagagtggttccgccgccggcctggccatgatcacagccagcggggtgactgtcaccagcaggtcagccacactgggcaaaatcccaaagtcatctgcactcgtcagtcggtctgctggtcggaagtcaagtatggatggggctcagaatcaggatgacgggtatctagccctaagctcccggacaaaccttcagtaccggagtttgccgaggcccagtaagtccaacagccggaacggggctgggaacaggtctagcaccagcagcatagattccaacattagcagcaagtccgcaggcctgccagtgcccaaactgagggagccttccaaaacagccctaggcagctctctaccaggtctggtcaaccaaacagacaaggagaaaggcatctcatcagacaacgagagtgtggcttcctgtaactcggtgaaagtgaatccggcagcccagcctgtgtccagtccggctcagaccagtctccagcctggagccaagtacccagatgtggcctctcccacactccgcagactctttggtgggaagcctaccaagcaagtgcccatcgccacagctgaaaacatgaaaaattcggtggtcatctccaatcctcatgccaccatgactcagcaaggtaacctagactccccgtcaggcagtggcgtcctgagcagtgggagcagcagtcctctctacagcaagaatgtggacctcaaccagtctccgctagcctccagccccagctcagcccactcggccccttccaacagcctcacctggggcaccaacgccagcagctcctccgcagttagcaaggatggcctgggctttcagtctgtcagcagcctccacaccagctgtgagtccatcgacatctccctcagcagtggaggggtccccagccacaattcttccactggcctcatcgcctcctccaaggacgactccttgactccctttgtcagaactaacagtgtgaagaccacactgtcagaaagccctctctcttcccctgctgctagccctaagttctgcagaagtactctgcccaggaaacaggacagtgacccgcaccttgataggaacactttgcctaagaaaggactcaggtatactcccacctcccagcttcgcacgcaagaagatgcaaaagaatggttacggtcccattctgcaggaggccttcaggacaccgctgccaattcccccttttcctctggctccagcgtgacttctccctccggaacaagattcaacttttcccagcttgcgagtcccaccactgtcacccagatgagcttgtccaacccgaccatgctgaggactcacagcctctccaatgctgatgggcagtatgatccatacactgacagccgcttccggaatagctccatgtccctggatgagaagagcagaaccatgagccgttcaggctcattccgggatgggtttgaagaagttcatggatcctcactctccttggtttccagcacatcgtcagtttattctacaccagaagaaaaatgccagtcagagattcgcaagctgcggcgggaactggatgcctcccaggagaaagtttcagctttgaccacccagctgacagcaaatgctcaccttgtggcagcctttgaacagagtcttggtaacatgacaatcaggctccagagtctgaccatgacagctgagcagaaggactcagaactgaatgagttaagaaaaaccattgagctgctaaagaaacagaacgcagctgcccaggctgccattaatggagtaattaacacacctgagctcaactgcaaaggaaacggcactgcccagtctgcagacctccgcatccgcaggcagcactcctcagacagcgtctccagcatcaacagtgccaccagccactccagcgtgggcagcaacatagagagtgactcaaagaagaagaagcggaagaactggttacgcagctccttcaagcaagctttcgggaagaagaagtccccaaaatctgcgtcctctcattcagatattgaggagatgacggattcttctttgccttcctcaccaaagttaccgcacaatgggtccacaggttccaccccactgctgaggaattctcactccaactctctaatttcagaatgcatggatagtgaagctgagaccgtcatgcagctccgaaatgagttaagagacaaggagatgaagctgacggatatccgcttagaagctctcagttctgcccaccagctggaccagctccgggaggccatgaacaggatgcagagtgaaatagagaagctgaaagctgagaatgatcggctgaagtcagagtctcaaggcagtggctgcagccgggctccttcccaagtgtccatctctgcctccccgaggcagtccatgggcctctcccagcacagcttgaacctcactgagtcaaccagcctggacatgttgctggatgacactggtgaatgctcggctcggaaggaaggaggcaggcatgttaagatagttgtcagctttcaggaggaaatgaagtggaaggaggattccagaccacatctctttcttattggctgcattggagttagtggcaagacgaagtgggatgtgctcgatggggtggttagacggctgttcaaagaatacatcattcatgtcgacccagtgagtcagctagggctgaattcagacagcgttcttggctacagcattggagaaatcaagcgcagcaacacttccgaaacaccggagctgcttccttgtggctatctggttggagagaacacgaccatctcagtgactgtgaaagggctcgcagaaaacagcctggactcactggtgtttgagtccttgattcccaagcccatcctgcagcgctacgtctccctcctgatagagcaccgtcggatcattctctctggccccagcggcactgggaaaacctacctggccaaccggctgtctgagtatatagtgcttcgagagggacgggagttgacagacggggttatcgccacctttaacgtggaccataagtccagcaaggaattgcgccagtacctgtccaaccttgctgaccagtgcaacagtgagaacaatgctgtggacatgcccctcgtcatcatcctggacaacctacaccacgtgagctctctgggagagatcttcaatgggctgctcaactgcaagtaccacaaatgcccttacataattggcacaatgaaccaggctacctcttcgactcccaacctgcagcttcaccataacttcagatgggtgctttgtgccaaccacacggagcctgtgaagggtttccttggccgattcctgaggaggaagctcatggaaacagagatcagtgggcgggtgcgcaatatggagctggtaaaaatcattgactggattcccaaggtctggcatcacctcaaccgcttcctggaggctcacagttcctcggacgtcaccatcggcccccggctcttcctgtcatgccccatcgatgtggacggctcgagagtgtggttcaccgacttgtggaactattccattatcccctatctcctggaagccgtcagagaaggactccagctctatggaaggcgcgccccctgggaggatcctgccaagtgggtgatggacacatatccatgggcagccagcccacaacagcacgagtggcctcccctgctgcagttacggcctgaggatgtcggcttcgacggctactccatgcctcgggagggatcgacaagcaagcagatgccccccagtgatgctgaaggtgacccgctgatgaacatgctgatgaggctgcaggaggcagccaactactccagcccccagagctatgacagcgactccaacagcaacagccatcacgatgacatcttggactcctctttggagtccactctgtgacaggggcccggagcccagcgccctcctcttctcctcaccgcattccacctgcatcccccacatcaccctgaagatgacttcctgagccagcccccagccacagccttagagctgcgggaacaccgagaccccccgtccttcagcctcgacctgggtgcaggcatcccgggccagctgcctgcggaccgcttccttccacagcgagaactgcactaccttctgttgtactttaattattgttttgccttgttgctgtgacctccctaagacactgaagatacttctcgggaaaggatcatcgccgttgaaatgaaaagagagacagagagaaaaaaaaaaagagaacccacatgaagctctgaaaccaaacagcatcctgccatgagcttcccagagacagaagagactggagcaaagtcggaaacacagagaagcacggcttcccctcagcacagaccctccagactgggtctcagagccgtgccacccaccctcccacacagccggccacagggagaactggtgctaaccagggtgcttgctttggtcacgttcaacgcactacagagcta

SEQ ID NO: 3422 - protein, 2429 aa, Homosapiens; identical to SEQ ID NO: 462

SEQ ID NO: 3423 - DNA, 8192 bp, Homosapiens
aggaggaaatttgcaagaggcggcagcccctgagcgcccagagctcttgaaaggccacccaggagaggtgtgagacccggcggcagcatccgtccaggtgggacccgctgagcgccgtggccagtcccccattcccatcccggcaccccaaaggcgcgctcgcccgattgcttcgagttccccgacctggggattttttttttagccgctggtggtgggcgcctcgtgggctaaggcccggcgcctgctctgctacccgcgctgcctttagcggtcgcccccgccgccgctgccagggacgtgctgggaaagcccaagccccgggagaagatgccggccatcctggtcgcctccaaaatgaagtcgggactgcccaaacccgtgcacagcgccgcgcccatcctgcacgtgcccccggcccgggcgggcccccagccctgctacctgaagttgggaagcaaggtggaggtgagcaagaccacctatcctagccagatccccctgaaatcgcaggtgctgcaggggctgcaggagccagcgggggaggggctcccgctgcggaagagcggctcggtggaaaacgggttcgatacccagatctacacagactgggccaatcattacctagccaaatccggccacaagcgtctcatcagggatctccagcaagatgtgacagatggcgtcctcctggcccagattatccaggttgtggcaaatgaaaagattgaagacatcaatggctgtccgaagaacagatcccaaatgattgaaaacatagatgcctgcttgaatttcctggcagctaagggaataaacatccaggggctgtctgcagaagagatcaggaatggaaacctcaaggccattctaggcctcttcttcagcctctcccgatacaagcagcagcagcagcagccccagaagcagcacctctcctcacctctgccgcccgccgtatcccaggtggccggggccccctcccagtgccaggctggcacccctcagcagcaggtgccagtcactccccaagccccgtgccagcctcaccagccagcgccacatcagcagtcaaaagcacaagctgaaatgcagtccagtgcatcatccaaggactcatctcaaagcaaaatcatccgcttcactctgggtcagaaaaagatctctagacttccaggtcctaccgcgagggtatccgctgcaggcagcgaggccaaaacacgcggagggtcaactactgctaacaaccgacgcagccagagctttaacaactatgataaatccaaaccagtcacctccccacccccaccgccaagcagccacgagaaagagcctttggcaagttcagcctcctcccaccccggaatgagtgacaatgcacctgcttccttggagagcggcagcagctccacccctactaattgcagtacctcctcggccatcccgcagcccggtgcagccaccaagccttggcgcagcaaatccctcagcgtgaagcacagtgccacggtatccatgctctcggtcaagcctcctgggcctgaggcccccaggcccacacctgaagccatgaagccggcccccaacaatcagaagtccatgctggaaaagctgaaacttttcaacagtaaagggggctcaaaggcaggtgaggggccggggtcccgggacacaagctgtgagcggctggagactctgcccagcttcgaagagagcgaggagctggaggccgccagtcgcatgctcaccaccgtgggccctgcttccagcagccccaagattgcactcaagggcattgcccagaggacttttagccgggcactgaccaacaagaagagttctctgaaaggcaatgagaaagagaaggagaaacaacagcgggagaaggataaggagaaaagcaaggaccttgccaagagagcctctgtgacggagaggctggacctcaaggaggagccaaaagaagaccccagtggagcagctgtgcccgagatgccaaaaaagtcctccaagattgccagcttcatccccaaaggggggaagctcaacagtgccaagaaggagcccatggccccttcccacagtggaataccaaaaccaggaatgaaaagcatgcccgggaaatccccaagtgccccagcgccttccaaggaaggggagcggagccggagtgggaagctgagctcaggactcccccagcagaagccccagctggacggcagacactccagttcctcttccagcctggcgtcctcagaaggaaaaggcccaggagggaccaccctgaaccacagcatcagcagccagactgtcagtgggtctgtcgggaccacccagaccacaggaagcaataccgtcagtgttcagctacctcagccccagcagcaatacaaccatcccaacactgccacggttgcacctttcctgtacaggtctcagacggacactgaagggaatgttactgccgagtcaagctcaacaggtgtgagcgtggagcccagccacttcaccaagactggacagcctgctctggaagaactcactggggaagatcctgaggctcggcggctgcggacagtgaagaacatcgctgatctgcggcagaatttggaggaaaccatgtccagtttaaggggaactcaggttacacacagcacattggaaaccacgtttgacaccaatgtcaccacggagatgagtggccgtagcatactcagcttgacagggaggcccacacctctgtcctggagactgggccagtccagccctcggctccaagcaggagacgccccctcaatgggcaatgggtatccccctcgagccaacgccagcaggttcatcaacactgagtcaggtcgctatgtgtactccgcccctctgagaaggcagctggcctcccggggcagtagtgtctgccatgtggacgtctcagacaaggcaggagatgagatggacctggaaggcatcagcatggatgcccccggctacatgagcgacggggatgttctgagcaagaacatccggaccgatgacattacaagcggatacatgactgatggtggacttggcctctatacccgtcgcctgaaccggctccctgatgggatggctgtggtacgggagaccctgcaacgaaatacctccctgggcctcggagacgctgacagctgggacgacagcagctccgtcagcagcggcatcagcgacaccatagacaacctcagcactgatgacatcaacaccagctcctccatcagctcttatgccaacacacctgcctcctctcgaaaaaacctggatgtgcagactgatgctgagaagcactcacaggtggagaggaattccctgtggtctggtgatgatgtcaagaaatcagacggaggctcagacagcggcataaaaatggagccaggttccaagtggaggcggaatccttctgatgtgtctgacgagtccgacaaaagcacgtcgggcaagaagaatcctgtcatctcccagacaggctcatggcggcgaggcatgacagctcaggtgggcatcaccatgccaaggacgaagccttcagccccggcaggcgcactgaagaccccaggaactggaaaaacagacgacgcaaaggtgtctgagaaaggaaggctttctcctaaagcctcccaggtgaagcgctccccatcagatgcaggccggagcagtggtgacgaatccaaaaagcccctccccagcagctctaggacacctactgccaatgccaacagctttgggttcaagaagcagagtggttccgccgccggcctggccatgatcacagccagcggggtgactgtcaccagcaggtcagccacactgggcaaaatcccaaagtcatctgcactcgtcagtcggtctgctggtcggaagtcaagtatggatggggctcagaatcaggatgacgggtatctagccctaagctcccggacaaaccttcagtaccggagtttgccgaggcccagtaagtccaacagccggaacggggctgggaacaggtctagcaccagcagcatagattccaacattagcagcaagtccgcaggcctgccagtgcccaaactgagggagccttccaaaacagccctaggcagctctctaccaggtctggtcaaccaaacagacaaggagaaaggcatctcatcagacaacgagagtgtggcttcctgtaactcggtgaaagtgaatccggcagcccagcctgtgtccagtccggctcagaccagtctccagcctggagccaagtacccagatgtggcctctcccacactccgcagactctttggtgggaagcctaccaagcaagtgcccatcgccacagctgaaaacatgaaaaattcggtggtcatctccaatcctcatgccaccatgactcagcaaggtaacctagactccccgtcaggcagtggcgtcctgagcagtgggagcagcagtcctctctacagcaagaatgtggacctcaaccagtctccgctagcctccagccccagctcagcccactcggccccttccaacagcctcacctggggcaccaacgccagcagctcctccgcagttagcaaggatggcctgggctttcagtctgtcagcagcctccacaccagctgtgagtccatcgacatctccctcagcagtggaggggtccccagccacaattcttccactggcctcatcgcctcctccaaggacgactccttgactccctttgtcagaactaacagtgtgaagaccacactgtcagaaagccctctctcttcccctgctgctagccctaagttctgcagaagtactctgcccaggaaacaggacagtgacccgcaccttgataggaacactttgcctaagaaaggactcaggtatactcccacctcccagcttcgcacgcaagaagatgcaaaagaatggttacggtcccattctgcaggaggccttcaggacaccgctgccaattcccccttttcctctggctccagcgtgacttctccctccggaacaagattcaacttttcccagcttgcgagtcccaccactgtcacccagatgagcttgtccaacccgaccatgctgaggactcacagcctctccaatgctgatgggcagtatgatccatacactgacagccgcttccggaatagctccatgtccctggatgagaagagcagaaccatgagccgttcaggctcattccgggatgggtttgaagaagaatcatgggagaaaagttctgtggacaactttgtcagccgtcttcacagctcacttcatttctctcttcctttgttccatcacgcaaggtatgagttagttcatggatcctcactctccttggtttccagcacatcgtcagtttattctacaccagaagaaaaatgccagtcagagattcgcaagctgcggcgggaactggatgcctcccaggagaaagtttcagctttgaccacccagctgacagcaaatgctcaccttgtggcagcctttgaacagagtcttggtaacatgacaatcaggctccagagtctgaccatgacagctgagcagaaggactcagaactgaatgagttaagaaaaaccattgagctgctaaagaaacagaacgcagctgcccaggctgccattaatggagtaattaacacacctgagctcaactgcaaaggaaacggcactgcccagtctgcagacctccgcatccgcaggcagcactcctcagacagcgtctccagcatcaacagtgccaccagccactccagcgtgggcagcaacatagagagtgactcaaagaagaagaagcggaagaactggttacgcagctccttcaagcaagctttcgggaagaagaagtccccaaaatctgcgtcctctcattcagatattgaggagatgacggattcttctttgccttcctcaccaaagttaccgcacaatgggtccacaggttccaccccactgctgaggaattctcactccaactctctaatttcagaatgcatggatagtgaagctgagaccgtcatgcagctccgaaatgagttaagagacaaggagatgaagctgacggatatccgcttagaagctctcagttctgcccaccagctggaccagctccgggaggccatgaacaggatgcagagtgaaatagagaagctgaaagctgagaatgatcggctgaagtcagagtctcaaggcagtggctgcagccgggctccttcccaagtgtccatctctgcctccccgaggcagtccatgggcctctcccagcacagcttgaacctcactgagtcaaccagcctggacatgttgctggatgacactggtgaatgctcggctcggaaggaaggaggcaggcatgttaagatagttgtcagctttcaggaggaaatgaagtggaaggaggattccagaccacatctctttcttattggctgcattggagttagtggcaagacgaagtgggatgtgctcgatggggtggttagacggctgttcaaagaatacatcattcatgtcgacccagtgagtcagctagggctgaattcagacagcgttcttggctacagcattggagaaatcaagcgcagcaacacttccgaaacaccggagctgcttccttgtggctatctggttggagagaacacgaccatctcagtgactgtgaaagggctcgcagaaaacagcctggactcactggtgtttgagtccttgattcccaagcccatcctgcagcgctacgtctccctcctgatagagcaccgtcggatcattctctctggccccagcggcactgggaaaacctacctggccaaccggctgtctgagtatatagtgcttcgagagggacgggagttgacagacggggttatcgccacctttaacgtggaccataagtccagcaaggaattgcgccagtacctgtccaaccttgctgaccagtgcaacagtgagaacaatgctgtggacatgcccctcgtcatcatcctggacaacctacaccacgtgagctctctgggagagatcttcaatgggctgctcaactgcaagtaccacaaatgcccttacataattggcacaatgaaccaggctacctcttcgactcccaacctgcagcttcaccataacttcagatgggtgctttgtgccaaccacacggagcctgtgaagggtttccttggccgattcctgaggaggaagctcatggaaacagagatcagtgggcgggtgcgcaatatggagctggtaaaaatcattgactggattcccaaggtctggcatcacctcaaccgcttcctggaggctcacagttcctcggacgtcaccatcggcccccggctcttcctgtcatgccccatcgatgtggacggctcgagagtgtggttcaccgacttgtggaactattccattatcccctatctcctggaagccgtcagagaaggactccagctctatggaaggcgcgccccctgggaggatcctgccaagtgggtgatggacacatatccatgggcagccagcccacaacagcacgagtggcctcccctgctgcagttacggcctgaggatgtcggcttcgacggctactccatgcctcgggagggatcgacaagcaagcagatgccccccagtgatgctgaaggtgacccgctgatgaacatgctgatgaggctgcaggaggcagccaactactccagcccccagagctatgacagcgactccaacagcaacagccatcacgatgacatcttggactcctctttggagtccactctgtgacaggggcccggagcccagcgccctcctcttctcctcaccgcattccacctgcatcccccacatcaccctgaagatgacttcctgagccagcccccagccacagccttagagctgcgggaacaccgagaccccccgtccttcagcctcgacctgggtgcaggcatcccgggccagctgcctgcggaccgcttccttccacagcgagaactgcactaccttctgttgtactttaattattgttttgccttgttgctgtgacctccctaagacactgaagatacttctcgggaaaggatcatcgccgttgaaatgaaaagagagacagagagaaaaaaaaaaagagaacccacatgaagctctgaaaccaaacagcatcctgccatgagcttcccagagacagaaga

SEQ ID NO: 3424 - protein, 2485 aa, Homosapiens
MPAILVASKMKSGLPKPVHSAAPILHVPPARAGPQPCYLKLGSKVEVSKTTYPSQIPLKSQVLQGLQEPAGEGLPLRKSGSVENGFDTQIYTDWANHYLAKSGHKRLIRDLQQDVTDGVLLAQIIQVVANEKIEDINGCPKNRSQMIENIDACLNFLAAKGINIQGLSAEEIRNGNLKAILGLFFSLSRYKQQQQQPQKQHLSSPLPPAVSQVAGAPSQCQAGTPQQQVPVTPQAPCQPHQPAPHQQSKAQAEMQSSASSKDSSQSKIIRFTLGQKKISRLPGPTARVSAAGSEAKTRGGSTTANNRRSQSFNNYDKSKPVTSPPPPPSSHEKEPLASSASSHPGMSDNAPASLESGSSSTPTNCSTSSAIPQPGAATKPWRSKSLSVKHSATVSMLSVKPPGPEAPRPTPEAMKPAPNNQKSMLEKLKLFNSKGGSKAGEGPGSRDTSCERLETLPSFEESEELEAASRMLTTVGPASSSPKIALKGIAQRTFSRALTNKKSSLKGNEKEKEKQQREKDKEKSKDLAKRASVTERLDLKEEPKEDPSGAAVPEMPKKSSKIASFIPKGGKLNSAKKEPMAPSHSGIPKPGMKSMPGKSPSAPAPSKEGERSRSGKLSSGLPQQKPQLDGRHSSSSSSLASSEGKGPGGTTLNHSISSQTVSGSVGTTQTTGSNTVSVQLPQPQQQYNHPNTATVAPFLYRSQTDTEGNVTAESSSTGVSVEPSHFTKTGQPALEELTGEDPEARRLRTVKNIADLRQNLEETMSSLRGTQVTHSTLETTFDTNVTTEMSGRSILSLTGRPTPLSWRLGQSSPRLQAGDAPSMGNGYPPRANASRFINTESGRYVYSAPLRRQLASRGSSVCHVDVSDKAGDEMDLEGISMDAPGYMSDGDVLSKNIRTDDITSGYMTDGGLGLYTRRLNRLPDGMAVVRETLQRNTSLGLGDADSWDDSSSVSSGISDTIDNLSTDDINTSSSISSYANTPASSRKNLDVQTDAEKHSQVERNSLWSGDDVKKSDGGSDSGIKMEPGSKWRRNPSDVSDESDKSTSGKKNPVISQTGSWRRGMTAQVGITMPRTKPSAPAGALKTPGTGKTDDAKVSEKGRLSPKASQVKRSPSDAGRSSGDESKKPLPSSSRTPTANANSFGFKKQSGSAAGLAMITASGVTVTSRSATLGKIPKSSALVSRSAGRKSSMDGAQNQDDGYLALSSRTNLQYRSLPRPSKSNSRNGAGNRSSTSSIDSNISSKSAGLPVPKLREPSKTALGSSLPGLVNQTDKEKGISSDNESVASCNSVKVNPAAQPVSSPAQTSLQPGAKYPDVASPTLRRLFGGKPTKQVPIATAENMKNSVVISNPHATMTQQGNLDSPSGSGVLSSGSSSPLYSKNVDLNQSPLASSPSSAHSAPSNSLTWGTNASSSSAVSKDGLGFQSVSSLHTSCESIDISLSSGGVPSHNSSTGLIASSKDDSLTPFVRTNSVKTTLSESPLSSPAASPKFCRSTLPRKQDSDPHLDRNTLPKKGLRYTPTSQLRTQEDAKEWLRSHSAGGLQDTAANSPFSSGSSVTSPSGTRFNFSQLASPTTVTQMSLSNPTMLRTHSLSNADGQYDPYTDSRFRNSSMSLDEKSRTMSRSGSFRDGFEEESWEKSSVDNFVSRLHSSLHFSLPLFHHARYELVHGSSLSLVSSTSSVYSTPEEKCQSEIRKLRRELDASQEKVSALTTQLTANAHLVAAFEQSLGNMTIRLQSLTMTAEQKDSELNELRKTIELLKKQNAAAQAAINGVINTPELNCKGNGTAQSADLRIRRQHSSDSVSSINSATSHSSVGSNIESDSKKKKRKNWLRSSFKQAFGKKKSPKSASSHSDIEEMTDSSLPSSPKLPHNGSTGSTPLLRNSHSNSLISECMDSEAETVMQLRNELRDKEMKLTDIRLEALSSAHQLDQLREAMNRMQSEIEKLKAENDRLKSESQGSGCSRAPSQVSISASPRQSMGLSQHSLNLTESTSLDMLLDDTGECSARKEGGRHVKIVVSFQEEMKWKEDSRPHLFLIGCIGVSGKTKWDVLDGVVRRLFKEYIIHVDPVSQLGLNSDSVLGYSIGEIKRSNTSETPELLPCGYLVGENTTISVTVKGLAENSLDSLVFESLIPKPILQRYVSLLIEHRRIILSGPSGTGKTYLANRLSEYIVLREGRELTDGVIATFNVDHKSSKELRQYLSNLADQCNSENNAVDMPLVIILDNLHHVSSLGEIFNGLLNCKYHKCPYIIGTMNQATSSTPNLQLHHNFRWVLCANHTEPVKGFLGRFLRRKLMETEISGRVRNMELVKIIDWIPKVWHHLNRFLEAHSSSDVTIGPRLFLSCPIDVDGSRVWFTDLWNYSIIPYLLEAVREGLQLYGRRAPWEDPAKWVMDTYPWAASPQQHEWPPLLQLRPEDVGFDGYSMPREGSTSKQMPPSDAEGDPLMNMLMRLQEAANYSSPQSYDSDSNSNSHHDDILDSSLESTL

SEQ ID NO: 3425 - DNA, 7869 bp, Homosapiens
taaggcccggcgcctgctctgctacccgcgctgcctttagcggtcgcccccgccgccgctgccagggacgtgctgggaaagcccaagccccgggagaagatgccggccatcctggtcgcctccaaaatgaagtcgggactgcccaaacccgtgcacagcgccgcgcccatcctgcacgtgcccccggcccgggcgggcccccagccctgctacctgaagttgggaagcaaggtggaggtgagcaagaccacctatcctagccagatccccctgaaatcgcaggtgctgcaggggctgcaggagccagcgggggaggggctcccgctgcggaagagcggctcggtggaaaacgggttcgatacccagatctacacagactgggccaatcattacctagccaaatccggccacaagcgtctcatcagggatctccagcaagatgtgacagatggcgtcctcctggcccagattatccaggttgtggcaaatgaaaagattgaagacatcaatggctgtccgaagaacagatcccaaatgattgaaaacatagatgcctgcttgaatttcctggcagctaagggaataaacatccaggggctgtctgcagaagagatcaggaatggaaacctcaaggccattctaggcctcttcttcagcctctcccgatacaagcagcagcagcagcagccccagaagcagcacctctcctcacctctgccgcccgccgtatcccaggtggccggggccccctcccagtgccaggctggcacccctcagcagcaggtgccagtcactccccaagccccgtgccagcctcaccagccagcgccacatcagcagtcaaaagcacaagctgaaatgcagtccagtgcatcatccaaggactcatctcaaagcaaaatcatccgcttcactctgggtcagaaaaagatctctagacttccaggtcctaccgcgagggtatccgctgcaggcagcgaggccaaaacacgcggagggtcaactactgctaacaaccgacgcagccagagctttaacaactatgataaatccaaaccagtcacctccccacccccaccgccaagcagccacgagaaagagcctttggcaagttcagcctcctcccaccccggaatgagtgacaatgcacctgcttccttggagagcggcagcagctccacccctactaattgcagtacctcctcggccatcccgcagcccggtgcagccaccaagccttggcgcagcaaatccctcagcgtgaagcacagtgccacggtatccatgctctcggtcaagcctcctgggcctgaggcccccaggcccacacctgaagccatgaagccggcccccaacaatcagaagtccatgctggaaaagctgaaacttttcaacagtaaagggggctcaaaggcaggtgaggggccggggtcccgggacacaagctgtgagcggctggagactctgcccagcttcgaagagagcgaggagctggaggccgccagtcgcatgctcaccaccgtgggccctgcttccagcagccccaagattgcactcaagggcattgcccagaggacttttagccgggcactgaccaacaagaagagttctctgaaaggcaatgagaaagagaaggagaaacaacagcgggagaaggataaggagaaaagcaaggaccttgccaagagagcctctgtgacggagaggctggacctcaaggaggagccaaaagaagaccccagtggagcagctgtgcccgagatgccaaaaaagtcctccaagattgccagcttcatccccaaaggggggaagctcaacagtgccaagaaggagcccatggccccttcccacagtggaataccaaaaccaggaatgaaaagcatgcccgggaaatccccaagtgccccagcgccttccaaggaaggggagcggagccggagtgggaagctgagctcaggactcccccagcagaagccccagctggacggcagacactccagttcctcttccagcctggcgtcctcagaaggaaaaggcccaggagggaccaccctgaaccacagcatcagcagccagactgtcagtgggtctgtcgggaccacccagaccacaggaagcaataccgtcagtgttcagctacctcagccccagcagcaatacaaccatcccaacactgccacggttgcacctttcctgtacaggtctcagacggacactgaagggaatgttactgccgagtcaagctcaacaggtgtgagcgtggagcccagccacttcaccaagactggacagcctgctctggaagaactcactggggaagatcctgaggctcggcggctgcggacagtgaagaacatcgctgatctgcggcagaatttggaggaaaccatgtccagtttaaggggaactcaggttacacacagcacattggaaaccacgtttgacaccaatgtcaccacggagatgagtggccgtagcatactcagcttgacagggaggcccacacctctgtcctggagactgggccagtccagccctcggctccaagcaggagacgccccctcaatgggcaatgggtatccccctcgagccaacgccagcaggttcatcaacactgagtcaggtcgctatgtgtactccgcccctctgagaaggcagctggcctcccggggcagtagtgtctgccatgtggacgtctcagacaaggcaggagatgagatggacctggaaggcatcagcatggatgcccccggctacatgagcgacggggatgttctgagcaagaacatccggaccgatgacattacaagcggatacatgactgatggtggacttggcctctatacccgtcgcctgaaccggctccctgatgggatggctgtggtacgggagaccctgcaacgaaatacctccctgggcctcggagacgctgacagctgggacgacagcagctccgtcagcagcggcatcagcgacaccatagacaacctcagcactgatgacatcaacaccagctcctccatcagctcttatgccaacacacctgcctcctctcgaaaaaacctggatgtgcagactgatgctgagaagcactcacaggtggagaggaattccctgtggtctggtgatgatgtcaagaaatcagacggaggctcagacagcggcataaaaatggagccaggttccaagtggaggcggaatccttctgatgtgtctgacgagtccgacaaaagcacgtcgggcaagaagaatcctgtcatctcccagacaggctcatggcggcgaggcatgacagctcaggtgggcatcaccatgccaaggacgaagccttcagccccggcaggcgcactgaagaccccaggaactggaaaaacagacgacgcaaaggtgtctgagaaaggaaggctttctcctaaagcctcccaggtgaagcgctccccatcagatgcaggccggagcagtggtgacgaatccaaaaagcccctccccagcagctctaggacacctactgccaatgccaacagctttgggttcaagaagcagagtggttccgccgccggcctggccatgatcacagccagcggggtgactgtcaccagcaggtcagccacactgggcaaaatcccaaagtcatctgcactcgtcagtcggtctgctggtcggaagtcaagtatggatggggctcagaatcaggatgacgggtatctagccctaagctcccggacaaaccttcagtaccggagtttgccgaggcccagtaagtccaacagccggaacggggctgggaacaggtctagcaccagcagcatagattccaacattagcagcaagtccgcaggcctgccagtgcccaaactgagggagccttccaaaacagccctaggcagctctctaccaggtctggtcaaccaaacagacaaggagaaaggcatctcatcagacaacgagagtgtggcttcctgtaactcggtgaaagtgaatccggcagcccagcctgtgtccagtccggctcagaccagtctccagcctggagccaagtacccagatgtggcctctcccacactccgcagactctttggtgggaagcctaccaagcaagtgcccatcgccacagctgaaaacatgaaaaattcggtggtcatctccaatcctcatgccaccatgactcagcaaggtaacctagactccccgtcaggcagtggcgtcctgagcagtgggagcagcagtcctctctacagcaagaatgtggacctcaaccagtctccgctagcctccagccccagctcagcccactcggccccttccaacagcctcacctggggcaccaacgccagcagctcctccgcagttagcaaggatggcctgggctttcagtctgtcagcagcctccacaccagctgtgagtccatcgacatctccctcagcagtggaggggtccccagccacaattcttccactggcctcatcgcctcctccaaggacgactccttgactccctttgtcagaactaacagtgtgaagaccacactgtcagaaagccctctctcttcccctgctgctagccctaagttctgcagaagtactctgcccaggaaacaggacagtgacccgcaccttgataggaacactttgcctaagaaaggactcaggtatactcccacctcccagcttcgcacgcaagaagatgcaaaagaatggttacggtcccattctgcaggaggccttcaggacaccgctgccaattcccccttttcctctggctccagcgtgacttctccctccggaacaagattcaacttttcccagcttgcgagtcccaccactgtcacccagatgagcttgtccaacccgaccatgctgaggactcacagcctctccaatgctgatgggcagtatgatccatacactgacagccgcttccggaatagctccatgtccctggatgagaagagcagaaccatgagccgttcaggctcattccgggatgggtttgaagaagaatcatgggagaaaagttctgtggacaactttgtcagccgtcttcacagctcacttcatttctctcttcctttgttccatcacgcaaggtatgagttagttcatggatcctcactctccttggtttccagcacatcgtcagtttattctacaccagaagaaaaatgccagtcagagattcgcaagctgcggcgggaactggatgcctcccaggagaaagtttcagctttgaccacccagctgacagcaaatgctcaccttgtggcagcctttgaacagagtcttggtaacatgacaatcaggctccagagtctgaccatgacagctgagcagaaggactcagaactgaatgagttaagaaaaaccattgagctgctaaagaaacagaacgcagctgcccaggctgccattaatggagtaattaacacacctgagctcaactgcaaaggaaacggcactgcccagtctgcagacctccgcatccgcaggcagcactcctcagacagcgtctccagcatcaacagtgccaccagccactccagcgtgggcagcaacatagagagtgactcaaagaagaagaagcggaagaactggttacgcagctccttcaagcaagctttcgggaagaagaagtccccaaaatctgcgtcctctcattcagatattgaggagatgacggattcttctttgccttcctcaccaaagttaccgcacaatgggtccacaggttccaccccactgctgaggaattctcactccaactctctaatttcagaatgcatggatagtgaagctgagaccgtcatgcagctccgaaatgagttaagagacaaggagatgaagctgacggatatccgcttagaagctctcagttctgcccaccagctggaccagctccgggaggccatgaacaggatgcagagtgaaatagagaagctgaaagctgagaatgatcggctgaagtcagagtctcaaggcagtggctgcagccgggctccttcccaagtgtccatctctgcctccccgaggcagtccatgggcctctcccagcacagcttgaacctcactgagtcaaccagcctggacatgttgctggatgacactggtgaatgctcggctcggaaggaaggaggcaggcatgttaagatagttgtcagctttcaggaggaaatgaagtggaaggaggattccagaccacatctctttcttattggctgcattggagttagtggcaagacgaagtgggatgtgctcgatggggtggttagacggctgttcaaagaatacatcattcatgtcgacccagtgagtcagctagggctgaattcagacagcgttcttggctacagcattggagaaatcaagcgcagcaacacttccgaaacaccggagctgcttccttgtggctatctggttggagagaacacgaccatctcagtgactgtgaaagggctcgcagaaaacagcctggactcactggtgtttgagtccttgattcccaagcccatcctgcagcgctacgtctccctcctgatagagcaccgtcggatcattctctctggccccagcggcactgggaaaacctacctggccaaccggctgtctgagtatatagtgcttcgagagggacgggagttgacagacggggttatcgccacctttaacgtggaccataagtccagcaaggaattgcgccagtacctgtccaaccttgctgaccagtgcaacagtgagaacaatgctgtggacatgcccctcgtcatcatcctggacaacctacaccacgtgagctctctgggagagatcttcaatgggctgctcaactgcaagtaccacaaatgcccttacataattggcacaatgaaccaggctacctcttcgactcccaacctgcagcttcaccataacttcagatgggtgctttgtgccaaccacacggagcctgtgaagggtttccttggccgattcctgaggaggaagctcatggaaacagagatcagtgggcgggtgcgcaatatggagctggtaaaaatcattgactggattcccaaggtctggcatcacctcaaccgcttcctggaggctcacagttcctcggacgtcaccatcggcccccggctcttcctgtcatgccccatcgatgtggacggctcgagagtgtggttcaccgacttgtggaactattccattatcccctatctcctggaagccgtcagagaaggactccagctctatggaaggcgcgccccctgggaggatcctgccaagtgggtgatggacacatatccatgggcagccagcccacaacagcacgagtggcctcccctgctgcagttacggcctgaggatgtcggcttcgacggctactccatgcctcgggagggatcgacaagcaagcagatgccccccagtgatgctgaaggtgacccgctgatgaacatgctgatgaggctgcaggaggcagccaactactccagcccccagagctatgacagcgactccaacagcaacagccatcacgatgacatcttggactcctctttggagtccactctgtgacaggggcccggagcccagcgccctcctcttctcctcaccgcattccacctgcatcccccacatcaccctgaagatgacttcctgagccagcccccagccacagccttagagctgcgggaacaccgagaccccccgtccttcagcctcgacctgggtgcaggcatcccgggccagctgcctgcggaccgcttccttccacagcgagaactgcactaccttctgttgtactttaattattgttttgccttgttgctgtgacctccctaagacactgaagatacttctcgggaaaggatcatcgccgttgaaatg

SEQ ID NO: 3426 - protein, 2485 aa, Homosapiens; identical to SEQ ID NO: 3424

SEQ ID NO: 3427 - DNA, 7678 bp, Homosapiens
acccgcgctgcctttagcggtcgcccccgccgccgctgccagggacgtgctgggaaagcccaagccccgggagaagatgccggccatcctggtcgcctccaaaatgaagtcgggactgcccaaacccgtgcacagcgccgcgcccatcctgcacgtgcccccggcccgggcgggcccccagccctgctacctgaagttgggaagcaaggtggaggtgagcaagaccacctatcctagccagatccccctgaaatcgcaggtgctgcaggggctgcaggagccagcgggggaggggctcccgctgcggaagagcggctcggtggaaaacgggttcgatacccagatctacacagactgggccaatcattacctagccaaatccggccacaagcgtctcatcagggatctccagcaagatgtgacagatggcgtcctcctggcccagattatccaggttgtggcaaatgaaaagattgaagacatcaatggctgtccgaagaacagatcccaaatgattgaaaacatagatgcctgcttgaatttcctggcagctaagggaataaacatccaggggctgtctgcagaagagatcaggaatggaaacctcaaggccattctaggcctcttcttcagcctctcccgatacaagcagcagcagcagcagccccagaagcagcacctctcctcacctctgccgcccgccgtatcccaggtggccggggccccctcccagtgccaggctggcacccctcagcagcaggtgccagtcactccccaagccccgtgccagcctcaccagccagcgccacatcagcagtcaaaagcacaagctgaaatgcagtccagacttccaggtcctaccgcgagggtatccgctgcaggcagcgaggccaaaacacgcggagggtcaactactgctaacaaccgacgcagccagagctttaacaactatgataaatccaaaccagtcacctccccacccccaccgccaagcagccacgagaaagagcctttggcaagttcagcctcctcccaccccggaatgagtgacaatgcacctgcttccttggagagcggcagcagctccacccctactaattgcagtacctcctcggccatcccgcagcccggtgcagccaccaagccttggcgcagcaaatccctcagcgtgaagcacagtgccacggtatccatgctctcggtcaagcctcctgggcctgaggcccccaggcccacacctgaagccatgaagccggcccccaacaatcagaagtccatgctggaaaagctgaaacttttcaacagtaaagggggctcaaaggcaggtgaggggccggggtcccgggacacaagctgtgagcggctggagactctgcccagcttcgaagagagcgaggagctggaggccgccagtcgcatgctcaccaccgtgggccctgcttccagcagccccaagattgcactcaagggcattgcccagaggacttttagccgggcactgaccaacaagaagagttctctgaaaggcaatgagaaagagaaggagaaacaacagcgggagaaggataaggagaaaagcaaggaccttgccaagagagcctctgtgacggagaggctggacctcaaggaggagccaaaagaagaccccagtggagcagctgtgcccgagatgccaaaaaagtcctccaagattgccagcttcatccccaaaggggggaagctcaacagtgccaagaaggagcccatggccccttcccacagtggaataccaaaaccaggaatgaaaagcatgcccgggaaatccccaagtgccccagcgccttccaaggaaggggagcggagccggagtgggaagctgagctcaggactcccccagcagaagccccagctggacggcagacactccagttcctcttccagcctggcgtcctcagaaggaaaaggcccaggagggaccaccctgaaccacagcatcagcagccagactgtcagtgggtctgtcgggaccacccagaccacaggaagcaataccgtcagtgttcagctacctcagccccagcagcaatacaaccatcccaacactgccacggttgcacctttcctgtacaggtctcagacggacactgaagggaatgttactgccgagtcaagctcaacaggtgtgagcgtggagcccagccacttcaccaagactggacagcctgctctggaagaactcactggggaagatcctgaggctcggcggctgcggacagtgaagaacatcgctgatctgcggcagaatttggaggaaaccatgtccagtttaaggggaactcaggttacacacagcacattggaaaccacgtttgacaccaatgtcaccacggagatgagtggccgtagcatactcagcttgacagggaggcccacacctctgtcctggagactgggccagtccagccctcggctccaagcaggagacgccccctcaatgggcaatgggtatccccctcgagccaacgccagcaggttcatcaacactgagtcaggtcgctatgtgtactccgcccctctgagaaggcagctggcctcccggggcagtagtgtctgccatgtggacgtctcagacaaggcaggagatgagatggacctggaaggcatcagcatggatgcccccggctacatgagcgacggggatgttctgagcaagaacatccggaccgatgacattacaagcggatacatgactgatggtggacttggcctctatacccgtcgcctgaaccggctccctgatgggatggctgtggtacgggagaccctgcaacgaaatacctccctgggcctcggagacgctgacagctgggacgacagcagctccgtcagcagcggcatcagcgacaccatagacaacctcagcactgatgacatcaacaccagctcctccatcagctcttatgccaacacacctgcctcctctcgaaaaaacctggatgtgcagactgatgctgagaagcactcacaggtggagaggaattccctgtggtctggtgatgatgtcaagaaatcagacggaggctcagacagcggcataaaaatggagccaggttccaagtggaggcggaatccttctgatgtgtctgacgagtccgacaaaagcacgtcgggcaagaagaatcctgtcatctcccagacaggctcatggcggcgaggcatgacagctcaggtgggcatcaccatgccaaggacgaagccttcagccccggcaggcgcactgaagaccccaggaactggaaaaacagacgacgcaaaggtgtctgagaaaggaaggctttctcctaaagcctcccaggtgaagcgctccccatcagatgcaggccggagcagtggtgacgaatccaaaaagcccctccccagcagctctaggacacctactgccaatgccaacagctttgggttcaagaagcagagtggttccgccgccggcctggccatgatcacagccagcggggtgactgtcaccagcaggtcagccacactgggcaaaatcccaaagtcatctgcactcgtcagtcggtctgctggtcggaagtcaagtatggatggggctcagaatcaggatgacgggtatctagccctaagctcccggacaaaccttcagtaccggagtttgccgaggcccagtaagtccaacagccggaacggggctgggaacaggtctagcaccagcagcatagattccaacattagcagcaagtccgcaggcctgccagtgcccaaactgagggagccttccaaaacagccctaggcagctctctaccaggtctggtcaaccaaacagacaaggagaaaggcatctcatcagacaacgagagtgtggcttcctgtaactcggtgaaagtgaatccggcagcccagcctgtgtccagtccggctcagaccagtctccagcctggagccaagtacccagatgtggcctctcccacactccgcagactctttggtgggaagcctaccaagcaagtgcccatcgccacagctgaaaacatgaaaaattcggtggtcatctccaatcctcatgccaccatgactcagcaaggtaacctagactccccgtcaggcagtggcgtcctgagcagtgggagcagcagtcctctctacagcaagaatgtggacctcaaccagtctccgctagcctccagccccagctcagcccactcggccccttccaacagcctcacctggggcaccaacgccagcagctcctccgcagttagcaaggatggcctgggctttcagtctgtcagcagcctccacaccagctgtgagtccatcgacatctccctcagcagtggaggggtccccagccacaattcttccactggcctcatcgcctcctccaaggacgactccttgactccctttgtcagaactaacagtgtgaagaccacactgtcagaaagccctctctcttcccctgctgctagccctaagttctgcagaagtactctgcccaggaaacaggacagtgacccgcaccttgataggaacactttgcctaagaaaggactcaggtatactcccacctcccagcttcgcacgcaagaagatgcaaaagaatggttacggtcccattctgcaggaggccttcaggacaccgctgccaattcccccttttcctctggctccagcgtgacttctccctccggaacaagattcaacttttcccagcttgcgagtcccaccactgtcacccagatgagcttgtccaacccgaccatgctgaggactcacagcctctccaatgctgatgggcagtatgatccatacactgacagccgcttccggaatagctccatgtccctggatgagaagagcagaaccatgagccgttcaggctcattccgggatgggtttgaagaagttcatggatcctcactctccttggtttccagcacatcgtcagtttattctacaccagaagaaaaatgccagtcagagattcgcaagctgcggcgggaactggatgcctcccaggagaaagtttcagctttgaccacccagctgacagcaaatgctcaccttgtggcagcctttgaacagagtcttggtaacatgacaatcaggctccagagtctgaccatgacagctgagcagaaggactcagaactgaatgagttaagaaaaaccattgagctgctaaagaaacagaacgcagctgcccaggctgccattaatggagtaattaacacacctgagctcaactgcaaaggaaacggcactgcccagtctgcagacctccgcatccgcaggcagcactcctcagacagcgtctccagcatcaacagtgccaccagccactccagcgtgggcagcaacatagagagtgactcaaagaagaagaagcggaagaactggttacgcagctccttcaagcaagctttcgggaagaagaagtccccaaaatctgcgtcctctcattcagatattgaggagatgacggattcttctttgccttcctcaccaaagttaccgcacaatgggtccacaggttccaccccactgctgaggaattctcactccaactctctaatttcagaatgcatggatagtgaagctgagaccgtcatgcagctccgaaatgagttaagagacaaggagatgaagctgacggatatccgcttagaagctctcagttctgcccaccagctggaccagctccgggaggccatgaacaggatgcagagtgaaatagagaagctgaaagctgagaatgatcggctgaagtcagagtctcaaggcagtggctgcagccgggctccttcccaagtgtccatctctgcctccccgaggcagtccatgggcctctcccagcacagcttgaacctcactgagtcaaccagcctggacatgttgctggatgacactggtgaatgctcggctcggaaggaaggaggcaggcatgttaagatagttgtcagctttcaggaggaaatgaagtggaaggaggattccagaccacatctctttcttattggctgcattggagttagtggcaagacgaagtgggatgtgctcgatggggtggttagacggctgttcaaagaatacatcattcatgtcgacccagtgagtcagctagggctgaattcagacagcgttcttggctacagcattggagaaatcaagcgcagcaacacttccgaaacaccggagctgcttccttgtggctatctggttggagagaacacgaccatctcagtgactgtgaaagggctcgcagaaaacagcctggactcactggtgtttgagtccttgattcccaagcccatcctgcagcgctacgtctccctcctgatagagcaccgtcggatcattctctctggccccagcggcactgggaaaacctacctggccaaccggctgtctgagtatatagtgcttcgagagggacgggagttgacagacggggttatcgccacctttaacgtggaccataagtccagcaaggaattgcgccagtacctgtccaaccttgctgaccagtgcaacagtgagaacaatgctgtggacatgcccctcgtcatcatcctggacaacctacaccacgtgagctctctgggagagatcttcaatgggctgctcaactgcaagtaccacaaatgcccttacataattggcacaatgaaccaggctacctcttcgactcccaacctgcagcttcaccataacttcagatgggtgctttgtgccaaccacacggagcctgtgaagggtttccttggccgattcctgaggaggaagctcatggaaacagagatcagtgggcgggtgcgcaatatggagctggtaaaaatcattgactggattcccaaggtctggcatcacctcaaccgcttcctggaggctcacagttcctcggacgtcaccatcggcccccggctcttcctgtcatgccccatcgatgtggacggctcgagagtgtggttcaccgacttgtggaactattccattatcccctatctcctggaagccgtcagagaaggactccagctctatggaaggcgcgccccctgggaggatcctgccaagtgggtgatggacacatatccatgggcagccagcccacaacagcacgagtggcctcccctgctgcagttacggcctgaggatgtcggcttcgacggctactccatgcctcgggagggatcgacaagcaagcagatgccccccagtgatgctgaaggtgacccgctgatgaacatgctgatgaggctgcaggaggcagccaactactccagcccccagagctatgacagcgactccaacagcaacagccatcacgatgacatcttggactcctctttggagtccactctgtgacaggggcccggagcccagcgccctcctcttctcctcaccgcattccacctgcatcccccacatcaccctgaagatgacttcctgagccagcccccagccacagccttagagctgcgggaacaccgagaccccccgtccttcagcctcgacctgggtgcaggcatcccgggccagctgcctgcggaccgcttccttccacagcgagaactgcactaccttctgttgtactttaattattgttttgccttgttgctgtgacctccctaagacactgaagatacttctcgggaaaggatcatcgccgttgaaatg

SEQ ID NO: 3428 - protein, 2429 aa, Homosapiens; identical to SEQ ID NO: 462

SEQ ID NO: 3429 - DNA, 459 bp, Homosapiens
ttctgccctttctccttcccaaggtgcttatcactcagtaaggatgactgcacacctaccttacaccaggcaagaaggaagccagaaatactgatggagctttctttggggaatccaagtgggaacctgggggagagggaaaaggggaggagttccctttcttccctacatagctccctactgtccagtttacaacataattggctagggaggctggactagagggaagacacttctacaaattacccagcaagaactgtgtgttaaggtgggtgtggtagcgtgcacctgtagcctcagctactggggaggtggacgggggtgggtgctgagttgggaggatgttttgaggccaggagttgaaggctgtagtgtgctgtatttgtgcctgtgaatagccactgaactcctgcctggacagcataacaagaccccatattttttaaaaagttagaaaca

SEQ ID NO: 3430 - protein, 42 aa, Homosapiens
MELSLGNPSGNLGEREKGRSSLSSLHSSLLSSLQHNWLGRLD

SEQ ID NO: 3431 - DNA, 625 bp, Homosapiens
agcccagctacacccgggtgcaacgtggatgtatcagaaaacgacaaccccagaaaagcgggaaagcctctgagaaatgggactgaaatggaactgaacatatttttcagaacacaccatttcctagtcctgtctgagtcatcccagacctctgggagctggccagacttgaagggtagtcctcaccatccctccagtcaagacagacctgtgaaggcaacatgccttttacaaaaggaactttctctacagaataggttggtaactgacactagctatgaaaaagctgtggaatctaacaggacctgctagaacaaatactccagacttcaagtctaacatttagtaaacagatttcttccctttctttaaatgtaatgatgcaacaatgtggaaccaagtgaaactggctttgtgagtcaccttcagaagcggcgaaaggtggcttctcatttccaaagttcacagttcaacatggcctgcataagtaatacaaactgactgccactaatctcaccagaaatcacctctgtcaagaactgtgtgaggagagaggggacagagaaggaaagaaatacgtaccgacttgctctagtcgagtgcatttctaatagagcatgacata

SEQ ID NO: 3432 - protein, 74 aa, Homosapiens
MELNIFFRTHHFLVLSESSQTSGSWPDLKGSPHHPSSQDRPVKATCLLQKELSLQNRLVTDTSYEKAVESNRTC

SEQ ID NO: 3433 - DNA, 394 bp, Homosapiens
tagccacgtgaggatgggaagtctcatttgccaaatgactgggctgggtgcagtggctcaagcctataatcccagcactttgggaggctgaggcagatggatcacctgaggtcaggagttgaagaccagcttggctaacaagagttccccaaggacagaggtcagggaataagagctgagtgagacctcccaaagcagatcacaaagagaaggggacactgcaccatggaggtgacacaggccagtggccacggtgctggacctggggctgagaggacccacatgtatatcctggccgatttaggtatcttagactttctgtgcctcactttccttatctgtgaaatcagcattctgatcatgactaaataaaaattgctgccattgatcaagg

SEQ ID NO: 3434 - protein, 48 aa, Homosapiens [sequence omitted]

SEQ ID NO: 3435 - DNA, 547 bp, Homosapiens
acacatgtgaacagctagcgccaatagctttggtcagcattaatatgctgggtgtagatcttctccctccaagactccatacattcagcgtcttaagaagcagacccagagttccagggcacagcctcagcagcccaaggccagctccaaggtcactggcctttcctgatttgaccttcacttgggatcaagtcttcctgaaccagaaacaagctgaatccgagaagcccaggcaggctgtgctgctagcatcctgtgtatttcgcttcatctctccccgttacagaccaggaattccaaattcctagcccaaggtcagagaggtctcactgatgcctgtgtagccacgtgaggatgggaagtctcatttgccagtaagcactacaggaagtgatggttgaacacgatgggactaataagaaggaaacgtagttagagtgatcttattcatttaaaaacaaaagcagcaacaatacagcagtcgaggaaaagaatcaattctatttaagcaaagcaatttaaagtaataaaaaatgtttccagcatt

SEQ ID NO: 3436 - protein, 87 aa, Homosapiens
MLGVDLLPPRLHTFSVLRSRPRVPGHSLSSPRPAPRSLAFPDLTFTWDQVFLNQKQAESEKPRQAVLLASCVFRFISPRYRPGIPNS

SEQ ID NO: 3437 - DNA, 5051 bp, Homosapiens
aatcttttcaatcgaatgctttgccttcagacgtcaatggaatgagctaagaaatgttatagtcaatgatttttgcatcattaaaagtagcacttagggctggaaagactttctgcaatgtttctgtgcagtctgtgaggatttaaagtagtttttcattcttagattttcttcaatttgacccgctgttgcaaactcccctgggaccacatggagggcccttccattcagtgctttacgggccgcaatgtagtgaaatgctctggcctaggaaccttacaagctgggacgacagcagctccgtcagcagcggcatcagcgacaccatagacaacctcagcactgatgacatcaacaccagctcctccatcagctcttatgccaacacacctgcctcctctcgaaaaaacctggatgtgcagactgatgctgagaagcactcacaggtggagaggaattccctgtggtctggtgatgatgtcaagaaatcagacggaggctcagacagcggcataaaaatggagccaggttccaagtggaggcggaatccttctgatgtgtctgacgagtccgacaaaagcacgtcgggcaagaagaatcctgtcatctcccagacaggctcatggcggcgaggcatgacagctcaggtgggcatcaccatgccaaggacgaagccttcagccccggcaggcgcactgaagaccccaggaactggaaaaacagacgacgcaaaggtgtctgagaaaggaaggctttctcctaaagcctcccaggtgaagcgctccccatcagatgcaggccggagcagtggtgacgaatccaaaaagcccctccccagcagctctaggacacctactgccaatgccaacagctttgggttcaagaagcagagtggttccgccgccggcctggccatgatcacagccagcggggtgactgtcaccagcaggtcagccacactgggcaaaatcccaaagtcatctgcactcgtcagtcggtctgctggtcggaagtcaagtatggatggggctcagaatcaggatgacgggtatctagccctaagctcccggacaaaccttcagtaccggagtttgccgaggcccagtaagtccaacagccggaacggggctgggaacaggtctagcaccagcagcatagattccaacattagcagcaagtccgcaggcctgccagtgcccaaactgagggagccttccaaaacagccctaggcagctctctaccaggtctggtcaaccaaacagacaaggagaaaggcatctcatcagacaacgagagtgtggcttcctgtaactcggtgaaagtgaatccggcagcccagcctgtgtccagtccggctcagaccagtctccagcctggagccaagtacccagatgtggcctctcccacactccgcagactctttggtgggaagcctaccaagcaagtgcccatcgccacagctgaaaacatgaaaaattcggtggtcatctccaatcctcatgccaccatgactcagcaaggtaacctagactccccgtcaggcagtggcgtcctgagcagtgggagcagcagtcctctctacagcaagaatgtggacctcaaccagtctccgctagcctccagccccagctcagcccactcggccccttccaacagcctcacctggggcaccaacgccagcagctcctccgcagttagcaaggatggcctgggctttcagtctgtcagcagcctccacaccagctgtgagtccatcgacatctccctcagcagtggaggggtccccagccacaattcttccactggcctcatcgcctcctccaaggacgactccttgactccctttgtcagaactaacagtgtgaagaccacactgtcagaaagtgacccgcaccttgataggaacactttgcctaagaaaggactcaggtatactcccacctcccagcttcgcacgcaagaagatgcaaaagaatggttacggtcccattctgcaggaggccttcaggacaccgctgccaattcccccttttcctctggctccagcgtgacttctccctccggaacaagattcaacttttcccagcttgcgagtcccaccactgtcacccagatgagcttgtccaacccgaccatgctgaggactcacagcctctccaatgctgatgggcagtatgatccatacactgacagccgcttccggaatagctccatgtccctggatgagaagagcagaaccatgagccgttcaggctcattccgggatgggtttgaagaagttcatggatcctcactctccttggtttccagcacatcgtcagtttattctacaccagaagaaaaatgccagtcagagattcgcaagctgcggcgggaactggatgcctcccaggagaaagtttcagctttgaccacccagctgacagcaaatgctcaccttgtggcagcctttgaacagagtcttggtaacatgacaatcaggctccagagtctgaccatgacagctgagcagaaggactcagaactgaatgagttaagaaaaaccattgagctgctaaagaaacagaacgcagctgcccaggctgccattaatggagtaattaacacacctgagctcaactgcaaaggaaacggcactgcccagtctgcagacctccgcatccgcaggcagcactcctcagacagcgtctccagcatcaacagtgccaccagccactccagcgtgggcagcaacatagagagtgactcaaagaagaagaagcggaagaactggttacgcagctccttcaagcaagctttcgggaagaagaagtccccaaaatctgcgtcctctcattcagatattgaggagatgacggattcttctttgccttcctcaccaaagttaccgcacaatgggtccacaggttccaccccactgctgaggaattctcactccaactctctaatttcagaatgcatggatagtgaagctgagaccgtcatgcagctccgaaatgagttaagagacaaggagatgaagctgacggatatccgcttagaagctctcagttctgcccaccagctggaccagctccgggaggccatgaacaggatgcagagtgaaatagagaagctgaaagctgagaatgatcggctgaagtcagagtctcaaggcagtggctgcagccgggctccttcccaagtgtccatctctgcctccccgaggcagtccatgggcctctcccagcacagcttgaacctcactgagtcaaccagcctggacatgttgctggatgacactggtgaatgctcggctcggaaggaaggaggcaggcatgttaagatagttgtcagctttcaggaggaaatgaagtggaaggaggattccagaccacatctctttcttattggctgcattggagttagtggcaagacgaagtgggatgtgctcgatggggtggttagacggctgttcaaagaatacatcattcatgtcgacccagtgagtcagctagggctgaattcagacagcgttcttggctacagcattggagaaatcaagcgcagcaacacttccgaaacaccggagctgcttccttgtggctatctggttggagagaacacgaccatctcagtgactgtgaaagggctcgcagaaaacagcctggactcactggtgtttgagtccttgattcccaagcccatcctgcagcgctacgtctccctcctgatagagcaccgtcggatcattctctctggccccagcggcactgggaaaacctacctggccaaccggctgtctgagtatatagtgcttcgagagggacgggagttgacagacggggttatcgccacctttaacgtggaccataagtccagcaaggaattgcgccagtacctgtccaaccttgctgaccagtgcaacagtgagaacaatgctgtggacatgcccctcgtcatcatcctggacaacctacaccacgtgagctctctgggagagatcttcaatgggctgctcaactgcaagtaccacaaatgcccttacataattggcacaatgaaccaggctacctcttcgactcccaacctgcagcttcaccataacttcagatgggtgctttgtgccaaccacacggagcctgtgaagggtttccttggccgattcctgaggaggaagctcatggaaacagagatcagtgggcgggtgcgcaatatggagctggtaaaaatcattgactggattcccaaggtctggcatcacctcaaccgcttcctggaggctcacagttcctcggacgtcaccatcggcccccggctcttcctgtcatgccccatcgatgtggacggctcgagagtgtggttcaccgacttgtggaactattccattatcccctatctcctggaagccgtcagagaaggactccagctctatggaaggcgcgccccctgggaggatcctgccaagtgggtgatggacacatatccatgggcagccagcccacaacagcacgagtggcctcccctgctgcagttacggcctgaggatgtcggcttcgacggctactccatgcctcgggagggatcgacaagcaagcagatgccccccagtgatgctgaaggtgacccgctgatgaacatgctgatgaggctgcaggaggcagccaactactccagcccccagagctatgacagcgactccaacagcaacagccatcacgatgacatcttggactcctctttggagtccactctgtgacaggggcccggagcccagcgccctcctcttctcctcaccgcattccacctgcatcccccacatcaccctgaagatgacttcctgagccagcccccagccacagccttagagctgcgggaacaccgagaccccccgtccttcagcctcgacctgggtgcaggcatcccgggccagctgcctgcggaccgcttccttccacagcgagaactgcactaccttctgttgtactttaattattgttttgccttgttgctgtgacctccctaagacactgaagatacttctcgggaaaggatcatcgccgttgaaatg

SEQ ID NO: 3438 - protein, 1493 aa, Homosapiens
MLWPRNLTSWDDSSSVSSGISDTIDNLSTDDINTSSSISSYANTPASSRKNLDVQTDAEKHSQVERNSLWSGDDVKKSDGGSDSGIKMEPGSKWRRNPSDVSDESDKSTSGKKNPVISQTGSWRRGMTAQVGITMPRTKPSAPAGALKTPGTGKTDDAKVSEKGRLSPKASQVKRSPSDAGRSSGDESKKPLPSSSRTPTANANSFGFKKQSGSAAGLAMITASGVTVTSRSATLGKIPKSSALVSRSAGRKSSMDGAQNQDDGYLALSSRTNLQYRSLPRPSKSNSRNGAGNRSSTSSIDSNISSKSAGLPVPKLREPSKTALGSSLPGLVNQTDKEKGISSDNESVASCNSVKVNPAAQPVSSPAQTSLQPGAKYPDVASPTLRRLFGGKPTKQVPIATAENMKNSVVISNPHATMTQQGNLDSPSGSGVLSSGSSSPLYSKNVDLNQSPLASSPSSAHSAPSNSLTWGTNASSSSAVSKDGLGFQSVSSLHTSCESIDISLSSGGVPSHNSSTGLIASSKDDSLTPFVRTNSVKTTLSESDPHLDRNTLPKKGLRYTPTSQLRTQEDAKEWLRSHSAGGLQDTAANSPFSSGSSVTSPSGTRFNFSQLASPTTVTQMSLSNPTMLRTHSLSNADGQYDPYTDSRFRNSSMSLDEKSRTMSRSGSFRDGFEEVHGSSLSLVSSTSSVYSTPEEKCQSEIRKLRRELDASQEKVSALTTQLTANAHLVAAFEQSLGNMTIRLQSLTMTAEQKDSELNELRKTIELLKKQNAAAQAAINGVINTPELNCKGNGTAQSADLRIRRQHSSDSVSSINSATSHSSVGSNIESDSKKKKRKNWLRSSFKQAFGKKKSPKSASSHSDIEEMTDSSLPSSPKLPHNGSTGSTPLLRNSHSNSLISECMDSEAETVMQLRNELRDKEMKLTDIRLEALSSAHQLDQLREAMNRMQSEIEKLKAENDRLKSESQGSGCSRAPSQVSISASPRQSMGLSQHSLNLTESTSLDMLLDDTGECSARKEGGRHVKIVVSFQEEMKWKEDSRPHLFLIGCIGVSGKTKWDVLDGVVRRLFKEYIIHVDPVSQLGLNSDSVLGYSIGEIKRSNTSETPELLPCGYLVGENTTISVTVKGLAENSLDSLVFESLIPKPILQRYVSLLIEHRRIILSGPSGTGKTYLANRLSEYIVLREGRELTDGVIATFNVDHKSSKELRQYLSNLADQCNSENNAVDMPLVIILDNLHHVSSLGEIFNGLLNCKYHKCPYIIGTMNQATSSTPNLQLHHNFRWVLCANHTEPVKGFLGRFLRRKLMETEISGRVRNMELVKIIDWIPKVWHHLNRFLEAHSSSDVTIGPRLFLSCPIDVDGSRVWFTDLWNYSIIPYLLEAVREGLQLYGRRAPWEDPAKWVMDTYPWAASPQQHEWPPLLQLRPEDVGFDGYSMPREGSTSKQMPPSDAEGDPLMNMLMRLQEAANYSSPQSYDSDSNSNSHHDDILDSSLESTL

SEQ ID NO: 3439 - DNA, 8082 bp, Homosapiens
aatcttttcaatcgaatgctttgccttcagacgtcaatggaatgagctaagaaatgttatagtcaatgatttttgcatcattaaaagtagcacttagggctggaaagactttctgcaatgtttctgtgcagtctgtgaggatttaaagtagtttttcattcttagattttcttcaatttgacccgctgttgcaaactcccctgggaccacatggagggcccttccattcagtgctttacgggccgcaatgtagtgaaatgctctggcctaggaaccttacaagctgggacgacagcagctccgtcagcagcggcatcagcgacaccatagacaacctcagcactgatgacatcaacaccagctcctccatcagctcttatgccaacacacctgcctcctctcgaaaaaacctggatgtgcagactgatgctgagaagcactcacaggtggagaggaattccctgtggtctggtgatgatgtcaagaaatcagacggaggctcagacagcggcataaaaatggagccaggttccaagtggaggcggaatccttctgatgtgtctgacgagtccgacaaaagcacgtcgggcaagaagaatcctgtcatctcccagacaggctcatggcggcgaggcatgacagctcaggtgggcatcaccatgccaaggacgaagccttcagccccggcaggcgcactgaagaccccaggaactggaaaaacagacgacgcaaaggtgtctgagaaaggaaggctttctcctaaagcctcccaggtgaagcgctccccatcagatgcaggccggagcagtggtgacgaatccaaaaagcccctccccagcagctctaggacacctactgccaatgccaacagctttgggttcaagaagcagagtggttccgccgccggcctggccatgatcacagccagcggggtgactgtcaccagcaggtcagccacactgggcaaaatcccaaagtcatctgcactcgtcagtcggtctgctggtcggaagtcaagtatggatggggctcagaatcaggatgacgggtatctagccctaagctcccggacaaaccttcagtaccggagtttgccgaggcccagtaagtccaacagccggaacggggctgggaacaggtctagcaccagcagcatagattccaacattagcagcaagtccgcaggcctgccagtgcccaaactgagggagccttccaaaacagccctaggcagctctctaccaggtctggtcaaccaaacagacaaggagaaaggcatctcatcagacaacgagagtgtggcttcctgtaactcggtgaaagtgaatccggcagcccagcctgtgtccagtccggctcagaccagtctccagcctggagccaagtacccagatgtggcctctcccacactccgcagactctttggtgggaagcctaccaagcaagtgcccatcgccacagctgaaaacatgaaaaattcggtggtcatctccaatcctcatgccaccatgactcagcaaggtaacctagactccccgtcaggcagtggcgtcctgagcagtgggagcagcagtcctctctacagcaagaatgtggacctcaaccagtctccgctagcctccagccccagctcagcccactcggccccttccaacagcctcacctggggcaccaacgccagcagctcctccgcagttagcaaggatggcctgggctttcagtctgtcagcagcctccacaccagctgtgagtccatcgacatctccctcagcagtggaggggtccccagccacaattcttccactggcctcatcgcctcctccaaggacgactccttgactccctttgtcagaactaacagtgtgaagaccacactgtcagaaagtgacccgcaccttgataggaacactttgcctaagaaaggactcaggtatactcccacctcccagcttcgcacgcaagaagatgcaaaagaatggttacggtcccattctgcaggaggccttcaggacaccgctgccaattcccccttttcctctggctccagcgtgacttctccctccggaacaagattcaacttttcccagcttgcgagtcccaccactgtcacccagatgagcttgtccaacccgaccatgctgaggactcacagcctctccaatgctgatgggcagtatgatccatacactgacagccgcttccggaatagctccatgtccctggatgagaagagcagaaccatgagccgttcaggctcattccgggatgggtttgaagaagttcatggatcctcactctccttggtttccagcacatcgtcagtttattctacaccagaagaaaaatgccagtcagagattcgcaagctgcggcgggaactggatgcctcccaggagaaagtttcagctttgaccacccagctgacagcaaatgctcaccttgtggcagcctttgaacagagtcttggtaacatgacaatcaggctccagagtctgaccatgacagctgagcagaaggactcagaactgaatgagttaagaaaaaccattgagctgctaaagaaacagaacgcagctgcccaggctgccattaatggagtaattaacacacctgagctcaactgcaaaggaaacggcactgcccagtctgcagacctccgcatccgcaggcagcactcctcagacagcgtctccagcatcaacagtgccaccagccactccagcgtgggcagcaacatagagagtgactcaaagaagaagaagcggaagaactggttacgcagctccttcaagcaagctttcgggaagaagaagtccccaaaatctgcgtcctctcattcagatattgaggagatgacggattcttctttgccttcctcaccaaagttaccgcacaatgggtccacaggttccaccccactgctgaggaattctcactccaactctctaatttcagaatgcatggatagtgaagctgagaccgtcatgcagctccgaaatgagttaagagacaaggagatgaagctgacggatatccgcttagaagctctcagttctgcccaccagctggaccagctccgggaggccatgaacaggatgcagagtgaaatagagaagctgaaagctgagaatgatcggctgaagtcagagtctcaaggcagtggctgcagccgggctccttcccaagtgtccatctctgcctccccgaggcagtccatgggcctctcccagcacagcttgaacctcactgagtcaaccagcctggacatgttgctggatgacactggtgaatgctcggctcggaaggaaggaggcaggcatgttaagatagttgtcagctttcaggaggaaatgaagtggaaggaggattccagaccacatctctttcttattggctgcattggagttagtggcaagacgaagtgggatgtgctcgatggggtggttagacggctgttcaaagaatacatcattcatgtcgacccagtgagtcagctagggctgaattcagacagcgttcttggctacagcattggagaaatcaagcgcagcaacacttccgaaacaccggagctgcttccttgtggctatctggttggagagaacacgaccatctcagtgactgtgaaagggctcgcagaaaacagcctggactcactggtgtttgagtccttgattcccaagcccatcctgcagcgctacgtctccctcctgatagagcaccgtcggatcattctctctggccccagcggcactgggaaaacctacctggccaaccggctgtctgagtatatagtgcttcgagagggacgggagttgacagacggggttatcgccacctttaacgtggaccataagtccagcaaggaattgcgccagtacctgtccaaccttgctgaccagtgcaacagtgagaacaatgctgtggacatgcccctcgtcatcatcctggacaacctacaccacgtgagctctctgggagagatcttcaatgggctgctcaactgcaagtaccacaaatgcccttacataattggcacaatgaaccaggctacctcttcgactcccaacctgcagcttcaccataacttcagatgggtgctttgtgccaaccacacggagcctgtgaagggtttccttggccgattcctgaggaggaagctcatggaaacagagatcagtgggcgggtgcgcaatatggagctggtaaaaatcattgactggattcccaaggtctggcatcacctcaaccgcttcctggaggctcacagttcctcggacgtcaccatcggcccccggctcttcctgtcatgccccatcgatgtggacggctcgagagtgtggttcaccgacttgtggaactattccattatcccctatctcctggaagccgtcagagaaggactccagctctatggaaggcgcgccccctgggaggatcctgccaagtgggtgatggacacatatccatgggcagccagcccacaacagcacgagtggcctcccctgctgcagttacggcctgaggatgtcggcttcgacggctactccatgcctcgggagggatcgacaagcaagcagatgccccccagtgatgctgaaggtgacccgctgatgaacatgctgatgaggctgcaggaggcagccaactactccagcccccagagctatgacagcgactccaacagcaacagccatcacgatgacatcttggactcctctttggagtccactctgtgacaggggcccggagcccagcgccctcctcttctcctcaccgcattccacctgcatcccccacatcaccctgaagatgacttcctgagccagcccccagccacagccttagagctgcgggaacaccgagaccccccgtccttcagcctcgacctgggtgcaggcatcccgggccagctgcctgcggaccgcttccttccacagcgagaactgcactaccttctgttgtactttaattattgttttgccttgttgctgtgacctccctaagacactgaagatacttctcgggaaaggatcatcgccgttgaaatgaaaagagagacagagagaaaaaaaaaaagagaacccacatgaagctctgaaaccaaacagcatcctgccatgagcttcccagagacagaagagactggagcaaagtcggaaacacagagaagcacggcttcccctcagcacagaccctccagactgggtctcagagccgtgccacccaccctcccacacagccggccacagggagaactggtgctaaccagggtgcttgctttggtcacgttcaacgcactacagagctacgacacagggaaaccttaggagcaaataaaccgtgctttcatgttttttaaatggtgctttccttacccgagaggtattttgcctgttccaatcaaaccaccccattcaggtccatcagcctctgattaatatccgtgagagtgagtgacggagtgagagtgtgagcgagtggatgtggctgtcagtgcagaacagcatgtgtctctttccttctgatatatgaatgaatcaggtttttttttttttttttctgcaaacactgtgtatagtgagacttgttctactttggagaacaggttaccttttgaaaatgaggttgagtttcttcctttctgatgcattgatttttgaagatttttttttcccccttcccctcttggtcagaatcaatcctttggtgaaagtaagaaccgcaggagttgagttttggtttggtcctgctcagttttggtttttagttgtccatcctcacagtcctacacactcgcctcctcctgctagggctgggggtatctgtgtcctttaaaatggatgaggacctggtcctcgacatgtgggtgagccatggaccttgccttcccttctcgtccttgagggtttagaacacacaccaacacctccagcgtccccgccccagcttccggtggggtgatgcggtcaccctgcaaaagacttgcactttcctcagaaccaacatgacgcagctcaataagggtgagggtcactccctcccagaagccccgtctggacgagccttgcctgacctcttcggtgctgaccttcccaaagtgatgccttactggttttgtactaactgtgttcattttacataagtgtcgtgcctgcctggggtttgttttttttgtcattgttttccccattgaaacaaacagggctaaaaagtcatctgttcattaggagaactcaagttgctgtgacttttctcatccaaaagactcatttgtgtggatgcgtgaccatgggaaaaagaaaaaaaaaaagatccattttttaggttcttttcggtctccagctgacaacccaactggacaatgatctgtctggtgcaggagaaggcaaaagtttctacaagtctacatgaccttgctgatacttgttctaatagaaacccagtctgctgtgtcttcaacatactggtattttcattacaaagtatggtaaatttttgagttgtttgtttctgttttgtaaagagaatccttattggacaccagtgaaggtgtctctgttttaatgatcagggtttttattccatcttttgcatttcttctatttctgaaggtttgtctcttggcatctttttttagtttcttaccataagagtttgacccgaaactgctcacttcacattggatgacaccatgttcttcctctttgaaaagaaaaggggaatgtgtcccactagtgaaaggaaaacttttcaacactatccctgctttagtctcagcaaactcagactattctgcttagccttcattagtcatctgggtgtgagtgtgtcttgttctgtttttctttttaataaaacttttaaaccatatatttagcctgtgaccaggggggccaaaccctaagatttctggtaaacctgaagggtggccctcctcagacaatttatctcccagcaatgaccctactacactcgcgtactgtgaatttgggaggaggtaaagttgacttctcctcgtgggcagttttccaatcaccttgtgagtagacacctgccaatattgtttgaaacctttttttaatatgacatcctctcttgtcattctcttctcccctttcccacagacttccctcctgggtccaggttcagaaccaagacttctgtacctagtgctgcctgattggtgaacattgacttcaagtagcatagcccttgtgtgactcacaactccgtgtccttcctaaagtttcgggaagcagggttgtctaatatgcacatttcttattttggtcatatttttactttagtgtcactcaccttttacaaagtgactttgtactcatttagggctctatcggaaatgcttccattttgccttttctacagttaggccaattttgaaatatataaattctatgcaacatttatgttgagttaccaatggaagccaaaagttctcttcccaaactgccaagaatgatacaggccataattgaaatgggaataccttttaagtttcattaggggtggggtgggagtgggacaggaacaagacttgcctagatctttgttgtatcttggggacttttactttgttgtttgatgcttaaacttcaaaattctctgtattcaaatttgattgtggcgaatctacttcaaaaaggaaaaataatccaactttgtggatattaaatggaaggtttgctgttttgatctagttgtttccagtggagcagttttatgaaatatgttctataagatgtacattttttcattgtaacatagaaattgtaaataattgattaaagtgctgcattttgatgaattttttctagccatttttaaagagaaaactaggaattgagtattttgtgtacggtatgtttccatcctccctccccttcctcctcccctcctctctctctcttcctacctatttaattttcatttgtcatgaggtttttggatttgccaatgatctgctggacatcatgccccatgtcatagagaataaagctgatgattgtaccagtcttaaattattcatgattcaataaaattgatgcttatttattcaga

SEQ ID NO: 3440 - protein, 1493 aa, Homosapiens; identical to SEQ ID NO: 3438

SEQ ID NO: 3441 - DNA, 853 bp, Homosapiens
agaaatcttacaggcaaaggctattcgacatttgggattcctaagctaatctttttatttttggaagggtgtctttctgagaaaggcagccagaggcacagcaccaacctttctgacagtgtggtcttcacactgttagttctgacaaagggagtcaaggagtcgtccttggaggaggcgatgaggccagtggaagaattgtggctggggacccctccactgctgagggagatgtcgatggactcacagctggtgtggaggctgctgacagactgaaagcccaggccatccttgctaactgcggaggagctgctggcgttggtgccccagggccaagacagccccggcctcttaccagttcctggggtcttcagtgcgcctgccggggctgaaggcttcgtccttggcatggtgatgcccacctgagctgtcatgcctcgccgccatgagcctgtctgggagatgacaggattcttcttgcccgacgtgcttttgtcggactcgtcagacacatcagaaggattccgcctccacttggaacctggctccatttttatgccgctgtctgagcctccgtctgatttcttgacatcatcaccagaccacagggaattcctctccacctgtgagtgcttctcagcatcagtctgtggacagagactctctgaattagtccttccccagtcccaggctgggaagcccctcactccaaaggcaaaaatgccaaaacactggagtagttaagggaaaaataagcattactttaaagatgtttggacttttgtactctggttatcttgttagaaagactgattttttttttttggaaaaaaaaataaaaaagtaaataata

SEQ ID NO: 3442 - protein, 103 aa, Homosapiens
MPRRHEPVWEMTGFFLPDVLLSDSSDTSEGFRLHLEPGSIFMPLSEPPSDFLTSSPDHREFLSTCECFSASVCGQRLSELVLPQSQAGKPLTPKAKMPKHWSS

SEQ ID NO: 3443 - DNA, 2653 bp, Homosapiens
agcaagtgcccatcgccacagctgaaaacatgaaaaattcggtggtcatctccaatcctcatgccaccatgactcagcaaggtaacctagactccccgtcaggcagtggcgtcctgagcagtgggagcagcagtcctctctacagcaagaatgtggacctcaaccagtctccgctagcctccagccccagctcagcccactcggccccttccaacagcctcacctggggcaccaacgccagcagctcctccgcagttagcaaggatggcctgggctttcagtctgtcagcagcctccacaccagctgtgagtccatcgacatctccctcagcagtggaggggtccccagccacaattcttccactggcctcatcgcctcctccaaggacgactccttgactccctttgtcagaactaacagtgtgaagaccacactgtcagaaagccatggaccttgccttcccttctcgtccttgagggtttagaacacacaccaacacctccagcgtccccgccccagcttccggtggggtgatgcggtcaccctgcaaaagacttgcactttcctcagaaccaacatgacgcagctcaataagggtgagggtcactccctcccagaagccccgtctggacgagccttgcctgacctcttcggtgctgaccttcccaaagtgatgccttactggttttgtactaactgtgttcattttacataagtgtcgtgcctgcctggggtttgttttttttgtcattgttttccccattgaaacaaacagggctaaaaagtcatctgttcattaggagaactcaagttgctgtgacttttctcatccaaaagactcatttgtgtggatgcgtgaccatgggaaaaagaaaaaaaaaaagatccattttttaggttcttttcggtctccagctgacaacccaactggacaatgatctgtctggtgcaggagaaggcaaaagtttctacaagtctacatgaccttgctgatacttgttctaatagaaacccagtctgctgtgtcttcaacatactggtattttcattacaaagtatggtaaatttttgagttgtttgtttctgttttgtaaagagaatccttattggacaccagtgaaggtgtctctgttttaatgatcagggtttttattccatcttttgcatttcttctatttctgaaggtttgtctcttggcatctttttttagtttcttaccataagagtttgacccgaaactgctcacttcacattggatgacaccatgttcttcctctttgaaaagaaaaggggaatgtgtcccactagtgaaaggaaaacttttcaacactatccctgctttagtctcagcaaactcagactattctgcttagccttcattagtcatctgggtgtgagtgtgtcttgttctgtttttctttttaataaaacttttaaaccatatatttagcctgtgaccaggggggccaaaccctaagatttctggtaaacctgaagggtggccctcctcagacaatttatctcccagcaatgaccctactacactcgcgtactgtgaatttgggaggaggtaaagttgacttctcctcgtgggcagttttccaatcaccttgtgagtagacacctgccaatattgtttgaaacctttttttaatatgacatcctctcttgtcattctcttctcccctttcccacagacttccctcctgggtccaggttcagaaccaagacttctgtacctagtgctgcctgattggtgaacattgacttcaagtagcatagcccttgtgtgactcacaactccgtgtccttcctaaagtttcgggaagcagggttgtctaatatgcacatttcttattttggtcatatttttactttagtgtcactcaccttttacaaagtgactttgtactcatttagggctctatcggaaatgcttccattttgccttttctacagttaggccaattttgaaatatataaattctatgcaacatttatgttgagttaccaatggaagccaaaagttctcttcccaaactgccaagaatgatacaggccataattgaaatgggaataccttttaagtttcattaggggtggggtgggagtgggacaggaacaagacttgcctagatctttgttgtatcttggggacttttactttgttgtttgatgcttaaacttcaaaattctctgtattcaaatttgattgtggcgaatctacttcaaaaaggaaaaataatccaactttgtggatattaaatggaaggtttgctgttttgatctagttgtttccagtggagcagttttatgaaatatgttctataagatgtacattttttcattgtaacatagaaattgtaaataattgattaaagtgctgcattttgatgaattttttctagccatttttaaagagaaaactaggaattgagtattttgtgtacggtatgtttccatcctccctccccttcctcctcccctcctctctctctcttcctacctatttaattttcatttgtcatgaggtttttggatttgccaatgatctgctggacatcatgccccatgtcatagagaataaagctgatgattgtaccagtcttaaattattcatgattcaataaaattgatgcttatttattcaga

SEQ ID NO: 3444 - protein, 151 aa, Homosapiens
MKNSVVISNPHATMTQQGNLDSPSGSGVLSSGSSSPLYSKNVDLNQSPLASSPSSAHSAPSNSLTWGTNASSSSAVSKDGLGFQSVSSLHTSCESIDISLSSGGVPSHNSSTGLIASSKDDSLTPFVRTNSVKTTLSESHGPCLPFSSLRV

SEQ ID NO: 3445 - DNA, 2278 bp, Homosapiens
cccgctgccatagcaccacgctggtgctctctcatggccaggatgtgggaggggctgttcacctcggttgtgctagattgcattgctgcctgattgacatcaccaaacaccccttgccccatattgaatctcagttgactccacctctcctgcctgggcccttagaggtggatgtgaaggtgtctcctgggctaggacccccggctcatttccactggccattctatgggcatctctgagggagatctattgaaagtgggtctgtatgtaattaccagagaaatgttgactcctccagcacactgagagcatggctcacctctgcatttaggctgtcctggtcttgttcatgctttcccctaattatccctcaagtccatcgtcctcctctttccccctatcactgccccatcatcacccagcacaccattgccatcacctagctggtacgtctgcttgcagctttccccctgcactctgtagccaatcctctgcactgtggcagccagaccagagtgagcattctagagtacacatctgaccatagaactctcgtgcttaaagtccttcagtagctccagctccctatggcctgcaggatgaaatccagactccgttggttggcaggtcaagtatgaacttcagctacactaaacctctggtagtttccccaaacatccatgctatttcccatgcctttgcaaaggctgcagcatcaccccactcctgaccccaacaactgctcctgcctttccttatgttgctgcccattatctgtccagtctcagcccagacatcccctcctctaaggagccttccctgattcccttaggcttcatcatatttcatttctttctttgcctgtctgcctcctccaccagactgtgagctcctgggaaccaggacggtgtcttagtcatagtgatagttccatagcctagcaccgggcctgacatcaagcacaagaggcagtttgtctcagtggttagagcctagcctctggagccaggcttcttggttctcatcttagctcttcaattaactagctgtttgatcctggaaaagttacatgacctgtctgttcctcagcatttctgtccgtaaaacggaggtggagataatatctatgttagagggttggtatcaggaactgtgagttaatacatagttacaatgtttagaagagtgttcggtgcatagctaatccaatttgttgcattagcatatacaccttctgtttctaacgtgctttggttcctgaggtcagccatcatttggatcaccatcatcagcttgaaaagtgtttctgacttcctccagatgggtgctttgtgccaaccacacggagcctgtgaagggtttccttggccgattcctgaggaggaagctcatggaaacagagatcagtgggcgggtgcgcaatatggagctggtaaaaatcattgactggattcccaaggtctggcatcacctcaaccgcttcctggaggctcacagttcctcggacgtcaccatcggcccccggctcttcctgtcatgccccatcgatgtggacggctcgagagtgtggttcaccgacttgtggaactattccattatcccctatctcctggaagccgtcagagaaggactccagctctatggaaggcgcgccccctgggaggatcctgccaagtgggtgatggacacatatccatgggcagccagcccacaacagcacgagtggcctcccctgctgcagttacggcctgaggatgtcggcttcgacggctactccatgcctcgggagggatcgacaagcaagcagatgccccccagtgatgctgaaggtgacccgctgatgaacatgctgatgaggctgcaggaggcagccaactactccagcccccagagctatgacagcgactccaacagcaacagccatcacgatgacatcttggactcctctttggagtccactctgtgacaggggcccggagcccagcgccctcctcttctcctcaccgcattccacctgcatcccccacatcaccctgaagatgacttcctgagccagcccccagccacagccttagagctgcgggaacaccgagaccccccgtccttcagcctcgacctgggtgcaggcatcccgggccagctgcctgcggaccgcttccttccacagcgagaactgcactaccttctgttgtactttaattattgttttgccttgttgctgtgacctccctaagacactgaagatacttctcgggaaaggatcatcgccgttgaaatg

SEQ ID NO: 3446 - protein, 191 aa, Homosapiens [sequence omitted]

SEQ ID NO: 3447 - DNA, 5309 bp, Homosapiens
cccgctgccatagcaccacgctggtgctctctcatggccaggatgtgggaggggctgttcacctcggttgtgctagattgcattgctgcctgattgacatcaccaaacaccccttgccccatattgaatctcagttgactccacctctcctgcctgggcccttagaggtggatgtgaaggtgtctcctgggctaggacccccggctcatttccactggccattctatgggcatctctgagggagatctattgaaagtgggtctgtatgtaattaccagagaaatgttgactcctccagcacactgagagcatggctcacctctgcatttaggctgtcctggtcttgttcatgctttcccctaattatccctcaagtccatcgtcctcctctttccccctatcactgccccatcatcacccagcacaccattgccatcacctagctggtacgtctgcttgcagctttccccctgcactctgtagccaatcctctgcactgtggcagccagaccagagtgagcattctagagtacacatctgaccatagaactctcgtgcttaaagtccttcagtagctccagctccctatggcctgcaggatgaaatccagactccgttggttggcaggtcaagtatgaacttcagctacactaaacctctggtagtttccccaaacatccatgctatttcccatgcctttgcaaaggctgcagcatcaccccactcctgaccccaacaactgctcctgcctttccttatgttgctgcccattatctgtccagtctcagcccagacatcccctcctctaaggagccttccctgattcccttaggcttcatcatatttcatttctttctttgcctgtctgcctcctccaccagactgtgagctcctgggaaccaggacggtgtcttagtcatagtgatagttccatagcctagcaccgggcctgacatcaagcacaagaggcagtttgtctcagtggttagagcctagcctctggagccaggcttcttggttctcatcttagctcttcaattaactagctgtttgatcctggaaaagttacatgacctgtctgttcctcagcatttctgtccgtaaaacggaggtggagataatatctatgttagagggttggtatcaggaactgtgagttaatacatagttacaatgtttagaagagtgttcggtgcatagctaatccaatttgttgcattagcatatacaccttctgtttctaacgtgctttggttcctgaggtcagccatcatttggatcaccatcatcagcttgaaaagtgtttctgacttcctccagatgggtgctttgtgccaaccacacggagcctgtgaagggtttccttggccgattcctgaggaggaagctcatggaaacagagatcagtgggcgggtgcgcaatatggagctggtaaaaatcattgactggattcccaaggtctggcatcacctcaaccgcttcctggaggctcacagttcctcggacgtcaccatcggcccccggctcttcctgtcatgccccatcgatgtggacggctcgagagtgtggttcaccgacttgtggaactattccattatcccctatctcctggaagccgtcagagaaggactccagctctatggaaggcgcgccccctgggaggatcctgccaagtgggtgatggacacatatccatgggcagccagcccacaacagcacgagtggcctcccctgctgcagttacggcctgaggatgtcggcttcgacggctactccatgcctcgggagggatcgacaagcaagcagatgccccccagtgatgctgaaggtgacccgctgatgaacatgctgatgaggctgcaggaggcagccaactactccagcccccagagctatgacagcgactccaacagcaacagccatcacgatgacatcttggactcctctttggagtccactctgtgacaggggcccggagcccagcgccctcctcttctcctcaccgcattccacctgcatcccccacatcaccctgaagatgacttcctgagccagcccccagccacagccttagagctgcgggaacaccgagaccccccgtccttcagcctcgacctgggtgcaggcatcccgggccagctgcctgcggaccgcttccttccacagcgagaactgcactaccttctgttgtactttaattattgttttgccttgttgctgtgacctccctaagacactgaagatacttctcgggaaaggatcatcgccgttgaaatgaaaagagagacagagagaaaaaaaaaaagagaacccacatgaagctctgaaaccaaacagcatcctgccatgagcttcccagagacagaagagactggagcaaagtcggaaacacagagaagcacggcttcccctcagcacagaccctccagactgggtctcagagccgtgccacccaccctcccacacagccggccacagggagaactggtgctaaccagggtgcttgctttggtcacgttcaacgcactacagagctacgacacagggaaaccttaggagcaaataaaccgtgctttcatgttttttaaatggtgctttccttacccgagaggtattttgcctgttccaatcaaaccaccccattcaggtccatcagcctctgattaatatccgtgagagtgagtgacggagtgagagtgtgagcgagtggatgtggctgtcagtgcagaacagcatgtgtctctttccttctgatatatgaatgaatcaggtttttttttttttttttctgcaaacactgtgtatagtgagacttgttctactttggagaacaggttaccttttgaaaatgaggttgagtttcttcctttctgatgcattgatttttgaagatttttttttcccccttcccctcttggtcagaatcaatcctttggtgaaagtaagaaccgcaggagttgagttttggtttggtcctgctcagttttggtttttagttgtccatcctcacagtcctacacactcgcctcctcctgctagggctgggggtatctgtgtcctttaaaatggatgaggacctggtcctcgacatgtgggtgagccatggaccttgccttcccttctcgtccttgagggtttagaacacacaccaacacctccagcgtccccgccccagcttccggtggggtgatgcggtcaccctgcaaaagacttgcactttcctcagaaccaacatgacgcagctcaataagggtgagggtcactccctcccagaagccccgtctggacgagccttgcctgacctcttcggtgctgaccttcccaaagtgatgccttactggttttgtactaactgtgttcattttacataagtgtcgtgcctgcctggggtttgttttttttgtcattgttttccccattgaaacaaacagggctaaaaagtcatctgttcattaggagaactcaagttgctgtgacttttctcatccaaaagactcatttgtgtggatgcgtgaccatgggaaaaagaaaaaaaaaaagatccattttttaggttcttttcggtctccagctgacaacccaactggacaatgatctgtctggtgcaggagaaggcaaaagtttctacaagtctacatgaccttgctgatacttgttctaatagaaacccagtctgctgtgtcttcaacatactggtattttcattacaaagtatggtaaatttttgagttgtttgtttctgttttgtaaagagaatccttattggacaccagtgaaggtgtctctgttttaatgatcagggtttttattccatcttttgcatttcttctatttctgaaggtttgtctcttggcatctttttttagtttcttaccataagagtttgacccgaaactgctcacttcacattggatgacaccatgttcttcctctttgaaaagaaaaggggaatgtgtcccactagtgaaaggaaaacttttcaacactatccctgctttagtctcagcaaactcagactattctgcttagccttcattagtcatctgggtgtgagtgtgtcttgttctgtttttctttttaataaaacttttaaaccatatatttagcctgtgaccaggggggccaaaccctaagatttctggtaaacctgaagggtggccctcctcagacaatttatctcccagcaatgaccctactacactcgcgtactgtgaatttgggaggaggtaaagttgacttctcctcgtgggcagttttccaatcaccttgtgagtagacacctgccaatattgtttgaaacctttttttaatatgacatcctctcttgtcattctcttctcccctttcccacagacttccctcctgggtccaggttcagaaccaagacttctgtacctagtgctgcctgattggtgaacattgacttcaagtagcatagcccttgtgtgactcacaactccgtgtccttcctaaagtttcgggaagcagggttgtctaatatgcacatttcttattttggtcatatttttactttagtgtcactcaccttttacaaagtgactttgtactcatttagggctctatcggaaatgcttccattttgccttttctacagttaggccaattttgaaatatataaattctatgcaacatttatgttgagttaccaatggaagccaaaagttctcttcccaaactgccaagaatgatacaggccataattgaaatgggaataccttttaagtttcattaggggtggggtgggagtgggacaggaacaagacttgcctagatctttgttgtatcttggggacttttactttgttgtttgatgcttaaacttcaaaattctctgtattcaaatttgattgtggcgaatctacttcaaaaaggaaaaataatccaactttgtggatattaaatggaaggtttgctgttttgatctagttgtttccagtggagcagttttatgaaatatgttctataagatgtacattttttcattgtaacatagaaattgtaaataattgattaaagtgctgcattttgatgaattttttctagccatttttaaagagaaaactaggaattgagtattttgtgtacggtatgtttccatcctccctccccttcctcctcccctcctctctctctcttcctacctatttaattttcatttgtcatgaggtttttggatttgccaatgatctgctggacatcatgccccatgtcatagagaataaagctgatgattgtaccagtcttaaattattcatgattcaataaaattgatgcttatttattcaga

SEQ ID NO: 3448 - protein, 191 aa, Homosapiens [sequence omitted]

SEQ ID NO: 3449 - DNA, 1263 bp, Homosapiens
agaagagaatgacaagagaggatgtcatattaaaaaaaggtttcaaacaatattggcagggatagtgttgaaaagttttcctttcactagtgggacacattccccttttcttttcaaagaggaagaacatggtgtcatccaatgtgaagtgagcagtttcgggtcaaactcttatggtaagaaactaaaaaaagatgccaagagacaaaccttcagaaatagaagaaatgcaaaagatggaataaaaaccctgatcattaaaacagagacaccttcactggtgtccaataaggattctctttacaaaacagaaacaaacaactcaaaaatttaccatactttgtaatgaaaataccagtatgttgaagacacagcagactgggtttctattagaacaagtatcagcaaggtcatgtagacttgtagaaacttttgccttctcctgcaccagacagatcattgtccagttgggttgtcagctggagaccgaaaagaacctaaaaaatggatctttttttttttctttttcccatggtcacgcatccacacaaatgagtcttttggatgagaaaagtcacagcaacttgagttctcctaatgaacagatgactttttagccctgtttgtttcaatggggaaaacaatgacaaaaaaaacaaaccccaggcaggcacgacacttatgtaaaatgaacacagttagtacaaaaccagtaaggcatcactttgggaaggtcagcaccgaagaggtcaggcaaggctcgtccagacggggcttctgggagggagtgaccctcacccttattgagctgcgtcatgttggttctgaggaaagtgcaagtcttttgcagggtgaccgcatcaccccaccggaagctggggcggggacgctggaggtgttggtgtgtgttctaaaccctcaaggacgagaagggaaggcaaggtccatggctcacccacatgtcgaggaccaggtcctcatccattttaaaggacacagatacccccagccctagcaggaggaggcgagtgtgtaggactgtgaggatggacaactaaaaaccaaaactgagcaggaccaaaccaaaactcaactcctgcggttcttactttcaccaaaggattgattctgaccaagaggggaagggggaaaaaaaaatcttcaaaaatcaatgcatcagaaaggaagaaactcaacctcattttcaaaaggtaacctgttctccaaagtagaacaagtctcactatacacagtgtttgcaga

SEQ ID NO: 3450 - protein, 127 aa, Homosapiens [sequence omitted]

SEQ ID NO: 3451 - DNA, 1482 bp, Homosapiens
atgaagcctgtcgacggacaggaaacggtgaaaactacaccccggcaaatgccccaacagggaaggaggagctgggaagggctcacgctggcttcaagttcttaccgttcccccctccaaaaaaaaacaaaatccaagttgattttggcaaatatagactctattctgatcatccggaagacttggacaagcgcttcaccgggctgtgagtttcaacttaaactgccgagagctccctgtgtttggagaacggccagcatagcactcacagcctttggatacccttgcccgaggcagtttccggtcagcctaagctctttgcaagcggaatcctgccgctcggcagcccagcgccgctctcctccgctcctcccgcaagagagtccagagcctccggcgaatgaagctcgagtggagaactttgttgaacttcattgtcagagctgtcacttttcaaagtgctttagcgggcgggccactataaaaccatcacctcgacgagaggaccacggaggactcgcagacgcccaatccttgcagtcggcattttccggccactccagcttcctggtggaggatctgatccgcatcagccgaccccccgcctacctgccccgcagcgtgcccaccgccagcatgtcgccgcccaggcagggggcccccacggccctcaccgacacgggggcctcggacctgggctccccgggtcccggcagccgacggggcggctctccgccgactgccttctcccctgccagcgagacgacgtttctgaagtttggagtgaacgccatcctctcctcggggcccagaacagaaacatccccagccttgctccagagcgtccctcccaagaccttcgcctttccctacttcgaagggtcttttcagcctttcatcagatcttcttatttcccagcttcctccagcgtggtgcccatccccgggaccttctcctggccgctggccgcgcgcgggaagcctcggcggggcatgctgcgtcgagcagtcttctccgacgtgcagcggaaggcgctggagaagatgttccagaagcagaagtacatcagcaagcccgaccgcaagaagctggcggccaagctgggcctgaaagactcgcaggtgaaaatctggttccagaaccgacgcatgaaatggcggaactccaaggagcgcgaactcctgtctagcgggggctgtcgcgagcagaccctgcccaccaagctcaatccgcacccggacctcagcgacgtgggccagaagggccctgggaacgaagaggaggaggagggcccgggcagccccagccaccgcctggcctaccacgcgtcctccgacccccagcacctgcgggacccgcggctgccagggccgctgcccccctcgcccgcgcactcgagcagtcccgggaaaccttcggacttctcagattccgaggaggaagaggagggcgaggaacaggaggaaatcaccgtgtcctag

SEQ ID NO: 3452 - protein, 493 aa, Homosapiens
MKPVDGQETVKTTPRQMPQQGRRSWEGLTLASSSYRSPLQKKTKSKLILANIDSILIIRKTWTSASPGCEFQLKLPRAPCVWRTASIALTAFGYPCPRQFPVSLSSLQAESCRSAAQRRSPPLLPQESPEPPANEARVENFVELHCQSCHFSKCFSGRATIKPSPRREDHGGLADAQSLQSAFSGHSSFLVEDLIRISRPPAYLPRSVPTASMSPPRQGAPTALTDTGASDLGSPGPGSRRGGSPPTAFSPASETTFLKFGVNAILSSGPRTETSPALLQSVPPKTFAFPYFEGSFQPFIRSSYFPASSSVVPIPGTFSWPLAARGKPRRGMLRRAVFSDVQRKALEKMFQKQKYISKPDRKKLAAKLGLKDSQVKIWFQNRRMKWRNSKERELLSSGGCREQTLPTKLNPHPDLSDVGQKGPGNEEEEEGPGSPSHRLAYHASSDPQHLRDPRLPGPLPPSPAHSSSPGKPSDFSDSEEEEEGEEQEEITVS

SEQ ID NO: 3453 - DNA, 3209 bp, Homosapiens
tgttactgtacaaattggctgcctattgctttacactagaagtattgacccccttaaagctaatactgaattatatttctgcaggtgtatgtaatgtgtgccattagtaaggtaatttgccagttgcatccatttctgtcaggtacatatttttttgcattagccttaaggatgtttgtggaattgtctaatttatgcaatttgaacacctgctaattttccttctacttcatttaactgtgttttacttttttctttttagtagctctataaatcagtcagcagatagtgggggaacagacaattttgtccttataagtcaattgaaagaagaagtgatgtcacttaagcgtctcttacagcagagagaccagaccattttagaaaaagataaaaagttaactgaactaaaggcagactttcagtaccaagagtcaaatttgagaacaaaaatgaacagtatggaaaaagcccacaaagaaactgtggaacaacttcaggccaaaaacagagaactactcaaacaggtcgcagcattatcaaagggtaaaaaatttgacaaaagtggaagcatactaacatctccttgagaaagtcatttgtttagcatttcttcttacaatgtaaatttggggaaaaaaaattctgtgaagcccttaaattctgtgtagtagaaaaatatttttgcacaccaaatgaattggtgtgtttcctgttcacttttgtaattgatatacagcattttttaagttgtaaaacattcaaataaaacttcaactggtttgaagtaactttttaattatttgatatccaggaacttttttgccagcaatagtattaaacagttgtaaaggagtgcatgagtagtgctctttatgaaacgcaacatgcaataatagagtaggtatggtttcagaagtcagagcagcagggtttttttgttttgtttttgttttacactatgctaatttcagacaaacagttttcaatttagaaatacaaaaacttttaaactcgaaaaatggcgaacactggttttttgggaattgtgtttttactttgcatcaagatgaatttaggagaaaatcacggtgcttttattaaatgaacttcagatatatgtaaatttgttttttaaagttacatcattaacattagtaacctagcattttcattattggtataggaattaatgtttattgtacagtatctaaggtaaaatgtgtttctgttttgtaaaaactactgtagatttttacttacaagtgcctttttgccacctaatgtttttatttataggaatgctgatcttttgtacatacattttgttttaaaatcatgtttaataaatgtttgtatataaatgcatatgtacagaagcctatttcaaaaggaaatcaaagttgctagtaaaatgtttgagattacatttagaactaactgataatgcatatagattgtagaaaattttgtgatttgtttctgtgtgataagggaagctgttggtctttgaattcatttaattatgtcaaaatagttccccaaagatttaattttaagttgcttcttaaagagtaattttattttttatgtcatgtggcttcatattagtattgtgtgagttacatgttttgctttatattttataaaattttttaaaaattttaatgtttctgcaatgatccatgtatctgctttccctatgtgtggttatctaagttaatatttatgtacaatgtaatttgtaaatttaaagcaaatctgaaaaaaattaaatgatctttttaatccaatctgtgataatctttgaataaattggaatctactataagattcaggcattataagtaaattgtcctaaagtctttaaaattgtctataaaaggttaaggtagggtgggataggttatatgaagttattgactatattctgatccagcggttttcagcctgaaatagaatttatctcctagttattatcagttcagagttttagtttgattttaaagtattgctagatacactgtatagagtgagttgcttctcttaataatttatgggcaaagataaatttgcttcatgtaaaactgttactaaatttataagttttaaaggttttgttttatacaagcattgattgtgaatgtcatatcaaagattggctttcttaagaacacatgattgaaacaatttttttttaacatgacgtgtttcaatagactgttctcatagttcattataaagtgaataccaaataattctttgtccattttgaaagcataatatagggtaattttcaagtgatacaaaaagattcagttagaatcttgtaaactaaaccagtttatttttatgggatcttcatgtaataattttcttaaatttagtactctcaaccatgatagataatgccttaacatggattttaacgtttgcaggatttgctaaattcataagatagttattacctttctttgaaatttgtaatgttttatattcttgtttcatagccatttgtcagtccacagtggtcattatggttttactttttgatagttcttacaccttgttggagaaactacaaaagaaagttgtcctcgtccttccccttagctaacatcaaaattaaaaagttgaatattaatattagctaacattaaaatggaaggtaattcagttttagtgttagctaacattaacagtctaataatttagctttgtaaattccaaggctaaaaccctttcatgggcttcacagtatttagtcctaattaaatacccttctttattccatgaccttattttataacttaaatttttttgcaattgtataaattagtaattcagtcccagtcctggatctctgtagtgttttgacataataaactgatattctttaaatgtggacctgtaaggagatactatggtgtggtgtattgtgcttttagcctgttttccactattaattagcatttaccagtaagggtcattttgactcaagttatttatgtattaatagcctgtgaatattgcagtcctttttagattatattggtctaaatatgcattctgcagtgaacctgttaagctgttcacatgtatagactattgaaatactgtacttgtacacatctgactgttgacattttgtacttttttctagatccaatatttcacaataaaaaacttgtcaaaggctttgtattagt

SEQ ID NO: 3454 - protein, 131 aa, Homosapiens
MQFEHLLIFLLLHLTVFYFFLFSSSINQSADSGGTDNFVLISQLKEEVMSLKRLLQQRDQTILEKDKKLTELKADFQYQESNLRTKMNSMEKAHKETVEQLQAKNRELLKQVAALSKGKKFDKSGSILTSP

SEQ ID NO: 3455 - DNA, 3952 bp, Homosapiens
gaaggaagcggatccacggccgcacagctaaacagcaaccccctacccgcttcgtctccctccgccgctatcggggcctaagcgggagcggctggcacggcgtcactgggtgggctggggcggaagtggaggcggagggagacggtggcgtcgtccgcggggccctgggctctcgcggcgaggccctggtgggcgcgaggcagggggagggggaggaggaggagcccgcggcccgggcggcggcggctctcgggttctccgtagggccccgcctcggagcgggcggcggcggaggaggagactgaggagcaggatggcggcctcggccctgtacgcctgcaccaagtgtacccagcgttatcctttcgaggagctctcccagggccagcagctctgcaaggaatgtcggattgcacatcctattgtaaaatgtacttactgcagatcagaatttcaacaagagagcaaaactaacacaatttgtaagaagtgtgctcaaaatgtgaagcaatttgggacgcccaagccttgtcagtactgtaacataattgcagcatttattggtaccaagtgtcagcgttgcacaaattcagaaaaaaagtatggaccacctcagacctgtgaacagtgcaaacagcaatgtgcttttgatcggaaggaggaaggaagaagaaaggttgatggaaagttattatgctggctctgtactttatcgtacaaaagagttttacagaagacgaaagaacaaaggaagagcctgggatcttcacattcaaattcatcttcttcatctcttactgagaaagaccagcatcatccaaaacatcatcaccaccatcatcaccatcaccatcgtcacagcagtagccatcacaaaatcagcaatctaagtccagaagaagagcagggactgtggaaacagagccataaatcctctgcaacaattcagaatgaaactccaaagaaaaagcccaaattggaatctaagccatctaatggagatagtagctctataaatcagtcagcagatagtgggggaacagacaattttgtccttataagtcaattgaaagaagaagtgatgtcacttaagcgtctcttacagcagagagaccagaccattttagaaaaagataaaaagttaactgaactaaaggcagactttcagtaccaagagtcaaatttgagaacaaaaatgaacagtatggaaaaagcccacaaagaaactgtggaacaacttcaggccaaaaacagagaactactcaaacaggtcgcagcattatcaaagggtaaaaaatttgacaaaagtggaagcatactaacatctccttgagaaagtcatttgtttagcatttcttcttacaatgtaaatttggggaaaaaaaattctgtgaagcccttaaattctgtgtagtagaaaaatatttttgcacaccaaatgaattggtgtgtttcctgttcacttttgtaattgatatacagcattttttaagttgtaaaacattcaaataaaacttcaactggtttgaagtaactttttaattatttgatatccaggaacttttttgccagcaatagtattaaacagttgtaaaggagtgcatgagtagtgctctttatgaaacgcaacatgcaataatagagtaggtatggtttcagaagtcagagcagcagggtttttttgttttgtttttgttttacactatgctaatttcagacaaacagttttcaatttagaaatacaaaaacttttaaactcgaaaaatggcgaacactggttttttgggaattgtgtttttactttgcatcaagatgaatttaggagaaaatcacggtgcttttattaaatgaacttcagatatatgtaaatttgttttttaaagttacatcattaacattagtaacctagcattttcattattggtataggaattaatgtttattgtacagtatctaaggtaaaatgtgtttctgttttgtaaaaactactgtagatttttacttacaagtgcctttttgccacctaatgtttttatttataggaatgctgatcttttgtacatacattttgttttaaaatcatgtttaataaatgtttgtatataaatgcatatgtacagaagcctatttcaaaaggaaatcaaagttgctagtaaaatgtttgagattacatttagaactaactgataatgcatatagattgtagaaaattttgtgatttgtttctgtgtgataagggaagctgttggtctttgaattcatttaattatgtcaaaatagttccccaaagatttaattttaagttgcttcttaaagagtaattttattttttatgtcatgtggcttcatattagtattgtgtgagttacatgttttgctttatattttataaaattttttaaaaattttaatgtttctgcaatgatccatgtatctgctttccctatgtgtggttatctaagttaatatttatgtacaatgtaatttgtaaatttaaagcaaatctgaaaaaaattaaatgatctttttaatccaatctgtgataatctttgaataaattggaatctactataagattcaggcattataagtaaattgtcctaaagtctttaaaattgtctataaaaggttaaggtagggtgggataggttatatgaagttattgactatattctgatccagcggttttcagcctgaaatagaatttatctcctagttattatcagttcagagttttagtttgattttaaagtattgctagatacactgtatagagtgagttgcttctcttaataatttatgggcaaagataaatttgcttcatgtaaaactgttactaaatttataagttttaaaggttttgttttatacaagcattgattgtgaatgtcatatcaaagattggctttcttaagaacacatgattgaaacaatttttttttaacatgacgtgtttcaatagactgttctcatagttcattataaagtgaataccaaataattctttgtccattttgaaagcataatatagggtaattttcaagtgatacaaaaagattcagttagaatcttgtaaactaaaccagtttatttttatgggatcttcatgtaataattttcttaaatttagtactctcaaccatgatagataatgccttaacatggattttaacgtttgcaggatttgctaaattcataagatagttattacctttctttgaaatttgtaatgttttatattcttgtttcatagccatttgtcagtccacagtggtcattatggttttactttttgatagttcttacaccttgttggagaaactacaaaagaaagttgtcctcgtccttccccttagctaacatcaaaattaaaaagttgaatattaatattagctaacattaaaatggaaggtaattcagttttagtgttagctaacattaacagtctaataatttagctttgtaaattccaaggctaaaaccctttcatgggcttcacagtatttagtcctaattaaatacccttctttattccatgaccttattttataacttaaatttttttgcaattgtataaattagtaattcagtcccagtcctggatctctgtagtgttttgacataataaactgatattctttaaatgtggacctgtaaggagatactatggtgtggtgtattgtgcttttagcctgttttccactattaattagcatttaccagtaagggtcattttgactcaagttatttatgtattaatagcctgtgaatattgcagtcctttttagattatattggtctaaatatgcattctgcagtgaacctgttaagctgttcacatgtatagactattgaaatactgtacttgtacacatctgactgttgacattttgtacttttttctagatccaatatttcacaataaaaaacttgtcaaaggctttgtattagt

SEQ ID NO: 3456 - protein, 339 aa, Homosapiens
MAASALYACTKCTQRYPFEELSQGQQLCKECRIAHPIVKCTYCRSEFQQESKTNTICKKCAQNVKQFGTPKPCQYCNIIAAFIGTKCQRCTNSEKKYGPPQTCEQCKQQCAFDRKEEGRRKVDGKLLCWLCTLSYKRVLQKTKEQRKSLGSSHSNSSSSSLTEKDQHHPKHHHHHHHHHHRHSSSHHKISNLSPEEEQGLWKQSHKSSATIQNETPKKKPKLESKPSNGDSSSINQSADSGGTDNFVLISQLKEEVMSLKRLLQQRDQTILEKDKKLTELKADFQYQESNLRTKMNSMEKAHKETVEQLQAKNRELLKQVAALSKGKKFDKSGSILTSP

SEQ ID NO: 3457 - DNA, 4010 bp, Homosapiens
gaaggaagcggatccacggccgcacagctaaacagcaaccccctacccgcttcgtctccctccgccgctatcggggcctaagcgggagcggctggcacggcgtcactgggtgggctggggcggaagtggaggcggagggagacggtggcgtcgtccgcggggccctgggctctcgcggcgaggccctggtgggcgcgaggcagggggagggggaggaggaggagcccgcggcccgggcggcggcggctctcgggttctccgtagggccccgcctcggagcgggcggcggcggaggaggagactgaggagcaggatggcggcctcggccctgtacgcctgcaccaagtgtacccagcgttatcctttcgaggagctctcccagggccagcagctctgcaaggaatgtcggattgcacatcctattgtaaaatgtacttactgcagatcagaatttcaacaagagagcaaaactaacacaatttgtaagaagtgtgctcaaaatgtgaagcaatttgggacgcccaagccttgtcagtactgtaacataattgcagcatttattggtaccaagtgtcagcgttgcacaaattcagaaaaaaagtatggaccacctcagacctgtgaacagtgcaaacagcaatgtgcttttgatcggaaggaggaaggaagaagaaaggttgatggaaagttattatgctggctctgtactttatcgtacaaaagagttttacagaagacgaaagaacaaaggaagagcctgggatcttcacattcaaattcatcttcttcatctcttactgagaaagaccagcatcatccaaaacatcatcaccaccatcatcaccatcaccatcgtcacagcagtagccatcacaaaatcagcaatctaagtccagaagaagagcagggactgtggaaacagagccataaatcctctgcaacaattcagaatgaaactccaaagaaaaagcccaaattggaatctaagccatctaatggagataggtgtatgtaatgtgtgccattagtaaggtaatttgccagttgcatccatttctgtcagtagctctataaatcagtcagcagatagtgggggaacagacaattttgtccttataagtcaattgaaagaagaagtgatgtcacttaagcgtctcttacagcagagagaccagaccattttagaaaaagataaaaagttaactgaactaaaggcagactttcagtaccaagagtcaaatttgagaacaaaaatgaacagtatggaaaaagcccacaaagaaactgtggaacaacttcaggccaaaaacagagaactactcaaacaggtcgcagcattatcaaagggtaaaaaatttgacaaaagtggaagcatactaacatctccttgagaaagtcatttgtttagcatttcttcttacaatgtaaatttggggaaaaaaaattctgtgaagcccttaaattctgtgtagtagaaaaatatttttgcacaccaaatgaattggtgtgtttcctgttcacttttgtaattgatatacagcattttttaagttgtaaaacattcaaataaaacttcaactggtttgaagtaactttttaattatttgatatccaggaacttttttgccagcaatagtattaaacagttgtaaaggagtgcatgagtagtgctctttatgaaacgcaacatgcaataatagagtaggtatggtttcagaagtcagagcagcagggtttttttgttttgtttttgttttacactatgctaatttcagacaaacagttttcaatttagaaatacaaaaacttttaaactcgaaaaatggcgaacactggttttttgggaattgtgtttttactttgcatcaagatgaatttaggagaaaatcacggtgcttttattaaatgaacttcagatatatgtaaatttgttttttaaagttacatcattaacattagtaacctagcattttcattattggtataggaattaatgtttattgtacagtatctaaggtaaaatgtgtttctgttttgtaaaaactactgtagatttttacttacaagtgcctttttgccacctaatgtttttatttataggaatgctgatcttttgtacatacattttgttttaaaatcatgtttaataaatgtttgtatataaatgcatatgtacagaagcctatttcaaaaggaaatcaaagttgctagtaaaatgtttgagattacatttagaactaactgataatgcatatagattgtagaaaattttgtgatttgtttctgtgtgataagggaagctgttggtctttgaattcatttaattatgtcaaaatagttccccaaagatttaattttaagttgcttcttaaagagtaattttattttttatgtcatgtggcttcatattagtattgtgtgagttacatgttttgctttatattttataaaattttttaaaaattttaatgtttctgcaatgatccatgtatctgctttccctatgtgtggttatctaagttaatatttatgtacaatgtaatttgtaaatttaaagcaaatctgaaaaaaattaaatgatctttttaatccaatctgtgataatctttgaataaattggaatctactataagattcaggcattataagtaaattgtcctaaagtctttaaaattgtctataaaaggttaaggtagggtgggataggttatatgaagttattgactatattctgatccagcggttttcagcctgaaatagaatttatctcctagttattatcagttcagagttttagtttgattttaaagtattgctagatacactgtatagagtgagttgcttctcttaataatttatgggcaaagataaatttgcttcatgtaaaactgttactaaatttataagttttaaaggttttgttttatacaagcattgattgtgaatgtcatatcaaagattggctttcttaagaacacatgattgaaacaatttttttttaacatgacgtgtttcaatagactgttctcatagttcattataaagtgaataccaaataattctttgtccattttgaaagcataatatagggtaattttcaagtgatacaaaaagattcagttagaatcttgtaaactaaaccagtttatttttatgggatcttcatgtaataattttcttaaatttagtactctcaaccatgatagataatgccttaacatggattttaacgtttgcaggatttgctaaattcataagatagttattacctttctttgaaatttgtaatgttttatattcttgtttcatagccatttgtcagtccacagtggtcattatggttttactttttgatagttcttacaccttgttggagaaactacaaaagaaagttgtcctcgtccttccccttagctaacatcaaaattaaaaagttgaatattaatattagctaacattaaaatggaaggtaattcagttttagtgttagctaacattaacagtctaataatttagctttgtaaattccaaggctaaaaccctttcatgggcttcacagtatttagtcctaattaaatacccttctttattccatgaccttattttataacttaaatttttttgcaattgtataaattagtaattcagtcccagtcctggatctctgtagtgttttgacataataaactgatattctttaaatgtggacctgtaaggagatactatggtgtggtgtattgtgcttttagcctgttttccactattaattagcatttaccagtaagggtcattttgactcaagttatttatgtattaatagcctgtgaatattgcagtcctttttagattatattggtctaaatatgcattctgcagtgaacctgttaagctgttcacatgtatagactattgaaatactgtacttgtacacatctgactgttgacattttgtacttttttctagatccaatatttcacaataaaaaacttgtcaaaggctttgtattagt

SEQ ID NO: 3458 - protein, 233 aa, Homosapiens
MAASALYACTKCTQRYPFEELSQGQQLCKECRIAHPIVKCTYCRSEFQQESKTNTICKKCAQNVKQFGTPKPCQYCNIIAAFIGTKCQRCTNSEKKYGPPQTCEQCKQQCAFDRKEEGRRKVDGKLLCWLCTLSYKRVLQKTKEQRKSLGSSHSNSSSSSLTEKDQHHPKHHHHHHHHHHRHSSSHHKISNLSPEEEQGLWKQSHKSSATIQNETPKKKPKLESKPSNGDRCM

SEQ ID NO: 3459 - DNA, 614 bp, Homosapiens
ctttgacaagttttttattgtgaaatattggatctagaaaaaagtacaaaatgtcaacagtcagatgtgtacaagtacagtatttcaatagtctatacatgtgaacagcttaacaggttcactgcagaatgcatatttagaccaatataatctaaaaaggactgcaatattcacaggctattaatacataaataacttgagtcaaaatgacccttactggtaaatgctaattaatagtggaaaacaggctaaaagcacaatacaccacaccatagtatctccttacaggtccacatttaaagaatatcagtttattatgtcaaaacactacagagatccaggactgggactgaattactaatttatacaattgcaaaaaaatttaagttataaaataaggtcatggaataaagaagggtatttaattaggactaaatactgtgaagcccatgaaagggttttagccttggaatttacaaagctaaattattagactgttaatgttagtaaggggaaggacgaggacaactttcttttgtagtttctccaacaaggtgtaagaactatcaaaaagtaaaaccataatgaccactgtggactgacaaatggctatg

SEQ ID NO: 3460 - protein, 45 aa, Homosapiens
MLINSGKQAKSTIHHTIVSPYRSTFKEYQFIMSKHYRDPGLGLNY

SEQ ID NO: 3461 - DNA, 1380 bp, Homosapiens
gaaggaagcggatccacggccgcacagctaaacagcaaccccctacccgcttcgtctccctccgccgctatcggggcctaagcgggagcggctggcacggcgtcactgggtgggctggggcggaagtggaggcggagggagacggtggcgtcgtccgcggggccctgggctctcgcggcgaggccctggtgggcgcgaggcagggggagggggaggaggaggagcccgcggcccgggcggcggcggctctcgggttctccgtagggccccgcctcggagcgggcggcggcggaggaggagactgaggagcaggatggcggcctcggccctgtacgcctgcaccaagtgtacccagcgttatcctttcgaggagctctcccagggccagcagctctgcaaggaatgtcggattgcacatcctattgtaaaatgtacttactgcagatcagaatttcaacaagagagcaaaactaacacaatttgtaagaagtgtgctcaaaatgtgaagcaatttgggacgcccaagccttgtcagtactgtaacataattgcagcatttattggtaccaagtgtcagcgttgcacaaattcagaaaaaaagtatggaccacctcagacctgtgaacagtgcaaacagcaatgtgcttttgatcggaaggaggaaggaagaagaaaggttgatggaaagttattatgctggctctgtactttatcgtacaaaagagttttacagaagacgaaagaacaaaggaagagcctgggatcttcacattcaaattcatcttcttcatctcttactgagaaagaccagcatcatccaaaacatcatcaccaccatcatcaccatcaccatcgtcacagcagtagccatcacaaaatcagcaatctaagtccagaagaagagcagggactgtggaaacagagccataaatcctctgcaacaattcagaatgaaactccaaagaaaaagcccaaattggaatctaagccatctaatggagataggtgtatgtaatgtgtgccattagtaaggtaatttgccagttgcatccatttctgtcagtagctctataaatcagtcagcagatagtgggggaacagacaattttgtccttataagtcaattgaaagaagaagtgatgtcacttaagcgtctcttacagcagagagaccagaccattttagaaaaagataaaaagttaactgaactaaaggcagactttcagtaccaagagtcaaatttgagaacaaaaatgaacagtatggaaaaagcccacaaagaaactgtggaacaacttcaggccaaaaacagagaactactcaaacaggtcgcagcattatcaaaggatccaatatttcacaataaaaaacttgtcaaag

SEQ ID NO: 3462 - protein, 233 aa, Homosapiens; identical to SEQ ID NO: 3458

SEQ ID NO: 3463 - DNA, 446 bp, Homosapiens
agagccggcctgtaaccccggcgttgtctgccccagcgggccccgttacgcgctaccttgtgacgtcaccagggaagaggcggattctctcctactacagaaagacgtctgctgttttgattggctaggaaagacgtccgttaggacgtgttgccctttctgtgggttcagcctagggtccccgctggtgggcggctcccgagtcttggagaagagcacgagaacctagaccgcccccgaagtgcggagaccccctgggcaggctgaaagatggcggcggcgtctgtctctgcggcttctggttctcacttgtcggtccttcgaccaagctgcacagtagctccatattaatttcccttaaaaatgttttatggctatcatacattttataatattaaatataagatttactttttgagaataataaaatgaataccttcatgttc

SEQ ID NO: 3464 - protein, 75 aa, Homosapiens
EPACNPGVVCPSGPRYALPCDVTREEADSLLLQKDVCCFDWLGKTSVRTCCPFCGFSLGSPLVGGSRVLEKSTRT

SEQ ID NO: 3465 - DNA, 1552 bp, Homosapiens
aaagacgtccgttaggacgtgttgccctttctgtgtaagctgtgagcgtaggcggccctgagggggtgtgttgcaggggtttccaagcccagcaccagcacccttgcccttttccatcaggggttcagcctagggtccccgctggtgggcggctcccgagtcttggagaagagcacgagaacctagaccgcccccgaagtgcggagaccccctgggcaggctgaaagatggcggcggcgtctgtctctgcggcttctggttctcacttgtcgaacagctttgctgagccatcaaggtctaatggaagcatggttcggcattcttcatctccatatgtagtatatccttcggataagcctttccttaatagtgatctacgacgctccccaagtaagcctacacttgcctatccagaaagcaacagcagagccatattttctgctcttaagaatcttcaagataagattcgacgcttggaacttgagaggattcaggcagaagaaagtgtgaaaaccttgtctagagaaacaattgaatataagaaagtactggatgaacagatacaagaaagggagaattcaaagaatgaggaatcaaagcacaatcaagaactgacatctcagttgttagctgcagaaaataaatgcaatctattagaaaaacaattggaatacatgcgaaatatgataaagcatgccgaaatggagaggacatctgtcttagagaaacaagtttccctagaaagagaacgacaacatgatcaaacacatgttcagagccaacttgaaaaattggatcttcttgaacaggagtataacaaacttaccacaatgcaggcccttgcagaaaaaaaaatgcaagagttggaagcaaaactccatgaagaagaacaggaaaggaaacgcatgcaagctaaggcagctgagttgcagactggtctagaaacaaatagacttatctttgaagataaggcaactccgtgtgttcccaatgcaagaagaattaaaaaaaagaagtcaaaaccaccagaaaaggtgtgaagacagaaccaaatcaggcaaaatgctgattacttggtatagtttatgtcaaaacacccataaactgtgtggtgtactacaaccttgagagagtaaatctttcattctcaatttcttcattcagaaggtggagataagtaatacctactcctaaatttttatcctgatagtgagaaaatatataagcattttggaactacagaacaccatacaaaattagcattattagtactgcattatcttgtgctcttacaatgttttgtgtatatgtatactgattttctacttagaatgtaactgttgttttgtcaagtgcttttttccccccagcctttcctaggctaggatatatgctaacaagtactattaggagctggcttgtgatcataatgccaactatagataaggcaagtagtagcctagtagttaactgaagtttcaagttagtcatgtatagtcagtttttattatcatgtgaataaaataaaattgttttccttttcttttcattc

SEQ ID NO: 3466 - protein, 270 aa, Homosapiens
MAAASVSAASGSHLSNSFAEPSRSNGSMVRHSSSPYVVYPSDKPFLNSDLRRSPSKPTLAYPESNSRAIFSALKNLQDKIRRLELERIQAEESVKTLSRETIEYKKVLDEQIQERENSKNEESKHNQELTSQLLAAENKCNLLEKQLEYMRNMIKHAEMERTSVLEKQVSLERERQHDQTHVQSQLEKLDLLEQEYNKLTTMQALAEKKMQELEAKLHEEEQERKRMQAKAAELQTGLETNRLIFEDKATPCVPNARRIKKKKSKPPEKV

SEQ ID NO: 3467 - DNA, 1547 bp, Homosapiens
aaagacgtccgttaggacgtgttgccctttctgtgtaagctgtgagcgtaggcggccctgagggggtgtgttgcaggggtttccaagcccagcaccagcacccttgcccttttccatcaggggttcagcctagggtccccgctggtgggcggctcccgagtcttggagaagagcacgagaacctagaccgcccccgaagtgcggagaccccctgggcaggctgaaagatggcggcggcgtctgtctctgcggcttctggttctcacttgtcgaacagctttgctgagccatcaaggtctaatggaagcatggttcggcattcttcatctccatatgtagtatatccttcggataagcctttccttaatagtgatctacgacgctccccaagtaagcctacacttgcctatccagaaagcaacagcagagccatattttctgctcttaagaatcttcaagataagattcgacgcttggaacttgagaggattcaggcagaagaaagtgtgaaaaccttgtctagagaaacaattgaatataagaaagtactggatgaacagatacaagaaagggagaattcaaagaatgaggaatcaaagcacaatcaagaactgacatctcagttgttagctgcagaaaataaatgcaatctattagaaaaacaattggaatacatgcgaaatatgataaagcatgccgaaatggagaggacatctgtcttagagaaacaagtttccctagaaagagaacgacaacatgatcaaacacatgttcagagccaacttgaaaaattggatcttcttgaacaggagtataacaaacttaccacaatgcaggcccttgcagaaaaaaaaatgcaagagttggaagcaaaactccatgaagaagaacaggaaaggaaacgcatgcaagctaaggcagctgagttgcagactggtctagaaacaaatagacttatctttgaagataaggcaactccgtgtgttcccaatgcaagaagaattaaaaaaaagaagtcaaaaccaccagaaaagaaaagttctaggaactattttggtgcacaaccacattatagattatgcttgggtgatatgccatttgtagctgggaagtccacaagccctagccatgccgtggtagccaatgttcagcttgtcttgcatctaatgaagcaacacagtaaagctttgtgcaatgatcgagtcatcaacagtattcctttggcaaagcaagtatcttcacgaggtggtaaaagtaagaagttgtcagtaacacctccctcctccaacggtattaatgaggagttgtcagaagtcttacagactttacaggatgaatttgggcaaatgagctttgatcaccagcagcttgcaaaacttatccaggagtcgccaaccgttgaactgaaagacaagttggagtgtgaattggaggcattagtgggaaggatggaagcaaaagccaaccaaataactaaagttcgaaaataccaagcccagctggagaaacagaagttagagaagcagaagaaggaattaaaagctacc

SEQ ID NO: 3468 - protein, 439 aa, Homosapiens
MAAASVSAASGSHLSNSFAEPSRSNGSMVRHSSSPYVVYPSDKPFLNSDLRRSPSKPTLAYPESNSRAIFSALKNLQDKIRRLELERIQAEESVKTLSRETIEYKKVLDEQIQERENSKNEESKHNQELTSQLLAAENKCNLLEKQLEYMRNMIKHAEMERTSVLEKQVSLERERQHDQTHVQSQLEKLDLLEQEYNKLTTMQALAEKKMQELEAKLHEEEQERKRMQAKAAELQTGLETNRLIFEDKATPCVPNARRIKKKKSKPPEKKSSRNYFGAQPHYRLCLGDMPFVAGKSTSPSHAVVANVQLVLHLMKQHSKALCNDRVINSIPLAKQVSSRGGKSKKLSVTPPSSNGINEELSEVLQTLQDEFGQMSFDHQQLAKLIQESPTVELKDKLECELEALVGRMEAKANQITKVRKYQAQLEKQKLEKQKKELKA

SEQ ID NO: 3469 - DNA, 2020 bp, Homosapiens
aaagacgtccgttaggacgtgttgccctttctgtgtaagctgtgagcgtaggcggccctgagggggtgtgttgcaggggtttccaagcccagcaccagcacccttgcccttttccatcaggggttcagcctagggtccccgctggtgggcggctcccgagtcttggagaagagcacgagaacctagaccgcccccgaagtgcggagaccccctgggcaggctgaaagatggcggcggcgtctgtctctgcggcttctggttctcacttgtcgaacagctttgctgagccatcaaggtctaatggaagcatggttcggcattcttcatctccatatgtagtatatccttcggataagcctttccttaatagtgatctacgacgctccccaagtaagcctacacttgcctatccagaaagcaacagcagagccatattttctgctcttaagaatcttcaagataagattcgacgcttggaacttgagaggattcaggcagaagaaagtgtgaaaaccttgtctagagaaacaattgaatataagaaagtactggatgaacagatacaagaaagggagaattcaaagaatgaggaatcaaagcacaatcaagaactgacatctcagttgttagctgcagaaaataaatgcaatctattagaaaaacaattggaatacatgcgaaatatgataaagcatgccgaaatggagaggacatctgtcttagagaaacaagtttccctagaaagagaacgacaacatgatcaaacacatgttcagagccaacttgaaaaattggatcttcttgaacaggagtataacaaacttaccacaatgcaggcccttgcagaaaaaaaaatgcaagagttggaagcaaaactccatgaagaagaacaggaaaggaaacgcatgcaagctaaggcagctgagttgcagactggtctagaaacaaatagacttatctttgaagataaggcaactccgtgtgttcccaatgcaagaagaattaaaaaaaagaagtcaaaaccaccagaaaagaaaagttctaggaactattttggtgcacaaccacattatagattatgcttgggtgatatgccatttgtagctgggaagtccacaagccctagccatgccgtggtagccaatgttcagcttgtcttgcatctaatgaagcaacacagtaaagctttgtgcaatgatcgagtcatcaacagtattcctttggcaaagcaagtatcttcacgaggtggtaaaagtaagaagttgtcagtaacacctccctcctccaacggtattaatgaggagttgtcagaagtcttacagactttacaggatgaatttgggcaaatgagctttgatcaccagcagcttgcaaaacttatccaggagtcgccaaccgttgaactgaaagacaagttggagtgtgaattggaggcattagtgggaaggatggaagcaaaagccaaccaaataactaaagttcgaaaataccaagcccagctggagaaacagaagttagagaagcagaagaaggaattaaaagctaccaaaaagactcttgatgaagaaagaaacagcagcagccgttctggaatcacagggaccacaaataagaaagattttatgaaactgagacctggagaaaaaaggagaaaaaatcttcagttattgaaggacatgcaaagcatacagaattcattacaaagcagtagtttgtgttgggattactgactcataaccaggtcagaaattttattcagataatctgtacctcatcaatcagatgatgacaatttacttcccaggtctcatactcacttatgttggaattaattaatagcaggtgttaaaggacccaggcttcattacacaggcttttcatgtatgcaggatgactcaatgttaaagcatttaaatggaaaccaggggagttttaaagcccgagaaaccacacataatcttttgttgagatgagtttgctgtactgacgctgcactttgtaaacagattaccagtttttt

SEQ ID NO: 3470 - protein, 500 aa, Homosapiens; identical to SEQ ID NO: 470

SEQ ID NO: 3471 - DNA, 2203 bp, Homosapiens
aaagacgtccgttaggacgtgttgccctttctgtgtaagctgtgagcgtaggcggccctgagggggtgtgttgcaggggtttccaagcccagcaccagcacccttgcccttttccatcaggggttcagcctagggtccccgctggtgggcggctcccgagtcttggagaagagcacgagaacctagaccgcccccgaagtgcggagaccccctgggcaggctgaaagatggcggcggcgtctgtctctgcggcttctggttctcacttgtcgaacagctttgctgagccatcaaggtctaatggaagcatggttcggcattcttcatctccatatgtagtatatccttcggataagcctttccttaatagtgatctacgacgctccccaagtaagcctacacttgcctatccagaaagcaacagcagagccatattttctgctcttaagaatcttcaagataagattcgacgcttggaacttgagaggattcaggcagaagaaagtgtgaaaaccttgtctagagaaacaattgaatataagaaagtactggatgaacagatacaagaaagggagaattcaaagaatgaggaatcaaagcacaatcaagaactgacatctcagttgttagctgcagaaaataaatgcaatctattagaaaaacaattggaatacatgcgaaatatgataaagcatgccgaaatggagaggacatctgtcttagagaaacaagtttccctagaaagagaacgacaacatgatcaaacacatgttcagagccaacttgaaaaattggatcttcttgaacaggagtataacaaacttaccacaatgcaggcccttgcagaaaaaaaaatgcaagagttggaagcaaaactccatgaagaagaacaggaaaggaaacgcatgcaagctaaggcagctgagttgcagactggtctagaaacaaatagacttatctttgaagataaggcaactccgtgtgttcccaatgcaagaagaattaaaaaaaagaagtcaaaaccaccagaaaagaaaagttctaggaactattttggtgcacaaccacattatagattatgcttgggtgatatgccatttgtagctgggaagtccacaagccctagccatgccgtggtagccaatgttcagcttgtcttgcatctaatgaagcaacacagtaaagctttgtgcaatgatcgagtcatcaacagtattcctttggcaaagcaagtatcttcacgaggtggtaaaagtaagaagttgtcagtaacacctccctcctccaacggtattaatgaggagttgtcagaagtcttacagactttacaggatgaatttgggcaaatgagctttgatcaccagcagcttgcaaaacttatccaggagtcgccaaccgttgaactgaaagacaagttggagtgtgaattggaggcattagtgggaaggatggaagcaaaagccaaccaaataactaaagttcgaaaataccaagcccagctggagaaacagaagttagagaagcagaagaaggaattaaaagctaccaaaaagactcttgatgaagaaagaaacagcagcagccgttctggaatcacagggaccacaaataagaaagattttatgaaactgagacctggagaaaaaaggagaaaaaatcttcagttattgaaggacatgcaaagcatacagaattcattacaaagcagtagtttgtgttgggattactgactcataaccaggtcagaaattttattcagataatctgtacctcatcaatcagatgatgacaatttacttcccaggtctcatactcacttatgttggaattaattaatagcaggtgttaaaggacccaggcttcattacacaggcttttcatgtatgcaggatgactcaatgttaaagcatttaaatggaaaccaggggagttttaaagcccgagaaaccacacataatcttttgttgagatgagtttgctgtactgacgctgcactttgtaaacagattaccagttttttacttgtgggtgtgattttttaaaatagttctttatatataattaaaattaggtttaaattttcaaaatatgagactatgctataggcagtgcttgcttgaaaagtctcatttttaaatctccctggcatgaggtgcccacttcccctttccaaagcaaccattaaacatactttgtttctact

SEQ ID NO: 3472 - protein, 500 aa, Homosapiens; identical to SEQ ID NO: 470

SEQ ID NO: 3473 - DNA, 2702 bp, Homosapiens
aaagacgtccgttaggacgtgttgccctttctgtgtaagctgtgagcgtaggcggccctgagggggtgtgttgcaggggtttccaagcccagcaccagcacccttgcccttttccatcaggggttcagcctagggtccccgctggtgggcggctcccgagtcttggagaagagcacgagaacctagaccgcccccgaagtgcggagaccccctgggcaggctgaaagatggcggcggcgtctgtctctgcggcttctggttctcacttgtcgaacagctttgctgagccatcaaggtctaatggaagcatggttcggcattcttcatctccatatgtagtatatccttcggataagcctttccttaatagtgatctacgacgctccccaagtaagcctacacttgcctatccagaaagcaacagcagagccatattttctgctcttaagaatcttcaagataagattcgacgcttggaacttgagaggattcaggcagaagaaagtgtgaaaaccttgtctagagaaacaattgaatataagaaagtactggatgaacagatacaagaaagggagaattcaaagaatgaggaatcaaagcacaatcaagaactgacatctcagttgttagctgcagaaaataaatgcaatctattagaaaaacaattggaatacatgcgaaatatgataaagcatgccgaaatggagaggacatctgtcttagagaaacaagtttccctagaaagagaacgacaacatgatcaaacacatgttcagagccaacttgaaaaattggatcttcttgaacaggagtataacaaacttaccacaatgcaggcccttgcagaaaaaaaaatgcaagagttggaagcaaaactccatgaagaagaacaggaaaggaaacgcatgcaagctaaggcagctgagttgcagactggtctagaaacaaatagacttatctttgaagataaggcaactccgtgtgttcccaatgcaagaagaattaaaaaaaagaagtcaaaaccaccagaaaagaaaagttctaggaactattttggtgcacaaccacattatagattatgcttgggtgatatgccatttgtagctgggaagtccacaagccctagccatgccgtggtagccaatgttcagcttgtcttgcatctaatgaagcaacacagtaaagctttgtgcaatgatcgagtcatcaacagtattcctttggcaaagcaagtatcttcacgaggtggtaaaagtaagaagttgtcagtaacacctccctcctccaacggtattaatgaggagttgtcagaagtcttacagactttacaggatgaatttgggcaaatgagctttgatcaccagcagcttgcaaaacttatccaggagtcgccaaccgttgaactgaaagacaagttggagtgtgaattggaggcattagtgggaaggatggaagcaaaagccaaccaaataactaaagttcgaaaataccaagcccagctggagaaacagaagttagagaagcagaagaaggaattaaaagctaccaaaaagactcttgatgaagaaagaaacagcagcagccgttctggaatcacagggaccacaaataagaaagattttatgaaactgagacctggagaaaaaaggagaaaaaatcttcagttattgaaggacatgcaaagcatacagaattcattacaaagcagtagtttgtgttgggattactgactcataaccaggtcagaaattttattcagataatctgtacctcatcaatcagatgatgacaatttacttcccaggtctcatactcacttatgttggaattaattaatagcaggtgttaaaggacccaggcttcattacacaggcttttcatgtatgcaggatgactcaatgttaaagcatttaaatggaaaccaggggagttttaaagcccgagaaaccacacataatcttttgttgagatgagtttgctgtactgacgctgcactttgtaaacagattaccagttttttacttgtgggtgtgattttttaaaatagttctttatatataattaaaattaggtttaaattttcaaaatatgagactatgctataggcagtgcttgcttgaaaagtctcatttttaaatctccctggcatgaggtgcccacttcccctttccaaagcaaccattaaacatactttgtttctactattggtggagtttttctatatttaaaaatacatatatatttcagaggatttttattttgctttttggcatttcagactttgatcagtgttaagtgcacttgtattgctttttaatctgttaattttttaaagacccaagcagtcattttgagttatatctataaaaattataaaaggatttttgaaagtataaacaaattgtcagtgaaataaatgagattttggaataaagtgagaatgggagaagggatatgttgtgagcatataccttcacagttcttaatacctgttttgtaatcatgatattcagtcaaggcattatggtttttaatcttgaaacttagagaaccctttgaatatttgcttttactggtgtacagtatgagtggaatataaactgtacacataattatcatgttgatataaatcataatttcaactagatcaagacatgttaaccttttataaatttaaagtcaataaagcacctttttaaagg

SEQ ID NO: 3474 - protein, 500 aa, Homosapiens; identical to SEQ ID NO: 470

SEQ ID NO: 3475 - DNA, 1763 bp, Homosapiens
aaagacgtccgttaggacgtgttgccctttctgtgtaagctgtgagcgtaggcggccctgagggggtgtgttgcaggggtttccaagcccagcaccagcacccttgcccttttccatcaggggttcagcctagggtccccgctggtgggcggctcccgagtcttggagaagagcacgagaacctagaccgcccccgaagtgcggagaccccctgggcaggctgaaagatggcggcggcgtctgtctctgcggcttctggttctcacttgtcgaacagctttgctgagccatcaaggtctaatggaagcatggttcggcattcttcatctccatatgtagtatatccttcggataagcctttccttaatagtgatctacgacgctccccaagtaagcctacacttgcctatccagaaagcaacagcagagccatattttctgctcttaagaatcttcaagataagattcgacgcttggaacttgagaggattcaggcagaagaaagtgtgaaaaccttgtctagagaaacaattgaatataagaaagtactggatgaacagatacaagaaagggagaattcaaagaatgaggaatcaaagcacaatcaagaactgacatctcagttgttagctgcagaaaataaatgcaatctattagaaaaacaattggaatacatgcgaaatatgataaagcatgccgaaatggagaggacatctgtcttagagaaacaagtttccctagaaagagaacgacaacatgatcaaacacatgttcagagccaacttgaaaaattggatcttcttgaacaggagtataacaaacttaccacaatgcaggcccttgcagaaaaaaaaatgcaagagttggaagcaaaactccatgaagaagaacaggaaaggaaacgcatgcaagctaaggcagctgagttgcagactggtctagaaacaaatagacttatctttgaagataaggcaactccgtgtgttcccaatgcaagaagaattaaaaaaaagaagtcaaaaccaccagaaaagaaaagttctaggaactattttggtgcacaaccacattatagattatgcttgggtgatatgccatttgtagctgggaagtccacaagccctagccatgccgtggtagccaatgttcagcttgtcttgcatctaatgaagcaacacagtaaagctttgtgcaatgatcgagtcatcaacagtattcctttggcaaagcaagtatcttcacgaggtggtaaaagtaagaagttgtcagtaacacctccctcctccaacggtattaatgaggagttgtcagaagtcttacagactttacaggatgaatttgggcaaatgagctttgatcaccagcagcttgcaaaacttatccaggagtcgccaaccgttgaactgaaagacaagttggagtgtgaattggaggcattagtgggaaggatggaagcaaaagccaaccaaataactaaagttcgaaaataccaagcccagctggagaaacagaagttagagaagcagaagaaggaattaaaagctaccaaaaagactcttgatgaagaaagaaacagcagcagccgttctggaatcacagggaccacaaataagaaagattttatgaaactgagacctggagaaaaaaggagaaaaaatcttcagttattgaaggacatgcaaagcatacagaattcattacaaagcagtagtttgtgttgggattactgactcataaccaggtcattaaattgtataaccatc

SEQ ID NO: 3476 - protein, 500 aa, Homosapiens; identical to SEQ ID NO: 470

SEQ ID NO: 3477 - DNA, 3167 bp, Homosapiens
aaagacgtccgttaggacgtgttgccctttctgtgtaagctgtgagcgtaggcggccctgagggggtgtgttgcaggggtttccaagcccagcaccagcacccttgcccttttccatcaggggttcagcctagggtccccgctggtgggcggctcccgagtcttggagaagagcacgagaacctagaccgcccccgaagtgcggagaccccctgggcaggctgaaagatggcggcggcgtctgtctctgcggcttctggttctcacttgtcgaacagctttgctgagccatcaaggtctaatggaagcatggttcggcattcttcatctccatatgtagtatatccttcggataagcctttccttaatagtgatctacgacgctccccaagtaagcctacacttgcctatccagaaagcaacagcagagccatattttctgctcttaagaatcttcaagataagattcgacgcttggaacttgagaggattcaggcagaagaaagtgtgaaaaccttgtctagagaaacaattgaatataagaaagtactggatgaacagatacaagaaagggagaattcaaagaatgaggaatcaaagcacaatcaagaactgacatctcagttgttagctgcagaaaataaatgcaatctattagaaaaacaattggaatacatgcgaaatatgataaagcatgccgaaatggagaggacatctgtcttagagaaacaagtttccctagaaagagaacgacaacatgatcaaacacatgttcagagccaacttgaaaaattggatcttcttgaacaggagtataacaaacttaccacaatgcaggcccttgcagaaaaaaaaatgcaagagttggaagcaaaactccatgaagaagaacaggaaaggaaacgcatgcaagctaaggcagctgagttgcagactggtctagaaacaaatagacttatctttgaagataaggcaactccgtgtgttcccaatgcaagaagaattaaaaaaaagaagtcaaaaccaccagaaaagaaaagttctaggaactattttggtgcacaaccacattatagattatgcttgggtgatatgccatttgtagctgggaagtccacaagccctagccatgccgtggtagccaatgttcagcttgtcttgcatctaatgaagcaacacagtaaagctttgtgcaatgatcgagtcatcaacagtattcctttggcaaagcaagtatcttcacgaggtggtaaaagtaagaagttgtcagtaacacctccctcctccaacggtattaatgaggagttgtcagaagtcttacagactttacaggatgaatttgggcaaatgagctttgatcaccagcagcttgcaaaacttatccaggagtcgccaaccgttgaactgaaagacaagttggagtgtgaattggaggcattagtgggaaggatggaagcaaaagccaaccaaataactaaagttcgaaaataccaagcccagctggagaaacagaagttagagaagcagaagaaggaattaaaagctaccaaaaagactcttgatgaagaaagaaacagcagcagccgttctggaatcacagggaccacaaataagaaagattttatgaaactgagacctggagaaaaaaggagaaaaaatcttcagttattgaaggacatgcaaagcatacagaattcattacaaagcagtagtttgtgttgggattactgactcataaccaggtcagaaattttattcagataatctgtacctcatcaatcagatgatgacaatttacttcccaggtctcatactcacttatgttggaattaattaatagcaggtgttaaaggacccaggcttcattacacaggcttttcatgtatgcaggatgactcaatgttaaagcatttaaatggaaaccaggggagttttaaagcccgagaaaccacacataatcttttgttgagatgagtttgctgtactgacgctgcactttgtaaacagattaccagttttttacttgtgggtgtgattttttaaaatagttctttatatataattaaaattaggtttaaattttcaaaatatgagactatgctataggcagtgcttgcttgaaaagtctcatttttaaatctccctggcatgaggtgcccacttcccctttccaaagcaaccattaaacatactttgtttctactattggtggagtttttctatatttaaaaatacatatatatttcagaggatttttattttgctttttggcatttcagactttgatcagtgttaagtgcacttgtattgctttttaatctgttaattttttaaagacccaagcagtcattttgagttatatctataaaaattataaaaggatttttgaaagtataaacaaattgtcagtgaaataaatgagattttggaataaagtgagaatgggagaagggatatgttgtgagcatataccttcacagttcttaatacctgttttgtaatcatgatattcagtcaaggcattatggtttttaatcttgaaacttagagaaccctttgaatatttgcttttactggtgtacagtatgagtggaatataaactgtacacataattatcatgttgatataaatcataatttcaactagatcaagacatgttaaccttttataaatttaaagtcaataaagcacctttttaaaggaaacactgcaactttccttaacagcctgttaataaaggctttgtgacaagctctcaaaaaatgcatttctaaataggaggacatcaatgtattgatgaagagaaaaaactagtacttagttgccacactcatgcttacatagaaagagagcccaagaatattagatttcctcatgatacaagatactacagtaacaggctttaatttaggatccttaagattttggggtattatttgtgactctcctgaaattgtaaacttgtgcttctgtgtccagttttctaatgagtaggttcgtagcttgattgaattaataattgtgagcccatagacacaagggaagtgagaaacagtgctctggtgacatgataaatatatgtgtcaaccaccatttcagctattaaaaactcctgttatctccttgtttgaatttcaggtcattaaattgtataaccatcatttgaa

SEQ ID NO: 3478 - protein, 500 aa, Homosapiens; identical to SEQ ID NO: 470

SEQ ID NO: 3479 - DNA, 3089 bp, Homosapiens
aaagacgtccgttaggacgtgttgccctttctgtgtaagctgtgagcgtaggcggccctgagggggtgtgttgcaggggtttccaagcccagcaccagcacccttgcccttttccatcaggggttcagcctagggtccccgctggtgggcggctcccgagtcttggagaagagcacgagaacctagaccgcccccgaagtgcggagaccccctgggcaggctgaaagatggcggcggcgtctgtctctgcggcttctggttctcacttgtcgaacagctttgctgagccatcaaggtctaatggaagcatggttcggcattcttcatctccatatgtagtatatccttcggataagcctttccttaatagtgatctacgacgctccccaagtaagcctacacttgcctatccagaaagcaacagcagagccatattttctgctcttaagaatcttcaagataagattcgacgcttggaacttgagaggattcaggcagaagaaagtgtgaaaaccttgtctagagaaacaattgaatataagaaagtactggatgaacagatacaagaaagggagaattcaaagaatgaggaatcaaagcacaatcaagaactgacatctcagttgttagctgcagaaaataaatgcaatctattagaaaaacaattggaatacatgcgaaatatgataaagcatgccgaaatggagaggacatctgtcttagagaaacaagtttccctagaaagagaacgacaacatgatcaaacacatgttcagagccaacttgaaaaattggatcttcttgaacaggagtataacaaacttaccacaatgcaggcccttgcagaaaaaaaaatgcaagagttggaagcaaaactccatgaagaagaacaggaaaggaaacgcatgcaagctaaggcagctgagttgcagactggtctagaaacaaatagacttatctttgaagataaggcaactccgtgtgttcccaatgcaagaagaattaaaaaaaagaagtcaaaaccaccagaaaagtccacaagccctagccatgccgtggtagccaatgttcagcttgtcttgcatctaatgaagcaacacagtaaagctttgtgcaatgatcgagtcatcaacagtattcctttggcaaagcaagtatcttcacgaggtggtaaaagtaagaagttgtcagtaacacctccctcctccaacggtattaatgaggagttgtcagaagtcttacagactttacaggatgaatttgggcaaatgagctttgatcaccagcagcttgcaaaacttatccaggagtcgccaaccgttgaactgaaagacaagttggagtgtgaattggaggcattagtgggaaggatggaagcaaaagccaaccaaataactaaagttcgaaaataccaagcccagctggagaaacagaagttagagaagcagaagaaggaattaaaagctaccaaaaagactcttgatgaagaaagaaacagcagcagccgttctggaatcacagggaccacaaataagaaagattttatgaaactgagacctggagaaaaaaggagaaaaaatcttcagttattgaaggacatgcaaagcatacagaattcattacaaagcagtagtttgtgttgggattactgactcataaccaggtcagaaattttattcagataatctgtacctcatcaatcagatgatgacaatttacttcccaggtctcatactcacttatgttggaattaattaatagcaggtgttaaaggacccaggcttcattacacaggcttttcatgtatgcaggatgactcaatgttaaagcatttaaatggaaaccaggggagttttaaagcccgagaaaccacacataatcttttgttgagatgagtttgctgtactgacgctgcactttgtaaacagattaccagttttttacttgtgggtgtgattttttaaaatagttctttatatataattaaaattaggtttaaattttcaaaatatgagactatgctataggcagtgcttgcttgaaaagtctcatttttaaatctccctggcatgaggtgcccacttcccctttccaaagcaaccattaaacatactttgtttctactattggtggagtttttctatatttaaaaatacatatatatttcagaggatttttattttgctttttggcatttcagactttgatcagtgttaagtgcacttgtattgctttttaatctgttaattttttaaagacccaagcagtcattttgagttatatctataaaaattataaaaggatttttgaaagtataaacaaattgtcagtgaaataaatgagattttggaataaagtgagaatgggagaagggatatgttgtgagcatataccttcacagttcttaatacctgttttgtaatcatgatattcagtcaaggcattatggtttttaatcttgaaacttagagaaccctttgaatatttgcttttactggtgtacagtatgagtggaatataaactgtacacataattatcatgttgatataaatcataatttcaactagatcaagacatgttaaccttttataaatttaaagtcaataaagcacctttttaaaggaaacactgcaactttccttaacagcctgttaataaaggctttgtgacaagctctcaaaaaatgcatttctaaataggaggacatcaatgtattgatgaagagaaaaaactagtacttagttgccacactcatgcttacatagaaagagagcccaagaatattagatttcctcatgatacaagatactacagtaacaggctttaatttaggatccttaagattttggggtattatttgtgactctcctgaaattgtaaacttgtgcttctgtgtccagttttctaatgagtaggttcgtagcttgattgaattaataattgtgagcccatagacacaagggaagtgagaaacagtgctctggtgacatgataaatatatgtgtcaaccaccatttcagctattaaaaactcctgttatctccttgtttgaatttcaggtcattaaattgtataaccatcatttgaa

SEQ ID NO: 3480 - protein, 474 aa, Homosapiens
MAAASVSAASGSHLSNSFAEPSRSNGSMVRHSSSPYVVYPSDKPFLNSDLRRSPSKPTLAYPESNSRAIFSALKNLQDKIRRLELERIQAEESVKTLSRETIEYKKVLDEQIQERENSKNEESKHNQELTSQLLAAENKCNLLEKQLEYMRNMIKHAEMERTSVLEKQVSLERERQHDQTHVQSQLEKLDLLEQEYNKLTTMQALAEKKMQELEAKLHEEEQERKRMQAKAAELQTGLETNRLIFEDKATPCVPNARRIKKKKSKPPEKSTSPSHAVVANVQLVLHLMKQHSKALCNDRVINSIPLAKQVSSRGGKSKKLSVTPPSSNGINEELSEVLQTLQDEFGQMSFDHQQLAKLIQESPTVELKDKLECELEALVGRMEAKANQITKVRKYQAQLEKQKLEKQKKELKATKKTLDEERNSSSRSGITGTTNKKDFMKLRPGEKRRKNLQLLKDMQSIQNSLQSSSLCWDY

SEQ ID NO: 3481 - DNA, 3964 bp, Homosapiens
ttagaaaaaacattgatccatcaatcctttgtccctgaagtcaggaagtaatttgccagtaagagactgccttttaaagtctttttaatactaggcattgcccctagctacccaggagcatggaagttcaacaccaaaggcatggaagtagtctacttgtccctaaacacagtgtgtctaattcaccctctggatcagggagcataaggacttctaaggcacattacatacactataaaaagggttcttaatgctgtggaagagaacttcagagagaacattatgagggtctggaaggattacagttgaagatgatgccatcatttttatagaaaaagtcatgaaagccatcaagtctgaaataataaattcctgttggagaaaactctccaggtgatatgcatgatttcacaggatttatgacaaagccaatcatgaaaaagatggtagatatggcaaaaaaggttggaggtgaaggatttcaagatacgaattttggagaaattaaagagtcagtagacaccatgatagaggaattaacagaagatgactgggatggataagagtgctttcaaaccagtgccacaagatgaagaagacaacacagaagtaatgtcagaaaacaagttgacattagataatctgacagaagggttctaattattcaagactgcttttgactttttttttttttttttttttgagacggagtctcgctctgtcactcaggctggagtgcagtggcacgatctcagctcactgcaacctctgcctcctgggttcaagcaattctcccacctcagcctcccaagtacctggacaacaggcacgcgccaccatgcctggctaatttttgtatttttttagtaaagacagggtttctccatgttggccaggctggtctcgaaatcctgaccttaggtgatccacctgcctcagcctcccaaagtgctgggattctgtaatcccactgtaatcccagtggctgagccactgcgcccagcctgcttttgacttttacgacatcgacccttctatgatacatcactgaaactaaaacaaatggtggaagaattggtatctcatagaaacatttttagagaaatgaaaaagcagaaaagtcaagacaaattatagtgtatttctgtaaagttacacagaatgtgctagcctctcctgcctccccctccacttcttctgcctctgccactcctgagacagcaagaccaaccctacccttctgcctactcaacagtgaagataatggggatgaaggcctgtatggtgatccagttaatgaatagtaaatatactttctcttccttaggattttcttaatatttttttctaactttacttttagaatattgcttacaatacataaaacaaaaatgcttccagtcaacagcaggctattacattttagggcaaaatttattatagttctcagttacataagtgggagctgaatgatcagaacccatggacacatagtggggaacaacatacactggagcctgtttggtgggggagttggtcaacggggagggagagcatcaggaagagtacctaatggatgctggggttaatacctaggtgatgggttgatctgtgcagcaaaccaccatgacacacatttacctatataacaaacctgcgcatgtacgccagaacttaaaagttgaaggaaaaaaaaatttcattatggcagagttttgactacatgggtggtcggtgcccctaacccctccattgttcaagggtcaagtgcatattaatataatcagaaaaataacagaacgagaattttttaaattattgcatattgaaagtgtactcataggcaattagtatgctaaatatatattacaagttacgagcaaaatagtggttacatcgattgatttttgaatagtggaccagccttgcattgatgtaataaactcccacttggatgtgatatataatactgctgcattcactttgctagctaacaatagaaactaagattagaaggaaagcatatgtttagcttagcatggtggttccaaatctggctaatcaaaatcaactggaggacttgaaaacacaaatttccaaaccctaactctgcagtgagtttggtgtgctgcctaggaacctgcattttaaatatgctttctaataatatttatggagccaagtaagcccagccatctatttataaagtggaatagtacattgagattgttggtttagtgtttaaaacaaaagcaaaatatctttgagaagtctatcaggtttttcttacacacgtgatagacatgtaatttagtgcttcctattattccaggatacagaaatgaacaatagtgtctaccacctggatgtacactgtttaataggtgaaatagatatgtaaaagcaattaaaatatgataaatgctatgagagagatgtaaaaagtgttataggtgatctgataatggactgattgattacctggcagttttaaggaagcctttaaaaataatatatttgaactgggttttaaagaatgatataaatgttgctaatacaccaaaaaaatgtcatctgcaaatatggtttgttcacaaaatggagagaaggggaggatgataggacatgaggctaggaaatgtaggttgcagctcaatgatgtgtatgtagggccttattttccattctgaaacatagttagtggatttatatcaaaggatttcaaatagaagaacatcatgatgagaataattttaggatttatatactctactttagggggtggagagttctttttacctaggcttagggaatagaaagtggtgtagagaatataacttcaattacttctttcatcatttttcttcctttagtccacaagccctagccatgccgtggtagccaatgttcagcttgtcttgcatctaatgaagcaacacagtaaagctttgtgcaatgatcgagtcatcaacagtattcctttggcaaagcaagtatcttcacgaggtggtaaaagtaagaagttgtcagtaacacctccctcctccaacggtattaatgaggagttgtcagaagtcttacagactttacaggatgaatttgggcaaatgagctttgatcaccagcagcttgcaaaacttatccaggagtcgccaaccgttgaactgaaagacaagttggagtgtgaattggaggcattagtgggaaggatggaagcaaaagccaaccaaataactaaagttcgaaaataccaagcccagctggagaaacagaagttagagaagcagaagaaggaattaaaagctaccaaaaagactcttgatgaagaaagaaacagcagcagccgttctggaatcacagggaccacaaataagaaagattttatgaaactgagacctggagaaaaaaggagaaaaaatcttcagttattgaaggacatgcaaagcatacagaattcattacaaagcagtagtttgtgttgggattactgactcataaccaggtcagaaattttattcagataatctgtacctcatcaatcagatgatgacaatttacttcccaggtctcatactcacttatgttggaattaattaatagcaggtgttaaaggacccaggcttcattacacaggcttttcatgtatgcaggatgactcaatgttaaagcatttaaatggaaaccaggggagttttaaagcccgagaaaccacacataatcttttgttgagatgagtttgctgtactgacgctgcactttgtaaacagattaccagttttttacttgtgggtgtgattttttaaaatagttctttatatataattaaaattaggtttaaattttcaaaatatgagactatgctataggcagtgcttgcttgaaaagtctcatttttaaatctccctggcatgaggtgcccacttcccctttccaaagcaaccattaaacatactttgtttctact

SEQ ID NO: 3482 - protein, 187 aa, Homosapiens [sequence omitted]

SEQ ID NO: 3483 - DNA, 4463 bp, Homosapiens
ttagaaaaaacattgatccatcaatcctttgtccctgaagtcaggaagtaatttgccagtaagagactgccttttaaagtctttttaatactaggcattgcccctagctacccaggagcatggaagttcaacaccaaaggcatggaagtagtctacttgtccctaaacacagtgtgtctaattcaccctctggatcagggagcataaggacttctaaggcacattacatacactataaaaagggttcttaatgctgtggaagagaacttcagagagaacattatgagggtctggaaggattacagttgaagatgatgccatcatttttatagaaaaagtcatgaaagccatcaagtctgaaataataaattcctgttggagaaaactctccaggtgatatgcatgatttcacaggatttatgacaaagccaatcatgaaaaagatggtagatatggcaaaaaaggttggaggtgaaggatttcaagatacgaattttggagaaattaaagagtcagtagacaccatgatagaggaattaacagaagatgactgggatggataagagtgctttcaaaccagtgccacaagatgaagaagacaacacagaagtaatgtcagaaaacaagttgacattagataatctgacagaagggttctaattattcaagactgcttttgactttttttttttttttttttttgagacggagtctcgctctgtcactcaggctggagtgcagtggcacgatctcagctcactgcaacctctgcctcctgggttcaagcaattctcccacctcagcctcccaagtacctggacaacaggcacgcgccaccatgcctggctaatttttgtatttttttagtaaagacagggtttctccatgttggccaggctggtctcgaaatcctgaccttaggtgatccacctgcctcagcctcccaaagtgctgggattctgtaatcccactgtaatcccagtggctgagccactgcgcccagcctgcttttgacttttacgacatcgacccttctatgatacatcactgaaactaaaacaaatggtggaagaattggtatctcatagaaacatttttagagaaatgaaaaagcagaaaagtcaagacaaattatagtgtatttctgtaaagttacacagaatgtgctagcctctcctgcctccccctccacttcttctgcctctgccactcctgagacagcaagaccaaccctacccttctgcctactcaacagtgaagataatggggatgaaggcctgtatggtgatccagttaatgaatagtaaatatactttctcttccttaggattttcttaatatttttttctaactttacttttagaatattgcttacaatacataaaacaaaaatgcttccagtcaacagcaggctattacattttagggcaaaatttattatagttctcagttacataagtgggagctgaatgatcagaacccatggacacatagtggggaacaacatacactggagcctgtttggtgggggagttggtcaacggggagggagagcatcaggaagagtacctaatggatgctggggttaatacctaggtgatgggttgatctgtgcagcaaaccaccatgacacacatttacctatataacaaacctgcgcatgtacgccagaacttaaaagttgaaggaaaaaaaaatttcattatggcagagttttgactacatgggtggtcggtgcccctaacccctccattgttcaagggtcaagtgcatattaatataatcagaaaaataacagaacgagaattttttaaattattgcatattgaaagtgtactcataggcaattagtatgctaaatatatattacaagttacgagcaaaatagtggttacatcgattgatttttgaatagtggaccagccttgcattgatgtaataaactcccacttggatgtgatatataatactgctgcattcactttgctagctaacaatagaaactaagattagaaggaaagcatatgtttagcttagcatggtggttccaaatctggctaatcaaaatcaactggaggacttgaaaacacaaatttccaaaccctaactctgcagtgagtttggtgtgctgcctaggaacctgcattttaaatatgctttctaataatatttatggagccaagtaagcccagccatctatttataaagtggaatagtacattgagattgttggtttagtgtttaaaacaaaagcaaaatatctttgagaagtctatcaggtttttcttacacacgtgatagacatgtaatttagtgcttcctattattccaggatacagaaatgaacaatagtgtctaccacctggatgtacactgtttaataggtgaaatagatatgtaaaagcaattaaaatatgataaatgctatgagagagatgtaaaaagtgttataggtgatctgataatggactgattgattacctggcagttttaaggaagcctttaaaaataatatatttgaactgggttttaaagaatgatataaatgttgctaatacaccaaaaaaatgtcatctgcaaatatggtttgttcacaaaatggagagaaggggaggatgataggacatgaggctaggaaatgtaggttgcagctcaatgatgtgtatgtagggccttattttccattctgaaacatagttagtggatttatatcaaaggatttcaaatagaagaacatcatgatgagaataattttaggatttatatactctactttagggggtggagagttctttttacctaggcttagggaatagaaagtggtgtagagaatataacttcaattacttctttcatcatttttcttcctttagtccacaagccctagccatgccgtggtagccaatgttcagcttgtcttgcatctaatgaagcaacacagtaaagctttgtgcaatgatcgagtcatcaacagtattcctttggcaaagcaagtatcttcacgaggtggtaaaagtaagaagttgtcagtaacacctccctcctccaacggtattaatgaggagttgtcagaagtcttacagactttacaggatgaatttgggcaaatgagctttgatcaccagcagcttgcaaaacttatccaggagtcgccaaccgttgaactgaaagacaagttggagtgtgaattggaggcattagtgggaaggatggaagcaaaagccaaccaaataactaaagttcgaaaataccaagcccagctggagaaacagaagttagagaagcagaagaaggaattaaaagctaccaaaaagactcttgatgaagaaagaaacagcagcagccgttctggaatcacagggaccacaaataagaaagattttatgaaactgagacctggagaaaaaaggagaaaaaatcttcagttattgaaggacatgcaaagcatacagaattcattacaaagcagtagtttgtgttgggattactgactcataaccaggtcagaaattttattcagataatctgtacctcatcaatcagatgatgacaatttacttcccaggtctcatactcacttatgttggaattaattaatagcaggtgttaaaggacccaggcttcattacacaggcttttcatgtatgcaggatgactcaatgttaaagcatttaaatggaaaccaggggagttttaaagcccgagaaaccacacataatcttttgttgagatgagtttgctgtactgacgctgcactttgtaaacagattaccagttttttacttgtgggtgtgattttttaaaatagttctttatatataattaaaattaggtttaaattttcaaaatatgagactatgctataggcagtgcttgcttgaaaagtctcatttttaaatctccctggcatgaggtgcccacttcccctttccaaagcaaccattaaacatactttgtttctactattggtggagtttttctatatttaaaaatacatatatatttcagaggatttttattttgctttttggcatttcagactttgatcagtgttaagtgcacttgtattgctttttaatctgttaattttttaaagacccaagcagtcattttgagttatatctataaaaattataaaaggatttttgaaagtataaacaaattgtcagtgaaataaatgagattttggaataaagtgagaatgggagaagggatatgttgtgagcatataccttcacagttcttaatacctgttttgtaatcatgatattcagtcaaggcattatggtttttaatcttgaaacttagagaaccctttgaatatttgcttttactggtgtacagtatgagtggaatataaactgtacacataattatcatgttgatataaatcataatttcaactagatcaagacatgttaaccttttataaatttaaagtcaataaagcacctttttaaagg

SEQ ID NO: 3484 - protein, 187 aa, Homosapiens [sequence omitted]

SEQ ID NO: 3485 - DNA, 4928 bp, Homosapiens
ttagaaaaaacattgatccatcaatcctttgtccctgaagtcaggaagtaatttgccagtaagagactgccttttaaagtctttttaatactaggcattgcccctagctacccaggagcatggaagttcaacaccaaaggcatggaagtagtctacttgtccctaaacacagtgtgtctaattcaccctctggatcagggagcataaggacttctaaggcacattacatacactataaaaagggttcttaatgctgtggaagagaacttcagagagaacattatgagggtctggaaggattacagttgaagatgatgccatcatttttatagaaaaagtcatgaaagccatcaagtctgaaataataaattcctgttggagaaaactctccaggtgatatgcatgatttcacaggatttatgacaaagccaatcatgaaaaagatggtagatatggcaaaaaaggttggaggtgaaggatttcaagatacgaattttggagaaattaaagagtcagtagacaccatgatagaggaattaacagaagatgactgggatggataagagtgctttcaaaccagtgccacaagatgaagaagacaacacagaagtaatgtcagaaaacaagttgacattagataatctgacagaagggttctaattattcaagactgcttttgactttttttttttttttttttttgagacggagtctcgctctgtcactcaggctggagtgcagtggcacgatctcagctcactgcaacctctgcctcctgggttcaagcaattctcccacctcagcctcccaagtacctggacaacaggcacgcgccaccatgcctggctaatttttgtatttttttagtaaagacagggtttctccatgttggccaggctggtctcgaaatcctgaccttaggtgatccacctgcctcagcctcccaaagtgctgggattctgtaatcccactgtaatcccagtggctgagccactgcgcccagcctgcttttgacttttacgacatcgacccttctatgatacatcactgaaactaaaacaaatggtggaagaattggtatctcatagaaacatttttagagaaatgaaaaagcagaaaagtcaagacaaattatagtgtatttctgtaaagttacacagaatgtgctagcctctcctgcctccccctccacttcttctgcctctgccactcctgagacagcaagaccaaccctacccttctgcctactcaacagtgaagataatggggatgaaggcctgtatggtgatccagttaatgaatagtaaatatactttctcttccttaggattttcttaatatttttttctaactttacttttagaatattgcttacaatacataaaacaaaaatgcttccagtcaacagcaggctattacattttagggcaaaatttattatagttctcagttacataagtgggagctgaatgatcagaacccatggacacatagtggggaacaacatacactggagcctgtttggtgggggagttggtcaacggggagggagagcatcaggaagagtacctaatggatgctggggttaatacctaggtgatgggttgatctgtgcagcaaaccaccatgacacacatttacctatataacaaacctgcgcatgtacgccagaacttaaaagttgaaggaaaaaaaaatttcattatggcagagttttgactacatgggtggtcggtgcccctaacccctccattgttcaagggtcaagtgcatattaatataatcagaaaaataacagaacgagaattttttaaattattgcatattgaaagtgtactcataggcaattagtatgctaaatatatattacaagttacgagcaaaatagtggttacatcgattgatttttgaatagtggaccagccttgcattgatgtaataaactcccacttggatgtgatatataatactgctgcattcactttgctagctaacaatagaaactaagattagaaggaaagcatatgtttagcttagcatggtggttccaaatctggctaatcaaaatcaactggaggacttgaaaacacaaatttccaaaccctaactctgcagtgagtttggtgtgctgcctaggaacctgcattttaaatatgctttctaataatatttatggagccaagtaagcccagccatctatttataaagtggaatagtacattgagattgttggtttagtgtttaaaacaaaagcaaaatatctttgagaagtctatcaggtttttcttacacacgtgatagacatgtaatttagtgcttcctattattccaggatacagaaatgaacaatagtgtctaccacctggatgtacactgtttaataggtgaaatagatatgtaaaagcaattaaaatatgataaatgctatgagagagatgtaaaaagtgttataggtgatctgataatggactgattgattacctggcagttttaaggaagcctttaaaaataatatatttgaactgggttttaaagaatgatataaatgttgctaatacaccaaaaaaatgtcatctgcaaatatggtttgttcacaaaatggagagaaggggaggatgataggacatgaggctaggaaatgtaggttgcagctcaatgatgtgtatgtagggccttattttccattctgaaacatagttagtggatttatatcaaaggatttcaaatagaagaacatcatgatgagaataattttaggatttatatactctactttagggggtggagagttctttttacctaggcttagggaatagaaagtggtgtagagaatataacttcaattacttctttcatcatttttcttcctttagtccacaagccctagccatgccgtggtagccaatgttcagcttgtcttgcatctaatgaagcaacacagtaaagctttgtgcaatgatcgagtcatcaacagtattcctttggcaaagcaagtatcttcacgaggtggtaaaagtaagaagttgtcagtaacacctccctcctccaacggtattaatgaggagttgtcagaagtcttacagactttacaggatgaatttgggcaaatgagctttgatcaccagcagcttgcaaaacttatccaggagtcgccaaccgttgaactgaaagacaagttggagtgtgaattggaggcattagtgggaaggatggaagcaaaagccaaccaaataactaaagttcgaaaataccaagcccagctggagaaacagaagttagagaagcagaagaaggaattaaaagctaccaaaaagactcttgatgaagaaagaaacagcagcagccgttctggaatcacagggaccacaaataagaaagattttatgaaactgagacctggagaaaaaaggagaaaaaatcttcagttattgaaggacatgcaaagcatacagaattcattacaaagcagtagtttgtgttgggattactgactcataaccaggtcagaaattttattcagataatctgtacctcatcaatcagatgatgacaatttacttcccaggtctcatactcacttatgttggaattaattaatagcaggtgttaaaggacccaggcttcattacacaggcttttcatgtatgcaggatgactcaatgttaaagcatttaaatggaaaccaggggagttttaaagcccgagaaaccacacataatcttttgttgagatgagtttgctgtactgacgctgcactttgtaaacagattaccagttttttacttgtgggtgtgattttttaaaatagttctttatatataattaaaattaggtttaaattttcaaaatatgagactatgctataggcagtgcttgcttgaaaagtctcatttttaaatctccctggcatgaggtgcccacttcccctttccaaagcaaccattaaacatactttgtttctactattggtggagtttttctatatttaaaaatacatatatatttcagaggatttttattttgctttttggcatttcagactttgatcagtgttaagtgcacttgtattgctttttaatctgttaattttttaaagacccaagcagtcattttgagttatatctataaaaattataaaaggatttttgaaagtataaacaaattgtcagtgaaataaatgagattttggaataaagtgagaatgggagaagggatatgttgtgagcatataccttcacagttcttaatacctgttttgtaatcatgatattcagtcaaggcattatggtttttaatcttgaaacttagagaaccctttgaatatttgcttttactggtgtacagtatgagtggaatataaactgtacacataattatcatgttgatataaatcataatttcaactagatcaagacatgttaaccttttataaatttaaagtcaataaagcacctttttaaaggaaacactgcaactttccttaacagcctgttaataaaggctttgtgacaagctctcaaaaaatgcatttctaaataggaggacatcaatgtattgatgaagagaaaaaactagtacttagttgccacactcatgcttacatagaaagagagcccaagaatattagatttcctcatgatacaagatactacagtaacaggctttaatttaggatccttaagattttggggtattatttgtgactctcctgaaattgtaaacttgtgcttctgtgtccagttttctaatgagtaggttcgtagcttgattgaattaataattgtgagcccatagacacaagggaagtgagaaacagtgctctggtgacatgataaatatatgtgtcaaccaccatttcagctattaaaaactcctgttatctccttgtttgaatttcaggtcattaaattgtataaccatcatttgaa

SEQ ID NO: 3486 - protein, 187 aa, Homosapiens [sequence omitted]

SEQ ID NO: 3487 - DNA, 4688 bp, Homosapiens; identical to SEQ ID NO: 473

SEQ ID NO: 3488 - protein, 571 aa, Homosapiens; identical to SEQ ID NO: 474

SEQ ID NO: 3489 - DNA, 4565 bp, Homosapiens; identical to SEQ ID NO: 475

SEQ ID NO: 3490 - protein, 571 aa, Homosapiens; identical to SEQ ID NO: 474

SEQ ID NO: 3491 - DNA, 4681 bp, Homosapiens
ctccttccataagggtctggtccttcatccctcccgcttcaccagaccccctcaccctgggagccgccacctccctttccccaagaccagatgtcgcgcggccggacacagccagcacggagagtcgatgccggcgtctgagctgcgcagtggggtcttcccgctgcccagcagcctacaggcgcggtgcactctgggggaacatggccgcttccggtctccctcccgggccggcgctggcctgactgcggccccggtccgtagcactccgccctccgcttctcccgccctgtagccgcgaagactgcttcagcctttccctgtgctgcccctgccgcgcgatggagaagagctcgagctgcgagagtcttggctcccagccggcggcggctcggccgcccagcgtggactccttgtccagtgcctccacttctcattcagagaattcagtgcatacaaaatcagcttctgttgtatcatcagattccatttcaacttctgccgacaacttttctcctgatttgagggtcctgagggagtctaacaagttagcagaaatggaagaaccacccttgcttccaggagaaaatattaaagacatggccaaagatgtaacttatatatgtccattcactggcgctgtacgaggaactctgactgtcacgaattataggttatatttcaaaagcatggaacgggatcccccatttgttttagatgcttcccttggtgtgataaatagagtagaaaaaattggtggtgcttctagtcgaggtgaaaattcttatggactagaaactgtgtgtaaggatattaggaatttacgatttgctcataaacctgaggggcggacaagaagatccatatttgagaatctaatgaaatatgcatttcctgtctctaataacctgcctctttttgcttttgaatacaaagaagtattccctgaaaatgggtggaagctatatgaccctcttttagagtatagaaggcagggaattccaaatgaaagctggagaataacaaagataaatgaacgatatgaactttgtgatacataccctgccctcctggttgtgccagcaaatattcctgatgaagaattaaagagagtggcatccttcagatcaagaggccgtatcccagttttatcatggattcatcctgaaagtcaagccacaatcactcggtgtagccagcccatggttggagtgagtggaaagcgaagcaaagaagatgaaaaataccttcaagctatcatggattccaatgcccagtctcacaaaatctttatatttgatgcccggccaagtgttaatgctgttgccaacaaggcaaagggtggaggttatgaaagtgaagatgcctatcaaaatgctgaactagttttcctggatatccacaatattcatgttatgagagaatcattacgaaaacttaaggagattgtgtaccccaacattgaggaaacccactggttgtctaacttggaatctactcattggctagaacatattaagcttattcttgcaggggctcttaggattgctgacaaggtagagtcagggaagacgtctgtggtagtgcattgcagtgatggttgggatcgcacagctcagctcacttcccttgccatgctcatgttggatggatactatcgaaccatccgaggatttgaagtccttgtggagaaagaatggctaagttttggacatcgatttcaactaagagttggccatggagataagaaccatgcagatgcagacagatcgcctgtttttcttcaatttattgactgtgtctggcagatgacaagacagtttcctaccgcatttgaattcaatgagtattttctcattaccattttggaccacctatacagctgcttattcggaacattcctctgtaatagtgaacaacagagaggaaaagagaatcttcctaaaaggactgtgtcactgtggtcttacataaacagccagctggaagacttcactaatcctctctatgggagctattccaatcatgtcctttatccagtagccagcatgcgccacctagagctctgggtgggatattacataaggtggaatccacggatgaaaccacaggaacctattcacaacagatacaaagaacttcttgctaaacgagcagagcttcagaaaaaagtagaggaactacagagagagatttctaaccgatcaacctcatcctcagagagagccagctctcctgcacagtgtgtcactcctgtccaaactgttgtataaaggactgtaagatcaggggcatcattgctatacactcttgattacactggcagctctatgagtagaaagtcttcggaatttagaacccatctatgagagaaagttcagtcactttatttattttaaatctctctaggatgagtttagaactgtagcagtgcaggtggcttaagtgaagtaactccatatgtaattacatgattatgatactaatcttttaagtatccaaagaatattaaaatacttcaatcctggattcacagtgggaacaagtttctattaaaaggcaaatgctgttacaaatttttggcatctggtaatattaaaaccattttagaaatacactctgtgctcactgtgcagaggaacatcagttttcaaaccaacactgaaattctgtggcatcacatatattgggccttgatgtcatgacagatcaaaatcatttgatatccctttctccattctaggtttttctttttttcagtaactgatttaccttgatcacttttcaacttccatattcttcatatagtaaaaggcaaagtgttgaagatactacggtgtggtagtagttgaaaattattgccgtcattatttacatacttaagacatattagcaagttgatccaaaatgggaggccttatagatgtgcttgggggaaaatgaaggggagaaagtagccatacaggagttcaaagaattccatgcccttcagattagcccaattaccagaaacatcatgaaagatattttaaaaactaattatttactacagtgtatttcacttgtcttgtgtgtctgaacacacagaagctaattagcaagtttttaagaagtatttaaaaatcttactaggattgacattttttctgaattctgtataaatagcttatagtgagaagtactgtgctcaaattttacatttttttcctttgcaaattctgtaatttcactcaacgattaagtctaccaaagaacacactgcatgtaaaagatgtattacaatctcaaagccagtaaaagaaatcttgcttcactgttcacctgctacaagtaagagtttggtgctggtagaaacatttgactctgatgtctattttattctacataagagccatatgtaatgtactgtaacaaaggagcttcttgtccccttggtcttttaattaaaagaaattccaactgacttttaaactttgttcttgtccaaagttgccatttcttttttttccccagaaatatttggaaattattggaggaatatgcaccccagatgaaaatgttcagtttgtacccatttttccttaaccaacacccaaatcaaacaattaaaatatacagtgtttttccactcactaattcactatacagagagtctgaaccttagcctccctcttggtcttgcagtgaggaagtttctattagtatatccaatttagcaaaattggtaccaaaatgatttctttggtaattgtgtgaaatataagctttttaacagggcatttaagtggctagcaaatcagtaattaaaaattaagctttctactccaagtatttcacaaacgcatctgccattttcctcatttaaaccttggttatcttggcctgataccacataaaagaatgtagaatggctgaagagatcaagaatttaaagcttctagtcttaacatacttgcatccacttcaaattcaaatcaaaagccagggaaatctaagtgcaaccctaccacttctctgctgagaaccttccagtggttcccctcaccttctgcagaagtctccaatatggagtacatgcacttgggcatttaatatataccactggtgtgtgtgggagggagggaggaggaatactagccctttttatatatttacacaagcaaaacttttaaatatttgaattgacagttacatgtttcataactttgtatgtctattggttgtgcaggtgtaattttttccctttttgattagggttacaaaatttagagaccagtatgattaagttgaagctccttagcctccttcgacctagtctctgcatacctcaacttttacgtaccaatgctactctgctgttcacaattgcctcatgtaatctgcagattcctgcctccccactttggttcagtctgtcttgtgcacctggaacaactgttctcccttgtgactaattcctattttctagagtttaggcatcatctcttcctttgggaagttatctgattcacgactgccttctctgacatccccaccttcctctgtgcccccatagcactgtgtataccgctactaccactgcaattcacattatattggaatgaacaattcacatgtctaccacaagtctgtaaacataaccttatttgaaatgaattgcaataaagctctgttacaacgt

SEQ ID NO: 3492 - protein, 643 aa, Homosapiens; identical to SEQ ID NO: 472

SEQ ID NO: 3493 - DNA, 3550 bp, Homosapiens
catggccgcttccggtctccctcccgggccggcgctggcctgactgcggccccggtccgtagcactccgccctccgcttctcccgccctgtagccgcgaagactgcttcagcctttccctgtgctgcccctgccgcgcgatggagaagagctcgagctgcgagagtcttggctcccagccggcggcggctcggccgcccagcgtggactccttgtccagttaatgtgttaagagccattgacatttgaagatcatcagaagtgaagataaaacatctcaaaaattataattgcctccacttctcattcagagaattcagtgcatacaaaatcagcttctgttgtatcatcagattccatttcaacttctgccgacaacttttctcctgatttgaggcccatgcagtccagttcgggagctaagtcacttaaacactgtgtgatagttcctacacatctcattatagtttagggagtctcgctctatcccctaggctggagtgcattggcgccatctcggctcatttgcaacctctgtctcccgggttcaagcgattctcctgcctcagcttcccgaggagctgggattacaggtcctgagggagtctaacaagttagcagaaatggaagaaccacccttgcttccaggagaaaatattaaagacatggccaaagatgtaacttatatatgtccattcactggcgctgtacgaggaactctgactgtcacgaattataggttatatttcaaaagcatggaacgggatcccccatttgttttagatgcttcccttggtgtgataaatagagtagaaaaaattggtggtgcttctagtcgaggtgaaaattcttatggactagaaactgtgtgtaaggatattaggaatttacgatttgctcataaacctgaggggcggacaagaagatccatatttgagaatctaatgaaatatgcatttcctgtctctaataacctgcctctttttgcttttgaatacaaagaagtattccctgaaaatgggtggaagctatatgaccctcttttagagtatagaaggcagggaattccaaatgaaagctggagaataacaaagataaatgaacgatatgaactttgtgatacataccctgccctcctggttgtgccagcaaatattcctgatgaagaattaaagagagtggcatccttcagatcaagaggccgtatcccagttttatcatggattcatcctgaaagtcaagccacaatcactcggtgtagccagcccatggttggagtgagtggaaagcgaagcaaagaagatgaaaaataccttcaagctatcatggattccaatgcccagtctcacaaaatctttatatttgatgcccggccaagtgttaatgctgttgccaacaaggcaaagggtggaggttatgaaagtgaagatgcctatcaaaatgctgaactagttttcctggatatccacaatattcatgttatgagagaatcattacgaaaacttaaggagattgtgtaccccaacattgaggaaacccactggttgtctaacttggaatctactcattggctagaacatattaagcttattcttgcaggggctcttaggattgctgacaaggtagagtcagggaagacgtctgtggtagtgcattgcagtgatggttgggatcgcacagctcagctcacttcccttgccatgctcatgttggatggatactatcgaaccatccgaggatttgaagtccttgtggagaaagaatggctaagttttggacatcgatttcaactaagagttggccatggagataagaaccatgcagatgcagacagatcgcctgtttttcttcaatttattgactgtgtctggcagatgacaagacagtttcctaccgcatttgaattcaatgagtattttctcattaccattttggaccacctatacagctgcttattcggaacattcctctgtaatagtgaacaacagagaggaaaagagaatcttcctaaaaggactgtgtcactgtggtcttacataaacagccagctggaagacttcactaatcctctctatgggagctattccaatcatgtcctttatccagtagccagcatgcgccacctagagctctgggtgggatattacataaggtggaatccacggatgaaaccacaggaacctattcacaacagatacaaagaacttcttgctaaacgagcagagcttcagaaaaaagtagaggaactacagagagagatttctaaccgatcaacctcatcctcagagagagccagctctcctgcacagtgtgtcactcctgtccaaactgttgtataaaggactgtaagatcaggggcatcattgctatacactcttgattacactggcagctctatgagtagaaagtcttcggaatttagaacccatctatgagagaaagttcagtcactttatttattttaaatctctctaggatgagtttagaactgtagcagtgcaggtggcttaagtgaagtaactccatatgtaattacatgattatgatactaatcttttaagtatccaaagaatattaaaatacttcaatcctggattcacagtgggaacaagtttctattaaaaggcaaatgctgttacaaatttttggcatctggtaatattaaaaccattttagaaatacactctgtgctcactgtgcagaggaacatcagttttcaaaccaacactgaaattctgtggcatcacatatattgggccttgatgtcatgacagatcaaaatcatttgatatccctttctccattctaggtttttctttttttcagtaactgatttaccttgatcacttttcaacttccatattcttcatatagtaaaaggcaaagtgttgaagatactacggtgtggtagtagttgaaaattattgccgtcattatttacatacttaagacatattagcaagttgatccaaaatgggaggccttatagatgtgcttgggggaaaatgaaggggagaaagtagccatacaggagttcaaagaattccatgcccttcagattagcccaattaccagaaacatcatgaaagatattttaaaaactaattatttactacagtgtatttcacttgtcttgtgtgtctgaacacacagaagctaattagcaagtttttaagaagtatttaaaaatcttactaggattgacattttttctgaattctgtataaatagcttatagtgagaagtactgtgctcaaattttacatttttttcctttgcaaattctgtaatttcactcaacgattaagtctaccaaagaacacactgcatgtaaaagatgtattacaatctcaaagccagtaaaagaaatcttgcttcactgttcacctgctacaagtaagagtttggtgctggtagaaacatttgactctgatgtctattttattctacataagagccatatgtaatgtactgtaacaaaggagcttcttgtccccttggtcttttaattaaaagaaattccaactgacttttaaactttgttcttgtcc

SEQ ID NO: 3494 - protein, 571 aa, Homosapiens; identical to SEQ ID NO: 474

SEQ ID NO: 3495 - DNA, 3482 bp, Homosapiens
gggaacatggccgcttccggtctccctcccgggccggcgctggcctgactgcggccccggtccgtagcactccgccctccgcttctcccgccctgtagccgcgaagactgcttcagcctttccctgtgctgcccctgccgcgcgatggagaagagctcgagctgcgagagtcttggctcccagccggcggcggctcggccgcccagcgtggactccttgtccagttaatgtgttaagagccattgacatttgaagatcatcagaagtgaagataaaacatctcaaaaattataattgcctccacttctcattcagagaattcagtgcatacaaaatcagcttctgttgtatcatcagattccatttcaacttctgccgacaacttttctcctgatttgaggagggagtctcgctctatcccctaggctggagtgcattggcgccatctcggctcatttgcaacctctgtctcccgggttcaagcgattctcctgcctcagcttcccgaggagctgggattacaggtcctgagggagtctaacaagttagcagaaatggaagaaccacccttgcttccaggagaaaatattaaagacatggccaaagatgtaacttatatatgtccattcactggcgctgtacgaggaactctgactgtcacgaattataggttatatttcaaaagcatggaacgggatcccccatttgttttagatgcttcccttggtgtgataaatagagtagaaaaaattggtggtgcttctagtcgaggtgaaaattcttatggactagaaactgtgtgtaaggatattaggaatttacgatttgctcataaacctgaggggcggacaagaagatccatatttgagaatctaatgaaatatgcatttcctgtctctaataacctgcctctttttgcttttgaatacaaagaagtattccctgaaaatgggtggaagctatatgaccctcttttagagtatagaaggcagggaattccaaatgaaagctggagaataacaaagataaatgaacgatatgaactttgtgatacataccctgccctcctggttgtgccagcaaatattcctgatgaagaattaaagagagtggcatccttcagatcaagaggccgtatcccagttttatcatggattcatcctgaaagtcaagccacaatcactcggtgtagccagcccatggttggagtgagtggaaagcgaagcaaagaagatgaaaaataccttcaagctatcatggattccaatgcccagtctcacaaaatctttatatttgatgcccggccaagtgttaatgctgttgccaacaaggcaaagggtggaggttatgaaagtgaagatgcctatcaaaatgctgaactagttttcctggatatccacaatattcatgttatgagagaatcattacgaaaacttaaggagattgtgtaccccaacattgaggaaacccactggttgtctaacttggaatctactcattggctagaacatattaagcttattcttgcaggggctcttaggattgctgacaaggtagagtcagggaagacgtctgtggtagtgcattgcagtgatggttgggatcgcacagctcagctcacttcccttgccatgctcatgttggatggatactatcgaaccatccgaggatttgaagtccttgtggagaaagaatggctaagttttggacatcgatttcaactaagagttggccatggagataagaaccatgcagatgcagacagatcgcctgtttttcttcaatttattgactgtgtctggcagatgacaagacagtttcctaccgcatttgaattcaatgagtattttctcattaccattttggaccacctatacagctgcttattcggaacattcctctgtaatagtgaacaacagagaggaaaagagaatcttcctaaaaggactgtgtcactgtggtcttacataaacagccagctggaagacttcactaatcctctctatgggagctattccaatcatgtcctttatccagtagccagcatgcgccacctagagctctgggtgggatattacataaggtggaatccacggatgaaaccacaggaacctattcacaacagatacaaagaacttcttgctaaacgagcagagcttcagaaaaaagtagaggaactacagagagagatttctaaccgatcaacctcatcctcagagagagccagctctcctgcacagtgtgtcactcctgtccaaactgttgtataaaggactgtaagatcaggggcatcattgctatacactcttgattacactggcagctctatgagtagaaagtcttcggaatttagaacccatctatgagagaaagttcagtcactttatttattttaaatctctctaggatgagtttagaactgtagcagtgcaggtggcttaagtgaagtaactccatatgtaattacatgattatgatactaatcttttaagtatccaaagaatattaaaatacttcaatcctggattcacagtgggaacaagtttctattaaaaggcaaatgctgttacaaatttttggcatctggtaatattaaaaccattttagaaatacactctgtgctcactgtgcagaggaacatcagttttcaaaccaacactgaaattctgtggcatcacatatattgggccttgatgtcatgacagatcaaaatcatttgatatccctttctccattctaggtttttctttttttcagtaactgatttaccttgatcacttttcaacttccatattcttcatatagtaaaaggcaaagtgttgaagatactacggtgtggtagtagttgaaaattattgccgtcattatttacatacttaagacatattagcaagttgatccaaaatgggaggccttatagatgtgcttgggggaaaatgaaggggagaaagtagccatacaggagttcaaagaattccatgcccttcagattagcccaattaccagaaacatcatgaaagatattttaaaaactaattatttactacagtgtatttcacttgtcttgtgtgtctgaacacacagaagctaattagcaagtttttaagaagtatttaaaaatcttactaggattgacattttttctgaattctgtataaatagcttatagtgagaagtactgtgctcaaattttacatttttttcctttgcaaattctgtaatttcactcaacgattaagtctaccaaagaacacactgcatgtaaaagatgtattacaatctcaaagccagtaaaagaaatcttgcttcactgttcacctgctacaagtaagagtttggtgctggtagaaacatttgactctgatgtctattttattctacataagagccatatgtaatgtactgtaacaaaggagcttcttgtccccttggtcttttaattaaaagaaattccaactgacttttaaactttgttcttgtcc

SEQ ID NO: 3496 - protein, 571 aa, Homosapiens; identical to SEQ ID NO: 474

SEQ ID NO: 3497 - DNA, 3361 bp, Homosapiens
gggggaacatggccgcttccggtctccctcccgggccggcgctggcctgactgcggccccggtccgtagcactccgccctccgcttctcccgccctgtagccgcgaagactgcttcagcctttccctgtgctgcccctgccgcgcgatggagaagagctcgagctgcgagagtcttggctcccagccggcggcggctcggccgcccagcgtggactccttgtccagttaatgtgttaagagccattgacatttgaagatcatcagaagtgaagataaaacatctcaaaaattataattgcctccacttctcattcagagaattcagtgcatacaaaatcagcttctgttgtatcatcagattccatttcaacttctgccgacaacttttctcctgatttgagggtcctgagggagtctaacaagttagcagaaatggaagaaccacccttgcttccaggagaaaatattaaagacatggccaaagatgtaacttatatatgtccattcactggcgctgtacgaggaactctgactgtcacgaattataggttatatttcaaaagcatggaacgggatcccccatttgttttagatgcttcccttggtgtgataaatagagtagaaaaaattggtggtgcttctagtcgaggtgaaaattcttatggactagaaactgtgtgtaaggatattaggaatttacgatttgctcataaacctgaggggcggacaagaagatccatatttgagaatctaatgaaatatgcatttcctgtctctaataacctgcctctttttgcttttgaatacaaagaagtattccctgaaaatgggtggaagctatatgaccctcttttagagtatagaaggcagggaattccaaatgaaagctggagaataacaaagataaatgaacgatatgaactttgtgatacataccctgccctcctggttgtgccagcaaatattcctgatgaagaattaaagagagtggcatccttcagatcaagaggccgtatcccagttttatcatggattcatcctgaaagtcaagccacaatcactcggtgtagccagcccatggttggagtgagtggaaagcgaagcaaagaagatgaaaaataccttcaagctatcatggattccaatgcccagtctcacaaaatctttatatttgatgcccggccaagtgttaatgctgttgccaacaaggcaaagggtggaggttatgaaagtgaagatgcctatcaaaatgctgaactagttttcctggatatccacaatattcatgttatgagagaatcattacgaaaacttaaggagattgtgtaccccaacattgaggaaacccactggttgtctaacttggaatctactcattggctagaacatattaagcttattcttgcaggggctcttaggattgctgacaaggtagagtcagggaagacgtctgtggtagtgcattgcagtgatggttgggatcgcacagctcagctcacttcccttgccatgctcatgttggatggatactatcgaaccatccgaggatttgaagtccttgtggagaaagaatggctaagttttggacatcgatttcaactaagagttggccatggagataagaaccatgcagatgcagacagatcgcctgtttttcttcaatttattgactgtgtctggcagatgacaagacagtttcctaccgcatttgaattcaatgagtattttctcattaccattttggaccacctatacagctgcttattcggaacattcctctgtaatagtgaacaacagagaggaaaagagaatcttcctaaaaggactgtgtcactgtggtcttacataaacagccagctggaagacttcactaatcctctctatgggagctattccaatcatgtcctttatccagtagccagcatgcgccacctagagctctgggtgggatattacataaggtggaatccacggatgaaaccacaggaacctattcacaacagatacaaagaacttcttgctaaacgagcagagcttcagaaaaaagtagaggaactacagagagagatttctaaccgatcaacctcatcctcagagagagccagctctcctgcacagtgtgtcactcctgtccaaactgttgtataaaggactgtaagatcaggggcatcattgctatacactcttgattacactggcagctctatgagtagaaagtcttcggaatttagaacccatctatgagagaaagttcagtcactttatttattttaaatctctctaggatgagtttagaactgtagcagtgcaggtggcttaagtgaagtaactccatatgtaattacatgattatgatactaatcttttaagtatccaaagaatattaaaatacttcaatcctggattcacagtgggaacaagtttctattaaaaggcaaatgctgttacaaatttttggcatctggtaatattaaaaccattttagaaatacactctgtgctcactgtgcagaggaacatcagttttcaaaccaacactgaaattctgtggcatcacatatattgggccttgatgtcatgacagatcaaaatcatttgatatccctttctccattctaggtttttctttttttcagtaactgatttaccttgatcacttttcaacttccatattcttcatatagtaaaaggcaaagtgttgaagatactacggtgtggtagtagttgaaaattattgccgtcattatttacatacttaagacatattagcaagttgatccaaaatgggaggccttatagatgtgcttgggggaaaatgaaggggagaaagtagccatacaggagttcaaagaattccatgcccttcagattagcccaattaccagaaacatcatgaaagatattttaaaaactaattatttactacagtgtatttcacttgtcttgtgtgtctgaacacacagaagctaattagcaagtttttaagaagtatttaaaaatcttactaggattgacattttttctgaattctgtataaatagcttatagtgagaagtactgtgctcaaattttacatttttttcctttgcaaattctgtaatttcactcaacgattaagtctaccaaagaacacactgcatgtaaaagatgtattacaatctcaaagccagtaaaagaaatcttgcttcactgttcacctgctacaagtaagagtttggtgctggtagaaacatttgactctgatgtctattttattctacataagagccatatgtaatgtactgtaacaaaggagcttcttgtccccttggtcttttaattaaaagaaattccaactgacttttaaactttgttcttgtcc

SEQ ID NO: 3498 - protein, 571 aa, Homosapiens; identical to SEQ ID NO: 474

SEQ ID NO: 3499 - DNA, 3297 bp, Homosapiens
gcactctgggggaacatggccgcttccggtctccctcccgggccggcgctggcctgactgcggccccggtccgtagcactccgccctccgcttctcccgccctgtagccgcgaagactgcttcagcctttccctgtgctgcccctgccgcgcgatggagaagagctcgagctgcgagagtcttggctcccagccggcggcggctcggccgcccagcgtggactccttgtccagtgcctccacttctcattcagagaattcagtgcatacaaaatcagcttctgttgtatcatcagattccatttcaacttctgccgacaacttttctcctgatttgagggtcctgagggagtctaacaagttagcagaaatggaagaaccacccttgcttccaggagaaaatattaaagacatggccaaagatgtaacttatatatgtccattcactggcgctgtacgaggaactctgactgtcacgaattataggttatatttcaaaagcatggaacgggatcccccatttgttttagatgcttcccttggtgtgataaatagagtagaaaaaattggtggtgcttctagtcgaggtgaaaattcttatggactagaaactgtgtgtaaggatattaggaatttacgatttgctcataaacctgaggggcggacaagaagatccatatttgagaatctaatgaaatatgcatttcctgtctctaataacctgcctctttttgcttttgaatacaaagaagtattccctgaaaatgggtggaagctatatgaccctcttttagagtatagaaggcagggaattccaaatgaaagctggagaataacaaagataaatgaacgatatgaactttgtgatacataccctgccctcctggttgtgccagcaaatattcctgatgaagaattaaagagagtggcatccttcagatcaagaggccgtatcccagttttatcatggattcatcctgaaagtcaagccacaatcactcggtgtagccagcccatggttggagtgagtggaaagcgaagcaaagaagatgaaaaataccttcaagctatcatggattccaatgcccagtctcacaaaatctttatatttgatgcccggccaagtgttaatgctgttgccaacaaggcaaagggtggaggttatgaaagtgaagatgcctatcaaaatgctgaactagttttcctggatatccacaatattcatgttatgagagaatcattacgaaaacttaaggagattgtgtaccccaacattgaggaaacccactggttgtctaacttggaatctactcattggctagaacatattaagcttattcttgcaggggctcttaggattgctgacaaggtagagtcagggaagacgtctgtggtagtgcattgcagtgatggttgggatcgcacagctcagctcacttcccttgccatgctcatgttggatggatactatcgaaccatccgaggatttgaagtccttgtggagaaagaatggctaagttttggacatcgatttcaactaagagttggccatggagataagaaccatgcagatgcagacagatcgcctgtttttcttcaatttattgactgtgtctggcagatgacaagacagtttcctaccgcatttgaattcaatgagtattttctcattaccattttggaccacctatacagctgcttattcggaacattcctctgtaatagtgaacaacagagaggaaaagagaatcttcctaaaaggactgtgtcactgtggtcttacataaacagccagctggaagacttcactaatcctctctatgggagctattccaatcatgtcctttatccagtagccagcatgcgccacctagagctctgggtgggatattacataaggtggaatccacggatgaaaccacaggaacctattcacaacagatacaaagaacttcttgctaaacgagcagagcttcagaaaaaagtagaggaactacagagagagatttctaaccgatcaacctcatcctcagagagagccagctctcctgcacagtgtgtcactcctgtccaaactgttgtataaaggactgtaagatcaggggcatcattgctatacactcttgattacactggcagctctatgagtagaaagtcttcggaatttagaacccatctatgagagaaagttcagtcactttatttattttaaatctctctaggatgagtttagaactgtagcagtgcaggtggcttaagtgaagtaactccatatgtaattacatgattatgatactaatcttttaagtatccaaagaatattaaaatacttcaatcctggattcacagtgggaacaagtttctattaaaaggcaaatgctgttacaaatttttggcatctggtaatattaaaaccattttagaaatacactctgtgctcactgtgcagaggaacatcagttttcaaaccaacactgaaattctgtggcatcacatatattgggccttgatgtcatgacagatcaaaatcatttgatatccctttctccattctaggtttttctttttttcagtaactgatttaccttgatcacttttcaacttccatattcttcatatagtaaaaggcaaagtgttgaagatactacggtgtggtagtagttgaaaattattgccgtcattatttacatacttaagacatattagcaagttgatccaaaatgggaggccttatagatgtgcttgggggaaaatgaaggggagaaagtagccatacaggagttcaaagaattccatgcccttcagattagcccaattaccagaaacatcatgaaagatattttaaaaactaattatttactacagtgtatttcacttgtcttgtgtgtctgaacacacagaagctaattagcaagtttttaagaagtatttaaaaatcttactaggattgacattttttctgaattctgtataaatagcttatagtgagaagtactgtgctcaaattttacatttttttcctttgcaaattctgtaatttcactcaacgattaagtctaccaaagaacacactgcatgtaaaagatgtattacaatctcaaagccagtaaaagaaatcttgcttcactgttcacctgctacaagtaagagtttggtgctggtagaaacatttgactctgatgtctattttattctacataagagccatatgtaatgtactgtaacaaaggagcttcttgtccccttggtcttttaattaaaagaaattccaactgacttttaaactttgttcttgtcc

SEQ ID NO: 3500 - protein, 643 aa, Homosapiens; identical to SEQ ID NO: 472

SEQ ID NO: 3501 - DNA, 2385 bp, Homosapiens
gcactctgggggaacatggccgcttccggtctccctcccgggccggcgctggcctgactgcggccccggtccgtagcactccgccctccgcttctcccgccctgtagccgcgaagactgcttcagcctttccctgtgctgcccctgccgcgcgatggagaagagctcgagctgcgagagtcttggctcccagccggcggcggctcggccgcccagcgtggactccttgtccagtgcctccacttctcattcagagaattcagtgcatacaaaatcagcttctgttgtatcatcagattccatttcaacttctgccgacaacttttctcctgatttgagggtcctgagggagtctaacaagttagcagaaatggaagaaccacccttgcttccaggagaaaatattaaagacatggccaaagatgtaacttatatatgtccattcactggcgctgtacgaggaactctgactgtcacgaattataggttatatttcaaaagcatggaacgggatcccccatttgttttagatgcttcccttggtgtgataaatagagtagaaaaaattggtggtgcttctagtcgaggtgaaaattcttatggactagaaactgtgtgtaaggatattaggaatttacgatttgctcataaacctgaggggcggacaagaagatccatatttgagaatctaatgaaatatgcatttcctgtctctaataacctgcctctttttgcttttgaatacaaagaagtattccctgaaaatgggtggaagctatatgaccctcttttagagtatagaaggcagggaattccaaatgaaagctggagaataacaaagataaatgaacgatatgaactttgtgatacataccctgccctcctggttgtgccagcaaatattcctgatgaagaattaaagagagtggcatccttcagatcaagaggccgtatcccagttttatcatggattcatcctgaaagtcaagccacaatcactcggtgtagccagcccatggttggagtgagtggaaagcgaagcaaagaagatgaaaaataccttcaagctatcatggattccaatgcccagtctcacaaaatctttatatttgatgcccggccaagtgttaatgctgttgccaacaaggcaaagggtggaggttatgaaagtgaagatgcctatcaaaatgctgaactagttttcctggatatccacaatattcatgttatgagagaatcattacgaaaacttaaggagattgtgtaccccaacattgaggaaacccactggttgtctaacttggaatctactcattggctagaacatattaagcttattcttgcaggggctcttaggattgctgacaaggtagagtcagggaagacgtctgtggtagtgcattgcagtgatggttgggatcgcacagctcagctcacttcccttgccatgctcatgttggatggatactatcgaaccatccgaggatttgaagtccttgtggagaaagaatggctaagttttggacatcgatttcaactaagagttggccatggagataagaaccatgcagatgcagacagatcgcctgtttttcttcaatttattgactgtgtctggcagatgacaagacagtttcctaccgcatttgaattcaatgagtattttctcattaccattttggaccacctatacagctgcttattcggaacattcctctgtaatagtgaacaacagagaggaaaagagaatcttcctaaaaggactgtgtcactgtggtcttacataaacagccagctggaagacttcactaatcctctctatgggagctattccaatcatgtcctttatccagtagccagcatgcgccacctagagctctgggtgggatattacataaggtggaatccacggatgaaaccacaggaacctattcacaacagatacaaagaacttcttgctaaacgagcagagcttcagaaaaaagtagaggaactacagagagagatttctaaccgatcaacctcatcctcagagagagccagctctcctgcacagtgtgtcactcctgtccaaactgttgtataaaggactgtaagatcaggggcatcattgctatacactcttgattacactggcagctctatgagtagaaagtcttcggaatttagaacccatctatgagagaaagttcagtcactttatttattttaaatctctctaggatgagtttagaactgtagcagtgcaggtggcttaagtgaagtaactccatatgtaattacatgattatgatactaatcttttaagtatccaaagaatattaaaatacttcaatcctggattcacagtgggaacaagtttctattaaaaggcaaatgctgttac

SEQ ID NO: 3502 - protein, 643 aa, Homosapiens; identical to SEQ ID NO: 472

SEQ ID NO: 3503 - DNA, 7244 bp, Homosapiens
actcgcgcagtggcaccagccttccaccagggagcctcgaacgagctctcccgccctctccccgcccccccacccccatctgcagcttgctggctctctctttctccttctctgtctcactctctctctttctctccctctcctatcggagcacaatgaaagcctgtgtatcgccgtgactccgggcgcgagccagtgtcagcaaagcggctaacaacagacgagaaagagaaaggaaaatacaagctactttttttttccatctataaagcggagcaaatacaggagatagaaccagattgcttattgcgagtccagaccctcagatccactggccggggatggaatgtacaaaagtggacagaaaagtggctggacatgactcggtgcaatttgctggaagtttgtaagtttgaccatcgtttgtaaattactctcggaagagtttgtctctcttgatactgtattagaatagagccgggggtgaggaatagaaacgtaagcgggaaagaaaaaaatgtgttgaaggatctctctcagtggctagcgacttaagattgcttttcatttaaggctaggaaaccttagagggagtgaggattttaccggtgattggattagctgaagaaaaaagcatggtccaaaagtccaattactgacattgttaacagttgaaaagctgtctccctcttttgggagaagacaacatcctacagtaccccaaagaggagaaaacaccggagcgaaaggaaagggaggaaaaattaaaagccaaaagacagtctcccttgatttttgcacattttgaacagtgacttaaacatcttctgaaacagcactgttttgttttgttttggttttttatttaacctgaggaaaagtcaaggctgctggttacatagacatggtagaaatgtgtttctctgcagaaacatccccataaagaattgtcggaaacaactaggtgagggggagtcctctctattaatacctctctcaataccttttgctgtgtgtttctgtctcttgctggacaatccctgaattcttgatctaacccccagatcgtgtgtttacaaagtacctagtggctcttgtcagcttggtggaggaaaaaaaatccaccaactctgtccaacttctccagagctgtcaaatgcaattagagtaagttaatcagggtttgtttccaacttatcctccccccagttggtttctattctttctccccaccctctttttactaactcccctcccccacaacttctccacggctcccccacaacctctgaagacctctattcatgtggccctgaacactgagctcacattgtcaaaaacagacttgcctgcaatagccagcagtagcctctttccacctcaccatcccagaggcagcaatcattgtgtccggtaagatgggggacacagcgcccccgcaggcccccgcaggagggctagggggggcctctggggcggggctccttggagggggctcagtcaccccgagagtgcacagtgctatcgtggagcgcctccgggctcggatcgctgtctgccgccaacaccacctgagctgtgaaggacgatatgaacgaggtagggccgagagctcagaccgggaaagagaaagcaccttgcagctcctgagccttgtacagcatggccagggggcaaggaaagctggcaaacacaccaaggccaccgccactgctgccaccactacagcccctccaccgccccctgctgcccctcctgcggcctcccaagcagcagcaacagcagccccaccgcccccaccagactatcaccatcaccaccagcagcacctgctgaacagtagcaataatggtggcagtggtgggataaacggagagcagcagccgcccgcttcaaccccaggggaccagaggaactcagccctgattgcgctccagggttccttgaaaagaaaacaggtagttaacctatctcctgccaacagcaagcgacccaatggctttgtggacaactcatttcttgatatcaaaagaattcgtgttggggagaatctctctgcaggacaaggtggcctccaaataaacaatggacaaagtcagattatgtcagggaccttgcctatgagccaagcacccctgcgaaagactaacactctgccatcccatacacattctcctggcaatggcctgtttaacatgggcttaaaggaggtaaagaaggagccaggagagactctgtcttgcagtaagcacatggatggccaaatgacccaagagaatatttttcctaataggtacggagacgaccctggagaacaactgatggatcctgagctgcaggaactgttcaatgaactgaccaacatatctgtgcctcccatgagtgaccttgaactggagaacatgatcaatgccaccataaagcaggatgacccatttaacattgacttgggtcagcaaagccagaggagcacacctaggccctccttacccatggagaaaatagtgatcaaaagtgaatactcaccgggcttgactcagggcccctcaggctctcctcagctgaggcccccatcagctggccccgcattctccatggccaactctgccctctccacttcgtctccaatcccttcagtccctcagagccaggctcagcctcagacaggctccggagcaagccgggccttgccaagctggcaggaagtatcccatgcccagcagctcaaacagatagctgctaatcgtcagcagcatgcccggatgcagcagcaccagcagcagcaccagcctaccaactggtcagccttgccctcttctgctggaccatcaccaggtccatttgggcaggagaaaatccccagcccttcttttggtcagcagacattcagcccacagagctcccccatgcctggggtagctggcggcagcggccagtcgaaagtaatggctaactacatgtacaaggccggcccctcagcccagggtgggcacctagatgtcctcatgcagcaaaagcctcaggatctcagtcgaagttttattaacaacccgcacccagccatggagccccgtcagggcaacaccaagcctttgtttcattttaactcagatcaagcgaaccagcagatgccttctgttttgccttcccagaacaagccttctctcctacactacacccaacagcaacagcagcaacagcagcagcagcagcagcagcagcagcagcagcagcagcaacagcagcagcagcagcaacagcaacagcaacagcaacagcagagttcaatttcagctcaacaacagcaacagcagcagagctcaatttcagcccaacagcagcagcagcagcaacaacagcagcagcagcagcaacaacaacagcaacaacagcagcagcagcagcagcaacaaccatcttctcagcctgcccaatctctaccaagccagcctttgctaaggtcacctttgccacttcagcaaaagctcctacttcagcaaatgcagaatcagcccattgcaggaatgggataccaagtctcccaacaacagagacaggatcaacactctgtggtaggccagaacacaggccccagtccaagtcctaacccctgctcaaatccaaacactggaagtggttacatgaactcccagcaatcactgttgaatcagcaattgatgggaaagaagcagactctacagaggcagatcatggagcagaaacagcaacttcttctccagcagcagatgctggctgacgcggagaaaattgctccacaagatcagataaaccgacatttgtcaaggccacctccagattataaagaccaaagaagaaatgtgggcaatatgcaaccaactgctcagtattctggtggctcatccacaataagcttaaactctaaccaggctttggcaaacccagtttcaacacacaccattttaactcccaattccagcctcctgtctacttctcacgggacaagaatgccatcattatctacagcagttcagaatatggggatgtatggaaatctgccttgtaatcaacctaacacatacagtgtcacttcaggaatgaatcaattgacccaacagagaaacccaaagcaattgttagcaaatcaaaacaaccctatgatgccacggccacctaccttagggccaagtaataataacaatgtagccacttttggagctggatctgttggtaattcacaacaattgagaccaaatttaacccatagtatggcaagcatgccaccacagagaacatcaaacgtaatgatcacatccaacacaactgcaccaaactgggcctctcaagaaggaacaagcaaacagcaagaagccctgacgtctgcaggagtccgcttccccacaggtacacctgcagcctataccccaaatcagtcactgcaacaggcagtaggtagccagcaattttcccagagggcagtggctcctcctaaccagttaacaccagcagtgcaaatgagacccatgaaccaaatgagccaaacactaaatgggcaaaccatgggtcccctcaggggtctgaatctcagacccaatcagctaagcacacagattttgcctaatttgaatcagtcaggaacagggttgaatcagtcgaggacgggcatcaaccagccaccatccctgacgcccagcaattttccttcacccaaccaaagttccagggcttttcaaggaactgaccacagcagtgacttagcttttgacttcctcagccaacaaaatgataacatgggccctgccctaaacagtgatgctgatttcattgattctttattgaagacagagcctggtaatgatgactggatgaaagacatcaatcttgatgaaatcttggggaacaattcctaaagaagaaagggaagacaatttacaaactccaagcactaaaaggcagtatattacagaaactctgtagaggctgaactgttgatgttcaggtggactacatgaagataacatgcttaaaaatggaaagcagaaagtaactgcagtgatgaacattttggtccaaattcttgttttaaatcttacacctgaaagtaaaatattgggatcacttttccctgtctaaactccaggatacagtatccaatttatccaaacagaactgtggtgtcaatgtgtaattaattgtgtaaaatagccttcccaagtttctttttccctggaaaataaaaaaggtaatagaacttgtagtttatttaaaccccatgtcatgaggaggtactagttccaagcaacaaactccttaatttgctctaatagataggtatggtttaatctttccattgtgtcttttcatttaattttcctgaagcttgcaggatagattgaaatgttataggtttgtttggagtaaccaaacagtatgcaaattaagaaaaagccagagaacctagaaaacatccagtggattacagaatttcttccccatattcactcctcacttttacaattttcccacaatcctctacttcagtgggatgctgtgtctagtgattaaacaaaaatatagagctgtgcaatttgattttggcttccacaacgaatatctgaatccattccaaatgaaattttagatataacaaagacttgtcctaatcatactgaaatattggtgcacacctctctgcattagatttcacttttttaaaaaacccagtggacattgctataaataagatttatttggctacaaataacctgggatgttgcttattatgattgatgcctgctggtttgttcccaagctgagtgaaattgaacctcgtcctccctactcattttgatgactgaggctggtttataagaaaaggaagtttggagaagaaaaccgagattagaaaatatcatgttttggttggagataagaaccagggatggcaagtaccagtgtgtacaaatgtatttcacggagtttgaaggaacgcataatcaagagggaaaacaatttgtccttcattggacgtattatttggatttgggtgagcaacaaaatggaatgtggtctgttaggagcattctgtttgttcttttgtccctgatgtgatgaatcattgccacatgctagatggactcttcatatccaggttttgtccctcagggctgagcactgtattaaagagtttttgttgagtcatttaaccttagtgtccacatccagatcagctgtaaaatggggaagacgtgtgctgatttggaatgaatgcaaaatatcactatcattttcctaattacagaggagcaaaggttatcttcagccctttcagttctatgctcacatattcaaatatcaaatgtaatttagctgaagttatttaataatcaagtctttcaatatctgttcaaagaaaaagaacacactttgaaaattctgcaaagctgtctcccagtctttaaaatgtctggaagcactctccttctttacaataccaacatcactggcccagaatcttccctgtgctagtttgtaaatataaataaattacttgttttgtaaacttttgtaaagaatattttggtagaaatacttcaaacatattctttgggttatatttatacatatgtgaaataaatatactatcaaaaggttatattttatacaaaaagtaaattgctaccttttgtatgctaatatgcaaagttttgtataatatgatggtttatttttagctctacacttaaaccataggtggttgagtgggaacttttgaaaactatcaagaggcttgttagacaaatttatattctgaaacctcaataagaaagcattccaggtttcaatccttgttttttgtcctgctcccaaattcttttttaaacccatagttcttgtgtcttatttgattcttctgctgtgcacattgtattggtccttgttgcatgtagtctactgtgtgttttccgattttataaggcagcatttctccatacaaaaagaaaaaaaatgatgtacatataaacgcttttgttgtatggctcctccatgttactgtatatatctgccagcacttcccagttacactcctgtgagtcagcttatttttaccctaacataaatagtatgttttgtagtagttatcaaatttaagagataaagcaatcagaatgtttggattttcttctatcttaatgtgaatttcataattaatgtctatttattcagctattcattaaaatacaggattctttgggaaaacatga

SEQ ID NO: 3504 - protein, 1156 aa, Homosapiens; identical to SEQ ID NO: 478

SEQ ID NO: 3505 - DNA, 541 bp, Homosapiens
gcaagaaacacatatttgacttatccatttactttagccaaacagtctccttatttttaaatgtctgtgtatactactttgacctgcatcttaagaaacatatcaaaagtagctgacaaattctaccaccatatggttcatttctcttttctttgttcctttttacttctcactgtagcagtgtctgcagaggggagatgtttagagaactctccagataatttggaaaaggaagtagctaggggctcaaattttgtagagtgactctctcctctgtttgaatctgctagataatttcctgtttcattttgtctgagcaaaaaacaagcctcctttatgcaaaacagtttactgcagggaaagaataaatttgttggattaaataatttattctctttagtttacaacctgagttggatgagataaaatctagaaaatctacaagcaaaataaccacattttgaaatgttgccttcttttgttcacaggagctaaatgtgcctcttctttattagccaaaggcacaagaactaaatacaaa

SEQ ID NO: 3506 - protein, 67 aa, Homosapiens
MSVYTTLTCILRNISKVADKFYHHMVHFSFLCSFLLLTVAVSAEGRCLENSPDNLEKEVARGSNFVE

SEQ ID NO: 3507 - DNA, 435 bp, Homosapiens
ctggaacacagcatagttacttaatggatcctatctctatggcttttctttcacatcacatctttacccaaagcaagctttactaaccttcattctcctaatccctgatttttgcaggctttgaagaattatattgaagcaattagcactttcctaacgcattcctgatcctacctgggattccataactggtgaccatgctttgcctttcatgtagacttggttactccaataaaactgctgaaacataatcaattttttttttttttttttgagatggagtcttgctctgtcacccaggctggagtgcagtggtgagatctcggctcgtgcaacctccacctcccaggttcacgccactctcctgcctcagcctcacaagtagctgggactacaggtgcccgccaccacgctgggctaattttttgtattttt

SEQ ID NO: 3508 - protein, 52 aa, Homosapiens
DGVLLCHPGWSAVVRSRLVQPPPPRFTPLSCLSLTSSWDYRCPPPRWANFLY

SEQ ID NO: 3509 - DNA, 1474 bp, Homosapiens
attcagaagtttgaactttatctggaattcaggggctaattcatatggcacaaggcaaaaatcatatgcaaaagatatgctaacatctcttcattatttggataaccgctttgttcagcctcgtctagagagcttggtatctagaagtcgttggaaagagcaatataaggagcgagtagaaaattattctaatgtaagtattcatttgaagaatcctgaaaactgttcctgccaggcttgtggactgcatcgctactgtaaatattcagtgcatttatcaggagagttgtataacaccaggaccatgcaaatagataatttcatgtcacatgataaacaggtgttcactgttggcagaatttgtgccagccgtaccagaatttatcataaactgaaacattttaaattcaaactataccaggaatgttgcaccattgcaatgacagaagaagttgaagatgaacaagttaaagaaacagtggaaagaattttcaggcggtcaaaagaaaatggctggattaaggagaaatatggtcaacttgaagaatatctcaattttgcggattactttcaagaagagaagtttgagttgtaacacatttccatcagagaagattttttaaattcctgtaaatgtgaagatcatgattcttgtttttctgtatcatgtgacatgtttgtacattttatctatatcttcatggcaaaatattttgtttaaaacatgattatcttaattcctgtgaagtggcactctacactctaattaaacttttatctgatgtacataaaagcattatcttaatttttaagtctgtaaatatattttaaagttatataataatggctttataacagatgactgtcaagtgaatgagctgttgatatcctgtcagtttagtcaaaatatattgtatcttaaaaatgtatttagactaacgtctacatgtatttttacggaattcctgtccagatctgtttattcttttacagtattaaatgattttcactaatatattttttactgctatcatctaaatcagtgggccatggaagaaacctcatatatcattcagttcaatcccattgcttcagaatcagatcatagcatatctattctaagtagaggaatgcttttttccttttcttgaaagtttctctttcaaatagatttcaggcctctagagtctttcaaccctcacattcaggaataattttatgtaaattttcatgctttataatgttcttacttttttctattcaattttgtctatatattgatgattaagatgtattttatttatttttatccatagctttttccatataagtatgtatcttagggtcagaactgctgaaagagacaaactcagccaaaaacacttggaaagcatattttggtatctgcattgctttgcatatctaaattttcccataaagtaataaagtaaaatggttgcagagtgaacaaatg

SEQ ID NO: 3510 - protein, 172 aa, Homosapiens
MLTSLHYLDNRFVQPRLESLVSRSRWKEQYKERVENYSNVSIHLKNPENCSCQACGLHRYCKYSVHLSGELYNTRTMQIDNFMSHDKQVFTVGRICASRTRIYHKLKHFKFKLYQECCTIAMTEEVEDEQVKETVERIFRRSKENGWIKEKYGQLEEYLNFADYFQEEKFEL

SEQ ID NO: 3511 - DNA, 1562 bp, Homosapiens
ggggcggaggcggaggcagaggtggaggcgctttgaaagattcttttagtgaccactatactcattttgaaagagttgtgaaggctcttctgatcaacgctttagatgaatcttttctgggaacattatatgatggcacaaggcaaaaatcatatgcaaaagatatgctaacatctcttcattatttggataaccgctttgttcagcctcgtctagagagcttggtatctagaagtcgttggaaagagcaatataaggagcgagtagaaaattattctaatgtaagtattcatttgaagaatcctgaaaactgttcctgccaggcttgtggactgcatcgctactgtaaatattcagtgcatttatcaggagagttgtataacaccaggaccatgcaaatagataatttcatgtcacatgataaacaggtgttcactgttggcagaatttgtgccagccgtaccagaatttatcataaactgaaacattttaaattcaaactataccaggaatgttgcaccattgcaatgacagaagaagttgaagatgaacaagttaaagaaacagtggaaagaattttcaggcggtcaaaagaaaatggctggattaaggagaaatatggtcaacttgaagaatatctcaattttgcggattactttcaagaagagaagtttgagttgtaacacatttccatcagagaagattttttaaattcctgtaaatgtgaagatcatgattcttgtttttctgtatcatgtgacatgtttgtacattttatctatatcttcatggcaaaatattttgtttaaaacatgattatcttaattcctgtgaagtggcactctacactctaattaaacttttatctgatgtacataaaagcattatcttaatttttaagtctgtaaatatattttaaagttatataataatggctttataacagatgactgtcaagtgaatgagctgttgatatcctgtcagtttagtcaaaatatattgtatcttaaaaatgtatttagactaacgtctacatgtatttttacggaattcctgtccagatctgtttattcttttacagtattaaatgattttcactaatatattttttactgctatcatctaaatcagtgggccatggaagaaacctcatatatcattcagttcaatcccattgcttcagaatcagatcatagcatatctattctaagtagaggaatgcttttttccttttcttgaaagtttctctttcaaatagatttcaggcctctagagtctttcaaccctcacattcaggaataattttatgtaaattttcatgctttataatgttcttacttttttctattcaattttgtctatatattgatgattaagatgtattttatttatttttatccatagctttttccatataagtatgtatcttagggtcagaactgctgaaagagacaaactcagccaaaaacacttggaaagcatattttggtatctgcattgctttgcatatctaaattttcccataaagtaataaagtaaaatggttgcagagtgaacaaatg

SEQ ID NO: 3512 - protein, 172 aa, Homosapiens; identical to SEQ ID NO: 3510

SEQ ID NO: 3513 - DNA, 2721 bp, Homosapiens
atcgcttgtcctgagctggttgccggggcaggggcggaggcggaggcagaggtggaggcgctttgaaagccgtcattgtgtggcactggacggggaatcaagagacccggtttctaatccctgctctgtcactaacaagctgcgtgatcttcggaaaaaagtaatcctcttggaaagctggaaacatagtccgaagcttaagtgaaaatgatacatgttagaagacatgaaacaaggagaaattctaagagtcacgtgcctgagcagaaatctcgagttgattggaggcgaactaaaagaagtagtatctcacaattacttgatagtgatgaagagcttgatagtgaagaatttgatagtgatgaagagcttgatagtgatgaaagttttgaaaatgatgaagagcttgatagtaacaagggacctgattgtaataaaacaccaggaagtgaaagagagctcaacttaagtaaaattcaaagtgaaggaaatgacagtaagtgtctcattaactctggcaacggttcaacatatgaagaagaaacgaacaaaatcaaacataggaatattgacttacaagatcaggaaaaacatttaagtcaagaggataatgatctcaacaaacaaactggacaaataatagaggatgatcaggaaaaacatttaagtcaagaggataatgatctcaacaaacaaactggacaaataatagaggatgatttagaagaagaagacatcaagcgaggaaaaagaaaaaggctatcctctgtgatgtgtgacagtgatgagagtgatgacagcgatatcctagttagaaaagtaggtgttaaacgtccccgtagagtggttgaagatgaaggttcttcagtggaaatggagcaaaagactcctgaaaaaacattagctgcacaaaagcgagaaaaacttcagaagctcaaagaactctcaaaacaaagatctcgtcagagacgcagtagtggtagagattttgaggactctgaaaaggaatcttgcccaagcagtgatgaagttgatgaggaggaagaagaggataattatgaatctgatgaagatggagatgattatattatcgatgactttgtagtgcaagatgaggagggtgatgaagagaataaaaaccaacaaggagaaaaattgactacatcacaactgaaattagtaaaacagaattctctttattcttttagtgaccactatactcattttgaaagagttgtgaaggctcttctgatcaacgctttagatgaatcttttctgggaacattatatgatggcacaaggcaaaaatcatatgcaaaagatatgctaacatctcttcattatttggataaccgctttgttcagcctcgtctagagagcttggtatctagaagtcgttggaaagagcaatataaggagcgagtagaaaattattctaatgtaagtattcatttgaagaatcctgaaaactgttcctgccaggcttgtggactgcatcgctactgtaaatattcagtgcatttatcaggagagttgtataacaccaggaccatgcaaatagataatttcatgtcacatgataaacaggtgttcactgttggcagaatttgtgccagccgtaccagaatttatcataaactgaaacattttaaattcaaactataccaggaatgttgcaccattgcaatgacagaagaagttgaagatgaacaagttaaagaaacagtggaaagaattttcaggcggtcaaaagaaaatggctggattaaggagaaatatggtcaacttgaagaatatctcaattttgcggattactttcaagaagagaagtttgagttgtaacacatttccatcagagaagattttttaaattcctgtaaatgtgaagatcatgattcttgtttttctgtatcatgtgacatgtttgtacattttatctatatcttcatggcaaaatattttgtttaaaacatgattatcttaattcctgtgaagtggcactctacactctaattaaacttttatctgatgtacataaaagcattatcttaatttttaagtctgtaaatatattttaaagttatataataatggctttataacagatgactgtcaagtgaatgagctgttgatatcctgtcagtttagtcaaaatatattgtatcttaaaaatgtatttagactaacgtctacatgtatttttacggaattcctgtccagatctgtttattcttttacagtattaaatgattttcactaatatattttttactgctatcatctaaatcagtgggccatggaagaaacctcatatatcattcagttcaatcccattgcttcagaatcagatcatagcatatctattctaagtagaggaatgcttttttccttttcttgaaagtttctctttcaaatagatttcaggcctctagagtctttcaaccctcacattcaggaataattttatgtaaattttcatgctttataatgttcttacttttttctattcaattttgtctatatattgatgattaagatgtattttatttatttttatccatagctttttccatataagtatgtatcttagggtcagaactgctgaaagagacaaactcagccaaaaacacttggaaagcatattttggtatctgcattgctttgcatatctaaattttcccataaagtaataaagtaaaatggttgcagagtgaacaaatg

SEQ ID NO: 3514 - protein, 544 aa, Homosapiens; identical to SEQ ID NO: 480

SEQ ID NO: 3515 - DNA, 2856 bp, Homosapiens
atcgcttgtcctgagctggttgccggggcaggggcggaggcggaggcagaggtggaggcgctttgaaagaaaacatcgaagaggagtgatgttttacacccaagaatggatccctcctggtagaatttcaaataatgacctggggttccactgcctttcaaatctgtaaagtgttaactaccacctgcattgtttatacagcaaccgtcattgtgtggcactggacggggaatcaagagacccggtttctaatccctgctctgtcactaacaagctgcgtgatcttcggaaaaaagtaatcctcttggaaagctggaaacatagtccgaagcttaagtgaaaatgatacatgttagaagacatgaaacaaggagaaattctaagagtcacgtgcctgagcagaaatctcgagttgattggaggcgaactaaaagaagtagtatctcacaattacttgatagtgatgaagagcttgatagtgaagaatttgatagtgatgaagagcttgatagtgatgaaagttttgaaaatgatgaagagcttgatagtaacaagggacctgattgtaataaaacaccaggaagtgaaagagagctcaacttaagtaaaattcaaagtgaaggaaatgacagtaagtgtctcattaactctggcaacggttcaacatatgaagaagaaacgaacaaaatcaaacataggaatattgacttacaagatcaggaaaaacatttaagtcaagaggataatgatctcaacaaacaaactggacaaataatagaggatgatcaggaaaaacatttaagtcaagaggataatgatctcaacaaacaaactggacaaataatagaggatgatttagaagaagaagacatcaagcgaggaaaaagaaaaaggctatcctctgtgatgtgtgacagtgatgagagtgatgacagcgatatcctagttagaaaagtaggtgttaaacgtccccgtagagtggttgaagatgaaggttcttcagtggaaatggagcaaaagactcctgaaaaaacattagctgcacaaaagcgagaaaaacttcagaagctcaaagaactctcaaaacaaagatctcgtcagagacgcagtagtggtagagattttgaggactctgaaaaggaatcttgcccaagcagtgatgaagttgatgaggaggaagaagaggataattatgaatctgatgaagatggagatgattatattatcgatgactttgtagtgcaagatgaggagggtgatgaagagaataaaaaccaacaaggagaaaaattgactacatcacaactgaaattagtaaaacagaattctctttattcttttagtgaccactatactcattttgaaagagttgtgaaggctcttctgatcaacgctttagatgaatcttttctgggaacattatatgatggcacaaggcaaaaatcatatgcaaaagatatgctaacatctcttcattatttggataaccgctttgttcagcctcgtctagagagcttggtatctagaagtcgttggaaagagcaatataaggagcgagtagaaaattattctaatgtaagtattcatttgaagaatcctgaaaactgttcctgccaggcttgtggactgcatcgctactgtaaatattcagtgcatttatcaggagagttgtataacaccaggaccatgcaaatagataatttcatgtcacatgataaacaggtgttcactgttggcagaatttgtgccagccgtaccagaatttatcataaactgaaacattttaaattcaaactataccaggaatgttgcaccattgcaatgacagaagaagttgaagatgaacaagttaaagaaacagtggaaagaattttcaggcggtcaaaagaaaatggctggattaaggagaaatatggtcaacttgaagaatatctcaattttgcggattactttcaagaagagaagtttgagttgtaacacatttccatcagagaagattttttaaattcctgtaaatgtgaagatcatgattcttgtttttctgtatcatgtgacatgtttgtacattttatctatatcttcatggcaaaatattttgtttaaaacatgattatcttaattcctgtgaagtggcactctacactctaattaaacttttatctgatgtacataaaagcattatcttaatttttaagtctgtaaatatattttaaagttatataataatggctttataacagatgactgtcaagtgaatgagctgttgatatcctgtcagtttagtcaaaatatattgtatcttaaaaatgtatttagactaacgtctacatgtatttttacggaattcctgtccagatctgtttattcttttacagtattaaatgattttcactaatatattttttactgctatcatctaaatcagtgggccatggaagaaacctcatatatcattcagttcaatcccattgcttcagaatcagatcatagcatatctattctaagtagaggaatgcttttttccttttcttgaaagtttctctttcaaatagatttcaggcctctagagtctttcaaccctcacattcaggaataattttatgtaaattttcatgctttataatgttcttacttttttctattcaattttgtctatatattgatgattaagatgtattttatttatttttatccatagctttttccatataagtatgtatcttagggtcagaactgctgaaagagacaaactcagccaaaaacacttggaaagcatattttggtatctgcattgctttgcatatctaaattttcccataaagtaataaagtaaaatggttgcagagtgaacaaatg

SEQ ID NO: 3516 - protein, 544 aa, Homosapiens; identical to SEQ ID NO: 480

SEQ ID NO: 3517 - DNA, 2045 bp, Homosapiens
atcgcttgtcctgagctggttgccggggcaggggcggaggcggaggcagaggtggaggcgctttgaaagccgtcattgtgtggcactggacggggaatcaagagacccggtttctaatccctgctctgtcactaacaagctgcgtgatcttcggaaaaaagtaatcctcttggaaagctggaaacatagtccgaagcttaagtgaaaatgatacatgttagaagacatgaaacaaggagaaattctaagagtcacgtgcctgagcagaaatctcgagttgattggaggcgaactaaaagaagtagtatctcacaattacttgatagtgatgaagagcttgatagtgaagaatttgatagtgatgaagagcttgatagtgatgaaagttttgaaaatgatgaagagcttgatagtaacaagggacctgattgtaataaaacaccaggaagtgaaagagagctcaacttaagtaaaattcaaagtgaaggaaatgacagtaagtgtctcattaactctggcaacggttcaacatatgaagaagaaacgaacaaaatcaaacataggaatattgacttacaagatcaggaaaaacatttaagtcaagaggataatgatctcaacaaacaaactggacaaataatagaggatgatcaggaaaaacatttaagtcaagaggataatgatctcaacaaacaaactggacaaataatagaggatgatttagaagaagaagacatcaagcgaggaaaaagaaaaaggctatcctctgtgatgtgtgacagtgatgagagtgatgacagcgatatcctagttagaaaagtaggtgttaaacgtccccgtagagtggttgaagatgaaggttcttcagtggaaatggagcaaaagactcctgaaaaaacattagctgcacaaaagcgagaaaaacttcagaagctcaaagaactctcaaaacaaagatctcgtcagagacgcagtagtggtagagattttgaggactctgaaaaggaatcttgcccaagcagtgatgaagttgatgaggaggaagaagaggataattatgaatctgatgaagatggagatgattatattatcgatgactttgtagtgcaagatgaggagggtgatgaagagaataaaaaccaacaaggagaaaaattgactacatcacaactgaaattagtaaaacagaattctctttattcttttagtgaccactatactcattttgaaagagttgtgaaggctcttctgatcaacgctttagatgaatcttttctgggaacattatatgatggcacaaggcaaaaatcatatgcaaaagatatgctaacatctcttcattatttggataaccgctttgttcagcctcgtctagagagcttggtatctagaagtcgttggaaagagcaatataaggagcgagtagaaaattattctaatgtaagtattcatttgaagaatcctgaaaactgttcctgccaggcttgtggactgcatcgctactgtaaatattcagtgcatttatcaggagagttgtataacaccaggaccatgcaaatagataatttcatgtcacatgataaacaggtgttcactgttggcagaatttgtgccagccgtaccagaatttatcataaactgaaacattttaaattcaaactataccaggaatgttgcaccattgcaatgacagaagaagttgaagatgaacaagttaaagaaacagtggaaagaattttcaggcggtcaaaagaaaatggctggattaaggagaaatatggtcaacttgaagaatatctcaattttgcggattactttcaagaagagaagtttgagttgtaacacatttccatcagagaagattttttaaattcctgtaaatgtgaagatcatgattcttgtttttctgtatcatgtgacatgtttgtacattttatctatatcttcatggcaaaatattttgtttaaaacatgattatcttaattcctgtgaagtggcactctacactctaattaaacttttatctgatgtacataaaagcatt

SEQ ID NO: 3518 - protein, 544 aa, Homosapiens; identical to SEQ ID NO: 480

SEQ ID NO: 3519 - DNA, 790 bp, Homosapiens
attcagaagtttgaactttatctggaattcaggggctaattcatatggcacaaggcaaaaatcatatgcaaaagatatgctaacatctcttcattatttggataaccgctttgttcagcctcgtctagagagcttggtatctagaagtcgttggaaagagcaatataaggagcgagtagaaaattattctaatgtaagtattcatttgaagaatcctgaaaactgttcctgccaggcttgtggactgcatcgctactgtaaatattcagtgcatttatcaggagagttgtataacaccaggaccatgcaaatagataatttcatgtcacatgataaacaggtgttcactgttggcagaatttgtgccagccgtaccagaatttatcataaactgaaacattttaaattcaaactataccaggaatgttgcaccattgcaatgacagaagaagttgaagatgaacaagttaaagaaacagtggaaagaattttcaggcggtcaaaagaaaatggctggattaaggagaaatatggtcaacttgaagaatatctcaattttgcggattactttcaagaagagaagtttgagttgtaacacatttccatcagagaagattttttaaattcctgtaaatgtgaagatcatgattcttgtttttctgtatcatgtgacatgtttgtacattttatctatatcttcatggcaaaatattttgtttaaaacatgattatcttaattcctgtgaagtggcactctacactctaattaaacttttatctgatgtacata

SEQ ID NO: 3520 - protein, 172 aa, Homosapiens; identical to SEQ ID NO: 3510

SEQ ID NO: 3521 - DNA, 878 bp, Homosapiens
ggggcggaggcggaggcagaggtggaggcgctttgaaagattcttttagtgaccactatactcattttgaaagagttgtgaaggctcttctgatcaacgctttagatgaatcttttctgggaacattatatgatggcacaaggcaaaaatcatatgcaaaagatatgctaacatctcttcattatttggataaccgctttgttcagcctcgtctagagagcttggtatctagaagtcgttggaaagagcaatataaggagcgagtagaaaattattctaatgtaagtattcatttgaagaatcctgaaaactgttcctgccaggcttgtggactgcatcgctactgtaaatattcagtgcatttatcaggagagttgtataacaccaggaccatgcaaatagataatttcatgtcacatgataaacaggtgttcactgttggcagaatttgtgccagccgtaccagaatttatcataaactgaaacattttaaattcaaactataccaggaatgttgcaccattgcaatgacagaagaagttgaagatgaacaagttaaagaaacagtggaaagaattttcaggcggtcaaaagaaaatggctggattaaggagaaatatggtcaacttgaagaatatctcaattttgcggattactttcaagaagagaagtttgagttgtaacacatttccatcagagaagattttttaaattcctgtaaatgtgaagatcatgattcttgtttttctgtatcatgtgacatgtttgtacattttatctatatcttcatggcaaaatattttgtttaaaacatgattatcttaattcctgtgaagtggcactctacactctaattaaacttttatctgatgtacata

SEQ ID NO: 3522 - protein, 172 aa, Homosapiens; identical to SEQ ID NO: 3510

SEQ ID NO: 3523 - DNA, 549 bp, Homosapiens
actggaagttaataatgcattttgattctactactaaagaaaatccaaaaaccagaaaggatatatattcgttgtcagataacaatctttatttcttgatttaggtgttcactgttggcagaatttgtgccagccgtaccagaatttatcataaactgaaacattttaaattcaaactataccaggaatgttgcaccattgcaatgacagaagaagttgaagatgaacaagttaaagaaacagtggaaagaattttcaggcggtcaaaagaaaatggctggattaaggagaaatatggtcaacttgaagaatatctcaattttgcggattactttcaagaagagaagtttgagttgtaacacatttccatcagagaagattttttaaattcctgtaaatgtgaagatcatgattcttgtttttctgtatcatgtgacatgtttgtacattttatctatatcttcatggcaaaatattttgtttaaaacatgattatcttaattcctgtgaagtggcactctacactctaattaaacttttatctgatgt

SEQ ID NO: 3524 - protein, 54 aa, Homosapiens
MNKLKKQWKEFSGGQKKMAGLRRNMVNLKNISILRITFKKRSLSCNTFPSEKIF

SEQ ID NO: 3525 - DNA, 736 bp, Homosapiens
ggatcatcttccgggagcgtggctaggggcggagcgactgccgcgcgatagtcagggagctgtgcgggtcctggttgcaagagaggaaggattaaaggaatggagggcatcataaacatgaagaaaaatgtgagagagtatgataattgaaagaagagtttgtgttcaaagggagagattaaagatgtgcaacttcagaccttggccaaagtgaaacatttcaccaagattcaggctgtgagaaacatcttgcctacccacctgaccacaaggcagacaaaggcccaacggaagaaacattcttatcataccctactcggcaaaggcccaacggaagaaacattcttatcataccctactcggcaaaggctcaactaaagaaacatctctatcatattctgttgggagaaagtgcaaagaaacaccacgttctggaggaataagagccagaactgcctcatcatgggaacatcttatgaatatcctgccgggcagccagctatatggcccagatctctgccgctcagacccattaagtaccccagcctgtaagcggcggtgagctctgtctggccctaagttagttggccctcaacttccgcaggtgtctgcaatatacctgtgttgctgtttgagctgccccctctctgtgtctttttttaaccctcgtctcccttcaaaacctaacagtaagcactcaattcttacttgttgaataaatgaatgatagacaatg

SEQ ID NO: 3526 - protein, 86 aa, Homosapiens
RCATSDLGQSETFHQDSGCEKHLAYPPDHKADKGPTEETFLSYPTRQRPNGRNILIIPYSAKAQLKKHLYHILLGESAKKHHVLEE

SEQ ID NO: 3527 - DNA, 2914 bp, Homosapiens
atgtcagggaaacggaagcgtgtggtgttgactattaaagataagcttgatataataaagaaacttgaagacggaggttcttccaaacaactggcagtgatttatggaattggtgaaacaacagttcgggatataagaaaaaataaggaaaagattataacttatgcaagcagttctgattccacaagtcttttggccaagaggaaatctatgaagccatccatgtatgaggaattggacagggcaatgctggaatggttcaaccagcaaagagcaaaagggaatcccatatctggaccaatttgtgcaaaaagggcagagttcttcttttatgctttgggaatggatggtgattttaacccctctgccggttggctaactcgttttaagcagcggcacagcattagagagattaacattagaaatgaaagattaaatggagatgagactgcggtggaagatttttgtaataactttcgagattttattgaacgagagaatttacagcctgaacaaatctacaatgcagatgaaactggactcttttggaagtgcttgccttctaggatttcagtaatcaaaggtaaatgcactgtccctgggcacaaatcaattgaagaaagagtcacaatcatgtgttgtgccaatgcaacaggtttacacaaacttaaactttgtgttgtggggaaagcaaagaaacctcgctcctttaaatcaactgacaccttaaacctgccagtctcttatttcagccaaaaaggtgcatggatggatctttccattttccgacaatggtttgataaaatttttgtgccgcaagttcgagagtatttaagatctaaaggcttgcaggaaaaggctgtgctcttgttggataattcaccaacacatccaaatgaaaatgtcctaaggtcagatgatggccaaatatttgctaaatatttaccacctaatgtggcctcattgattcagccttcagatcagggagtcatagcaacgatgaagagaaattatcgtgcaggtcttctccagaacaacttggaagaaggtaatgacctgaaatcattctggaagaagctaactctgttggatgcactttatgaaatagcaatggcatggaacttagtaaaaccagttaccattagcagagcatggaagaagattctccctatggtagaggagaaagagagcctggactttgatgttgaagatatttctgtggctactgtggctgccattttacaacacaccaaaggattggaaaatgtgactactgagaaccttgaaaaatggcttgaagtagacagtactgaaccaggctatgaagtgttaactgatagcgaaatcatcagaagagcacaaggccaggcagatgaatccagtgaaaatgaggaggaggaaatagaactaattccagagaaacatattaatcatgcagctgccctccagtggactgaaaatttattggattatctagaacaacaaggtgatatgattctacctgatagactggtaatacgtaaacttcgagccaccatcagaaataaacagaagatgacaaagtcaagtcaataatgtcatttcaattttattgttctgctcattgtgtttgtgacaaactctttgcaatatggcttaattttctttgtgttctgaattctcagacttggtcctgtgaaatacaggcacaaaatgtatctgaagtggtttgaggattatgtgttttcatcatctgtgtcttttgtccttttatttgtacagataatcagaagatgatactgaatagatataaattacatgtacacatgtattcactttttagaatctgcaattataccttctgtaacagtggcattcccttaattttctagtgaaagttagagataactgaacagactgaagcacttttctgaaatcttttgcttgatttatgaaggctgccatagttatcttttcttgtgttaaccatcttaaatgatgttttgtatattttaatagactgataggatgagaaagatttatattattagatttcaggatgatttataataattcaaaaatgaaattcaataatggggaaataattatgaattatagaaattatgccttcattctcttacatttgtgtgggttgcaagagggggagattattctggaaatgaagtaaatatgggaagttattgccaaatgagagagaaactatgggaaagctgatctataaagaggcattctgatcaattcatttgtaggaaactgggaaataaaaacctggggaactttaggttatttatacaaagggaataaataggctgattttaatttggtaagttgatctttttattatgaatttggtaatagtataggtttattatttattcatctaattttatagtacaggttttgtaatgttacatgtgatgatatgagctcccaccttatatgggggaacatcttgggaatttgagatttaataagtttttttttttttttttttagtgtttttactgcatactcacaaatgttgtctataatttgaaaaatattgtcatatctggccctttgatgagaaaaggaaattacaataataaagttttatgattttaaataagtcatatgtttgtatcctgttttatgaagaaagcagaaataattactgaaagtgccagacactaaggaatattattgtttattattttaatacatataaaaagggattaatctgctaaaatgtaatctaaatcagaattttgataaattttttttgtaaactaagtatgtttattcaagacattgaaactactttgcacatatgaatattaatgtaacttgtaatttaaaagtaaagtgtttccatgctatttcatgttttggccaaaaatttttaaaaaataaattacaattgttctctattagt

SEQ ID NO: 3528 - protein, 524 aa, Homosapiens; identical to SEQ ID NO: 482

SEQ ID NO: 3529 - DNA, 548 bp, Homosapiens
tgggttttgaagtactgcgtgtcgtcttcagagttgttttcctggaggcgctgataccggacttggtggagaaggatggtatgaatgtgtttctaggtggctgcctggacaagggagttcagcctttgggagataaagcagaatataaagggtcacactctgtcacccagactggagtgcagtggcgcaatctcagctcgctgtagactcaacctcctgggctcaagcgattctcccacctcagccttctgactttgcctcgggagagaaaaagagagtcgattccgagtacagctgggccactgggactgcattcctgcctgtgaggaggacagcctgtcaatgagccagaaggggctaacagaggttgtacttacaggttctcaagttttgctatcataaacacccaaagtacaccacgccggcaagctgaaggctgacaggatagaaaacttgcacaagacagttaacattgtagcgatcatcttgccaaacagagggcagcaatgcttgtgtcttggtcggaaaggagttggagtgaagtcaca

SEQ ID NO: 3530 - protein, 41 aa, Homosapiens
MNVFLGGCLDKGVQPLGDKAEYKGSHSVTQTGVQWRNLSSL

SEQ ID NO: 3531 - DNA, 393 bp, Homosapiens
ctgcaagagaaaagcccaagggcctaggtaaacaatggacagcatcctggatgatgatgcaattttaagcctgaaaagaatatttggtcttcaatcttggcaagcatacctgtaaagtagatggtaaggctgctgatgagaaccatttgagaaaaaatgatcaatgagaaaattgcaccagaggacccacattgggacttttgagttgaacacattacttagcaaatgctaacatgggaacttgaggatatttagtgaacctgctgaagtcaacacattaatgcaactgaaaccaatagagaagaagctatctaaccttggcattttggggtctaaaaaaagcttttacccactattgtgctttgtaacctataaaataaatcaaaataaatc

SEQ ID NO: 3532 - protein, 36 aa, Homosapiens
MQLKPIEKKLSNLGILGSKKSFYPLLCFVTYKINQN

SEQ ID NO: 3533 - DNA, 508 bp, Homosapiens
caatggacagcatcctggatgatgatgcaattttaagcctgaaaagaatatttggtcttcaatcttggcaagcatacctgtaaagtagatggtaaggctgctgatgagcatgcttccccctctgcccttctggatgtatacgccagaaccatttgagtaatcaagtcatagctggaatgtgactgcctggctgatcttccaaggtccccttgcatctatgtgtggccttatgaatcaatccttgccaatggaaagtgaatggaagtgatgtgtgtcggtcccaggactgaccatagacctcctgcatgtgctcctttatgctatttcttcagttcagggtgggaatgggaatgcccagagcaactttggaagctatatgctgaggatgctagaactgccatcagcctgggaccctgaacaactgtatgaaaccaggtacctgtgggtgggaaaaaaactggctggaactattagatgaaagaaaaataaacatgtttttggtcattgc

SEQ ID NO: 3534 - protein, 52 aa, Homosapiens
MEVMCVGPRTDHRPPACAPLCYFFSSGWEWECPEQLWKLYAEDARTAISLGP

SEQ ID NO: 3535 - DNA, 4333 bp, Homosapiens
ggcttttcttccccttctgattttcccctccccccttttctccctttccgggtttggttccccccttttcttcccctctcccccctccttcccaagcccctttcccctcccccgtcccagtcccccctgcttcccagccctcggccccggggaagccccggccgagaaaagcccgcccccagaagcgcgccgccgccggccgtcggggccgagccgcagccgagcggccgtgggcccgggcggcgggcggagacgtgggcgccctccccgccaaggcccgtgcgagaggttagacttgtttcttatatgtgatgccattccagcactggactcatggaggctgagcatttattcaggagtccatagaggccactgtattctattgaagaacatgtctaacagtaacactactcaagagaccctggaaataatgaaagaatcagaaaaaaaactggtggaagaatctgtaaacaaaaacaagtttatatctaagactccaagtaaggaagaaattgagaaagaatgtgaagataccagtttgcgtcaggagacacagaggcggacatctaaccatggtcatgccaggaaaagagccaagtctaattccaagctaaagttggtgcgtagcctggcagtgtgtgaggagtcctccaccccatttgctgatgggccattagaaacccaggatataattcaattgcacatcagttgcccttctgacaaggaggaagaaaagtccacaaaagatgtctctgaaaaggaagacaaggacaaaaacaaagaaaagatcccaaggaagatgctgtccagagactccagccaggaatatacggactccactggaatagacctacatgaatttcttgtaaatacactgaaaaagaacccaagggacagaatgatgctgctaaaattagaacaggagattctggaatttattaatgacaacaataatcagttcaagaagttccctcagatgacctcatatcaccggatgctattacaccgggtagctgcctattttgggatggaccacaatgttgatcaaactgggaaagctgtcatcatcaacaaaactagtaacacaagaatccctgaacagaggttctcagaacatataaaggatgagaagaatacagaatttcaacagaggttcattctcaagagagatgatgccagtatggaccgagatgataaccagactggccagaacggatatctaaatgacatcagactctccaaagaagccttttcttctagctctcacaagagaaggcagatttttagggggaaccgtgaaggactgagccgcacctcaagcagccgccagagcagcacagacagcgaactcaaatccctggagccacgcccttggagcagcacagactctgatggctctgtccggagcatgcgaccccctgtcaccaaagctagcagcttcagtggaatctctatccttacccgaggtgacagcatcggcagcagtaaaggcggcagtgcgggaaggatctccaggccaggtatggcactaggtgccccagaagtgtgcaaccaggtcacctcatcccagtctgtccgggggcttctcccttgtactgcccagcagcaacagcagcagcagcagcagcaacttcctgctctcccacccacgcctcagcaacagccacccttgaataatcacatgatctcacaggcagatgacctcagcaacccctttggacaaatgagccttagtcgccaaggttctactgaagcagctgacccatctgcagctctattccagaccccacttatctcccagcaccctcagcagactagcttcatcatggcttccacgggtcagcccctccccacttccaactattccacctctagccatgcaccacctactcagcaagttctgccaccccaggggtacatgcagccccctcaacagatccaggtttcttactatccccctggacaatatcctaactccaaccagcaatatcgacctctctctcacccggtggcctatagcccccaacgtggtcagcagctgcctcagccatcccagcagcctggtttacagcccatgatgcctaaccagcagcaggcggcttaccaaggcatgattggggtccagcagccacagaaccagggcctgctcagcagccagaggagcagcatggggggccagatgcaaggcctggtggttcagtacactccactgccttcttaccaagttccagtgggtagtgactcgcaaaatgtggtccagccgcctttccagcaacccatgctggtccctgtgagccagtctgtgcaaggaggcctcccagcagcgggggtaccagtgtactatagcatgatcccacctgctcagcagaacggtacgagcccttctgtagggtttctgcaaccccctggctctgagcagtaccagatgcctcagtctccctctccctgcagtccaccacagatgccacagcagtactcaggagtgtcaccttctggaccaggtgtagtggtcatgcagctgaatgtccctaatggaccccagccccctcagaacccatccatggtccagtggagtcattgtaaatactacagcatggaccagcgggggcagaagcctggagacctgtacagtcctgacagcagcccccaggccaacacacaaatgagcagcagccctgtcacatctcctacccagtctccagcaccctctcctgtcaccagcctcagcagtgtctgcacaggactcagtcccctgcctgtcctcacacagttcccccggcctgggggtccagcacagggtgatgggcgctactcccttttgggccagccattacagtacaatctgtccatctgccctcccttgctccatggccagtcaacttacacggtgcaccagggacagagtggactgaagcatggaaaccggggcaagagacaagcactcaaatctgcctccactgacctggggacagcagatgttgtcctggggcgggtgctggaggtgacagatctccctgagggcatcacccgtactgaggcggacaaactcttcacgcagctcgccatgtctggcgccaagatccagtggctcaaggatgctcaggggctgcctggagggggtgggggggacaacagtgggactgctgagaatggccgccactcggacctcgctgccttgtacaccattgtggctgtgttccccagccccctggctgcccaaaatgcctcccttcgtctcaacaactccgtgagtcgcttcaaacttcgaatggccaaaaagaactatgacctgaggatcctggagcgagccagctcccaataaatggaggaggggaaagggactgtcacagaaggagcaagggcagggtggagggggttgaaggatcctgacagaccatggacagaggcaggaagtaaggaaactgatgttaaactggaacctaagacagtgatgaagatggaaacacagatacctacactggcattggactccttcttgctcccctgccatgggtcctctctttttccctggttgaccccccttgcatcactcttcttcccatcctcttctttttttttttttttttttttttgagacggagtttcgctcttgtcaccccagctggagtgcagtagcacgatcttggctaactgcaacctccagctcctgggttcaggtgattctcctgcctcagcctcccaagtagctggcactacagacacgcgccaccatgcccggctaatttttgtatttttagtagagacggagtttcaccatgttggccaggctggcctcaaactcctgacctcaggtgatccacctgccttggccttccagagtgctgggattacaggcgtgagccactgtgcctggcttccatcctcttctatcatttttttaaatctcttctcctatcataaaattaatttctcattttttggtcaggtagaattgggaaagtcccacactgtcctcctattaccttaacatcccaagcttcctttccttttttggtctttatgaatatatttatatggacagaattaagataaacaaaattgattgccccattctctcacttccccatcttgtcttcctagaccccacagagttaaaacttgggattcccctggcccccccagaacacttgtatattgtttgtttgaggttcgtgccgcagtaacagacacagtatttaattgcacatacagatgtttgctgggtatattcactgtaaattttatttaatctgtttttttgtttgtttgggggttatttggggggaggttggttttgtttttaaatataaaaaaaaaaatctgtcactggaca

SEQ ID NO: 3536 - protein, 976 aa, Homosapiens
MSNSNTTQETLEIMKESEKKLVEESVNKNKFISKTPSKEEIEKECEDTSLRQETQRRTSNHGHARKRAKSNSKLKLVRSLAVCEESSTPFADGPLETQDIIQLHISCPSDKEEEKSTKDVSEKEDKDKNKEKIPRKMLSRDSSQEYTDSTGIDLHEFLVNTLKKNPRDRMMLLKLEQEILEFINDNNNQFKKFPQMTSYHRMLLHRVAAYFGMDHNVDQTGKAVIINKTSNTRIPEQRFSEHIKDEKNTEFQQRFILKRDDASMDRDDNQTGQNGYLNDIRLSKEAFSSSSHKRRQIFRGNREGLSRTSSSRQSSTDSELKSLEPRPWSSTDSDGSVRSMRPPVTKASSFSGISILTRGDSIGSSKGGSAGRISRPGMALGAPEVCNQVTSSQSVRGLLPCTAQQQQQQQQQQLPALPPTPQQQPPLNNHMISQADDLSNPFGQMSLSRQGSTEAADPSAALFQTPLISQHPQQTSFIMASTGQPLPTSNYSTSSHAPPTQQVLPPQGYMQPPQQIQVSYYPPGQYPNSNQQYRPLSHPVAYSPQRGQQLPQPSQQPGLQPMMPNQQQAAYQGMIGVQQPQNQGLLSSQRSSMGGQMQGLVVQYTPLPSYQVPVGSDSQNVVQPPFQQPMLVPVSQSVQGGLPAAGVPVYYSMIPPAQQNGTSPSVGFLQPPGSEQYQMPQSPSPCSPPQMPQQYSGVSPSGPGVVVMQLNVPNGPQPPQNPSMVQWSHCKYYSMDQRGQKPGDLYSPDSSPQANTQMSSSPVTSPTQSPAPSPVTSLSSVCTGLSPLPVLTQFPRPGGPAQGDGRYSLLGQPLQYNLSICPPLLHGQSTYTVHQGQSGLKHGNRGKRQALKSASTDLGTADVVLGRVLEVTDLPEGITRTEADKLFTQLAMSGAKIQWLKDAQGLPGGGGGDNSGTAENGRHSDLAALYTIVAVFPSPLAAQNASLRLNNSVSRFKLRMAKKNYDLRILERASSQ

SEQ ID NO: 3537 - DNA, 419 bp, Homosapiens
ttagtacacacagggtttcactatatgttggccaggctggtcttcaactcctgaccctaagtgatccacccacctccacctcccaaagttgctgggattgtaggcgtgagcctctgtgcccagccacatttttgttttattaatttccgtatcctcagcacttagcacagcacttgatgttcagtaaagtgcacaacagatttattgactgagtaggtaaggaggagttttttccttgaactctttccatgaatttttcatcgtgattagttgtccttggaagggtgggatgggttttcactaggaaaacctggttttctaaggtactcattgagagatgttgagatgttttttctggggatgtttctctttggacaaacatctcgtgctttggggccattgaatgaaaatactctgag

SEQ ID NO: 3538 - protein, 46 aa, Homosapiens
STHRVSLYVGQAGLQLLTLSDPPTSTSQSCWDCRREPLCPATFLFY

SEQ ID NO: 3539 - DNA, 2613 bp, Homosapiens
tcattttcaagtcagacgtttggctgctgctctgtcccctgcaacaaggagccatgccagctggacacacacttcttccagggcctctggcagccaggacagagttgagaccacagctgttgagaccctgagccctgagtctgtattgctcaagaagggccttccccagcaatgacctcctcattgcttctggcctttctcctcctggctccaaccacagtggccactcccagagctggcggtcagtgtccagcatgtggggggcccaccttggaactggagagccagcgggagctgcttcttgatctggccaagagaagcatcttggacaagctgcacctcacccagcgcccaacactgaaccgccctgtgtccagagctgctttgaggactgcactgcagcacctccacggggtcccacagggggcacttctagaggacaacagggaacaggaatgtgaaatcatcagctttgctgagacaggcctctccaccatcaaccagactcgtcttgattttcacttctcctctgatagaactgctggtgacagggaggtccagcaggccagtctcatgttctttgtgcagctcccttccaataccacttggaccttgaaagtgagagtccttgtgctgggtccacataataccaacctcaccttggctactcagtacctgctggaggtggatgccagtggctggcatcaactccccctagggcctgaagctcaagctgcctgcagccaggggcacctgaccctggagctggtacttgaaggccaggtagcccagagctcagtcatcctgggtggagctgcccataggccttttgtggcagcccgggtgagagttgggggcaaacaccagattcaccgacgaggcatcgactgccaaggagggtccaggatgtgctgtcgacaagagttttttgtggacttccgtgagattggctggcacgactggatcatccagcctgagggctacgccatgaacttctgcatagggcagtgcccactacacatagcaggcatgcctggtattgctgcctcctttcacactgcagtgctcaatcttctcaaggccaacacagctgcaggcaccactggagggggctcatgctgtgtacccacggcccggcgccccctgtctctgctctattatgacagggacagcaacattgtcaagactgacatacctgacatggtagtagaggcctgtgggtgcagttagtctatgtgtggtatgggcagcccaaggttgcatgggaaaacacgcccctacagaagtgcacttccttgagaggagggaatgacctcattctctgtccagaatgtggactccctcttcctgagcatcttatggaaattaccccacctttgacttgaagaaaccttcatctaaagcaagtcactgtgccatcttcctgaccactaccctctttcctagggcatagtccatcccgctagtccatcccgctagccccactccagggactcagacccatctccaaccatgagcaatgccatctggttcccaggcaaagacacccttagctcacctttaatagaccccataacccactatgccttcctgtcctttctactcaatggtccccactccaagatgagttgacacaaccccttcccccaatttttgtggatctccagagaggcccttctttggattcaccaaagtttagatcactgctgcccaaaatagaggcttacctacccccctctttgttgtgagcccctgtccttcttagttgtccaggtgaactactaaagctctctttgcataccttcatccattttttgtccttctctgcctttctctatgcccttaagggctgacttgcctgagctctatcacctgagctcccctgccctctggcttcctgctgaggtcagggcatttcttatccctgttccctctctgtctaggtgtcatggttctgtgtaactgtggctattctgtgtccctacactacctggctacccccttccatggccccagctctgcctacattctgatataactgcttcaacactagggggtcctaaaggctttctatcttgctagtccctggggcctcaacatctcatactggttcccttaactctgcctatacctctgtaaataattccttcactaagttctcttgatgaagcaaaaacagacagctgaaaagtcctctatctcctacaagggccctaactggcaccccagatgacacagagcctgcctgcttatgctgtagtctgcctactctgctgtctcttcacatggtctcctcagaactgaactattgtatccatctcacactttatgcctcttctttcttaggcaccccgtccctccatccttccagaaccatctttgaggtctcatggctaataaaaacctaggctttacctgttccctctgtaatccctccaaaagatgagacagatctatgcttggtcatccagtaaactgaccagctgtgggcacgcaagtgtgggaggcagaggcatgctcagagctggctgccaggacctctgacttgccttcctttcacccacccccagtgctccacccaggagtcctgcctggaagctggaatgggcaagg

SEQ ID NO: 3540 - protein, 352 aa, Homosapiens; identical to SEQ ID NO: 484

SEQ ID NO: 3541 - DNA, 1009 bp, Homosapiens
tcattttcaagtcagacgtttggctgctgctctgtcccctgcaacaaggagccatgccagctggacacacacttcttccagggcctctggcagccaggacagagttgagaccacagctgttgagaccctgagccctgagtctgtattgctcaagaagggccttccccagcaatgacctcctcattgcttctggcctttctcctcctggctccaaccacagtggccactcccagagctggcggtcagtgtccagcatgtggggggcccaccttggaactggagagccagcgggagctgcttcttgatctggccaagagaagcatcttggacaagctgcacctcacccagcgcccaacactgaaccgccctgtgtccagagctgctttgaggactgcactgcagcacctccacggggtcccacagggggcacttctagaggacaacagggaacaggaatgtgaaatcatcagctttgctgagacaggcctctccaccatcaaccagactcgtcttgattttcacttctcctctgatagaactgctggtgacagggaggtccagcaggccagtctcatgttctttgtgcagctcccttccaataccacttggaccttgaaagtgagagtccttgtgctgggtccacataataccaacctcaccttggctactcagtacctgctggaggtggatgccagtggctggcatcaactccccctagggcctgaagctcaagctgcctgcagccaggggcacctgaccctggagctggtacttgaaggccaggtagcccagaatctaacctccttcccaattacagcttagtctccagggctaggactggggtaaagcaaagtgagtcattcacctgggggggctaaattttaagggggtggtgaacaatttattaatcaagataggactttaatgcaatattattttaaagtcaaaattaatgcaaaaaatccatgatgaacaaaatagcctacttttaaataaaaacaggatcagc

SEQ ID NO: 3542 - protein, 216 aa, Homosapiens
MTSSLLLAFLLLAPTTVATPRAGGQCPACGGPTLELESQRELLLDLAKRSILDKLHLTQRPTLNRPVSRAALRTALQHLHGVPQGALLEDNREQECEIISFAETGLSTINQTRLDFHFSSDRTAGDREVQQASLMFFVQLPSNTTWTLKVRVLVLGPHNTNLTLATQYLLEVDASGWHQLPLGPEAQAACSQGHLTLELVLEGQVAQNLTSFPITA

SEQ ID NO: 3543 - DNA, 2285 bp, Homosapiens
tccacatcatgctccaggccaactggactctgggcggccagcacaggcagggtcagggggtgacttctgtgcctcgtggcactgccacctgggcctgagcaagagggctccattctcctacccgcccaaaccctcatccctgtcctagccccagtgctagaaataaagagaccagaattttccttctggcctaagggccccagaggaatacccactggaactcacagctgcctcatggaaactgctgcagcagtggtgaagctagaaagactagaggcagcgctgaccagagccctccggagactacagccagggagtgtggctccagggaatggggaggaggtcatcagctttgctactgtcacagactccacttcagcctacagctccctgctcacttttcacctgtccactcctcggtcccaccacctgtaccatgcccgcctgtggctgcacgtgctccccacccttcctggcactctttgcttgaggatcttccgatggggaccaaggaggaggcgccaagggtcccgcactctcctggctgagcaccacatcaccaacctgggctggcataccttaactctgccctctagtggcttgaggggtgagaagtctggtgtcctgaaactgcaactagactgcagacccctagaaggcaacagcacagttactggacaaccgaggcggctcttggacacagcaggacaccagcagcccttcctagagcttaagatccgagccaatgagcctggagcaggccgggccaggaggaggacccccacctgtgagcctgcgacccccttatgttgcaggcgagaccattacgtagacttccaggaactgggatggcgggactggatactgcagcccgaggggtaccagctgaattactgcagtgggcagtgccctccccacctggctggcagcccaggcattgctgcctctttccattctgccgtcttcagcctcctcaaagccaacaatccttggcctgccagtacctcctgttgtgtccctactgcccgaaggcccctctctctcctctacctggatcataatggcaatgtggtcaagacggatgtgccagatatggtggtggaggcctgtggctgcagctagcaagaggacctggggctttggagtgaagagaccaagatgaagtttcccaggcacagggcatctgtgactggaggcatcagattcctgatccacaccccaacccaacaaccacctggcaatatgactcacttgacccctatgggacccaaatgggcactttcttgtctgagactctggcttattccaggttggctgatgtgttgggagatgggtaaagcgtttcttctaaaggggtctacccagaaagcatgatttcctgccctaagtcctgtgagaagatgtcagggactagggagggagggagggaaggcagagaaaaattacttagcctctcccaagatgagaaagtcctcaagtgaggggaggaggaagcagatagatggtccagcaggcttgaagcagggtaagcaggctggcccagggtaagggctgttgaggtaccttaagggaaggtcaagagggagatgggcaaggcgctgagggaggatgcttaggggacccccagaaacaggagtcaggaaaatgaggcactaagcctaagaagttccctggtttttcccaggggacaggacccactgggagacaagcatttatactttctttcttcttttttatttttttgagatcgagtctcgctctgtcaccaggctggagtgcagtgacacgatcttggctcactgcaacctccgtctcctgggttcaagtgattcttctgcctcagcctcccgagcagctgggattacaggcgcccactaatttttgtattcttagtagaaacgaggtttcaacatgttggccaggatggtctcaatctcttgacctcttgatccacccgacttggcctcccgaagtgatgagattataggcgtgagccaccgcgcctggcttatactttcttaataaaaaggagaaagaaaatcaacaaatgtgagtcataaagaagggttagggtgatggtccagagcaacagttcttcaagtgtactctgtaggcttctgggaggtcccttttcaggggtgtccacaaagtcaaagctattttcataataatactaacatgttatttgccttttgaattctcattatcttaaaattgtattgtggagttttccagaggccgtgtgacatgtgattacatcatctttctgacatcattgttaatgg

SEQ ID NO: 3544 - protein, 295 aa, Homosapiens
METAAAVVKLERLEAALTRALRRLQPGSVAPGNGEEVISFATVTDSTSAYSSLLTFHLSTPRSHHLYHARLWLHVLPTLPGTLCLRIFRWGPRRRRQGSRTLLAEHHITNLGWHTLTLPSSGLRGEKSGVLKLQLDCRPLEGNSTVTGQPRRLLDTAGHQQPFLELKIRANEPGAGRARRRTPTCEPATPLCCRRDHYVDFQELGWRDWILQPEGYQLNYCSGQCPPHLAGSPGIAASFHSAVFSLLKANNPWPASTSCCVPTARRPLSLLYLDHNGNVVKTDVPDMVVEACGCS

SEQ ID NO: 3545 - DNA, 2450 bp, Homosapiens
ggtcagtagccagacatgagctgtgagggtcaagcacagctatccatcagatgatctactttcagccttcctgagtcccagacaatagaagacaggtggctgtacccttggccaagggtaggtgtggcagtggtgtctgctgtcactgtgccctcattggcccccagcaatcagactcaacagacggagcaactgccatccgaggctcctgaaccagggccattcaccaggagcatgcggctccctgatgtccagctctggctggtgctgctgtgggcactggtgcgagcacaggggacagggtctgtgtgtccctcctgtgggggctccaaactggcaccccaagcagaacgagctctggtgctggagctagccaagcagcaaatcctggatgggttgcacctgaccagtcgtcccagaataactcatcctccaccccaggcagcgctgaccagagccctccggagactacagccagggagtgtggctccagggaatggggaggaggtcatcagctttgctactgtcacagactccacttcagcctacagctccctgctcacttttcacctgtccactcctcggtcccaccacctgtaccatgcccgcctgtggctgcacgtgctccccacccttcctggcactctttgcttgaggatcttccgatggggaccaaggaggaggcgccaagggtcccgcactctcctggctgagcaccacatcaccaacctgggctggcataccttaactctgccctctagtggcttgaggggtgagaagtctggtgtcctgaaactgcaactagactgcagacccctagaaggcaacagcacagttactggacaaccgaggcggctcttggacacagcaggacaccagcagcccttcctagagcttaagatccgagccaatgagcctggagcaggccgggccaggaggaggacccccacctgtgagcctgcgacccccttatgttgcaggcgagaccattacgtagacttccaggaactgggatggcgggactggatactgcagcccgaggggtaccagctgaattactgcagtgggcagtgccctccccacctggctggcagcccaggcattgctgcctctttccattctgccgtcttcagcctcctcaaagccaacaatccttggcctgccagtacctcctgttgtgtccctactgcccgaaggcccctctctctcctctacctggatcataatggcaatgtggtcaagacggatgtgccagatatggtggtggaggcctgtggctgcagctagcaagaggacctggggctttggagtgaagagaccaagatgaagtttcccaggcacagggcatctgtgactggaggcatcagattcctgatccacaccccaacccaacaaccacctggcaatatgactcacttgacccctatgggacccaaatgggcactttcttgtctgagactctggcttattccaggttggctgatgtgttgggagatgggtaaagcgtttcttctaaaggggtctacccagaaagcatgatttcctgccctaagtcctgtgagaagatgtcagggactagggagggagggagggaaggcagagaaaaattacttagcctctcccaagatgagaaagtcctcaagtgaggggaggaggaagcagatagatggtccagcaggcttgaagcagggtaagcaggctggcccagggtaagggctgttgaggtaccttaagggaaggtcaagagggagatgggcaaggcgctgagggaggatgcttaggggacccccagaaacaggagtcaggaaaatgaggcactaagcctaagaagttccctggtttttcccaggggacaggacccactgggagacaagcatttatactttctttcttcttttttatttttttgagatcgagtctcgctctgtcaccaggctggagtgcagtgacacgatcttggctcactgcaacctccgtctcctgggttcaagtgattcttctgcctcagcctcccgagcagctgggattacaggcgcccactaatttttgtattcttagtagaaacgaggtttcaacatgttggccaggatggtctcaatctcttgacctcttgatccacccgacttggcctcccgaagtgatgagattataggcgtgagccaccgcgcctggcttatactttcttaataaaaaggagaaagaaaatcaacaaatgtgagtcataaagaagggttagggtgatggtccagagcaacagttcttcaagtgtactctgtaggcttctgggaggtcccttttcaggggtgtccacaaagtcaaagctattttcataataatactaacatgttatttgccttttgaattctcattatcttaaaattgtattgtggagttttccagaggccgtgtgacatgtgattacatcatctttctgacatcattgttaatgg

SEQ ID NO: 3546 - protein, 350 aa, Homosapiens; identical to SEQ ID NO: 486

SEQ ID NO: 3547 - DNA, 723 bp, Homosapiens
ggaccctatactgcttacgcccccccccccgccccggctgaacacgctgctgttggcctcaccctttggatggaacttgcagcggccgggacagagttgcggtttggggcaaatcaagttgggttgggggctctggaagaaggtgaggagtctatggagcataaaagcaaggagcagcggctgaggctctgggtgcagggtgtggttcacgaggtcaccaaggagccctgggactgaagcccctttccctagaaccccggctctacgtctcgaagttctggagggtgccgcccctccgcaccacgtcactgcaggctctagctgctcttccaggctttctgctccctctgctggccgttctcacacatgacacccgctcggagtcgaagcagaagagctggggaactgaaggaggagcccagttgaaggaggagcccctcactaaagcccacttaaaagcccaggagaaagtataagccaggcgcggtggctcacgcctataatctcatcacttcgggaggccaagtcgggtggatcaagaggtcaagagattgagaccatcctggccaacatgttgaaacctcgtttctactaagaatacaaaaattagtgggcgcctgtaatcccagctgctcgggaggctgaggcagaagaatcacttgaacccaggagacggaggttgcagtgagccaagatcgtgtcactgcactccagcctggtgac

SEQ ID NO: 3548 - protein, 55 aa, Homosapiens [sequence omitted]

SEQ ID NO: 3549 - DNA, 659 bp, Homosapiens
gccgccgctcttcccgctcgcccctcacctcccttctatttccctccctcttgccgttctggaggatgaggcggggtagctggaagcaagagaaggggtgccgggcttattgcacccccaggacccccaggatcctccccctcccttgagggaccctatactgcttacgcccccccccccgccccggctgaacacgctgctgttggcctcaccctttggatggaacttgcagcggccgggacagagttgcggtttggggcaaatcaagttgggttgggggctctggaagaaggtgaggagtctatggagcataaaagcaaggagcagcggctgaggctctgggtgcagggtgtggttcacgaggtcaccaaggagccctgggactgaagcccctttccctagaaccccggctctacgtctcgaagttctggagggtgccgcccctccgcaccacgtcactgcaggctctagctgctcttccaggctttctgctccctctgctggccgttctcacacatgacacccgctcggagtcgaagcagaagagctggggaactgaaggaggagcccagttgaaggaggagcccctcactaaagcccacttaaaagcccaggaggtggatatgtgagctctgagaaacggagaggcagaggttgct

SEQ ID NO: 3550 - protein, 55 aa, Homosapiens [sequence omitted]

SEQ ID NO: 3551 - DNA, 3600 bp, Homosapiens
cccagactccagccctggaccgcgcatcccgagcccagcgcccagacagagtgtccccacaccctcctctgagacgccatgttcaactcgatgaccccaccaccaatcagtagctatggcgagccctgctgtctccggcccctccccagtcagggggcccccagtgtggggacagaaggactgtctggcccgcccttctgccaccaagctaacctcatgtccggcccccacagttatgggccagccagagagaccaacagctgcaccgagggcccactcttttcttctccccggagtgcagtcaagttgaccaagaagcgggcactgtccatctcacctctgtcggatgccagcctggacctgcagacggttatccgcacctcacccagctccctcgtagctttcatcaactcgcgatgcacatctccaggaggctcctacggtcatctctccattggcaccatgagcccatctctgggattcccagcccagatgaatcaccaaaaagggccctcgccttcctttggggtccagccttgtggtccccatgactctgcccggggtgggatgatcccacatcctcagtcccggggacccttcccaacttgccagctgaagtctgagctggacatgctggttggcaagtgccgggaggaacccttggaaggtgatatgtccagccccaactccacaggcatacaggatcccctgttggggatgctggatgggcgggaggacctcgagagagaggagaagcgtgagcctgaatctgtgtatgaaactgactgccgttgggatggctgcagccaggaatttgactcccaagagcagctggtgcaccacatcaacagcgagcacatccacggggagcggaaggagttcgtgtgccactgggggggctgctccagggagctgaggcccttcaaagcccagtacatgctggtggttcacatgcgcagacacactggcgagaagccacacaagtgcacgtttgaagggtgccggaagtcatactcacgcctcgaaaacctgaagacgcacctgcggtcacacacgggtgagaagccatacatgtgtgagcacgagggctgcagtaaagccttcagcaatgccagtgaccgagccaagcaccagaatcggacccattccaatgagaagccgtatgtatgtaagctccctggctgcaccaaacgctatacagatcctagctcgctgcgaaaacatgtcaagacagtgcatggtcctgacgcccatgtgaccaaacggcaccgtggggatggccccctgcctcgggcaccatccatttctacagtggagcccaagagggagcgggaaggaggtcccatcagggaggaaagcagactgactgtgccagagggtgccatgaagccacagccaagccctggggcccagtcatcctgcagcagtgaccactccccggcagggagtgcagccaatacagacagtggtgtggaaatgactggcaatgcagggggcagcactgaagacctctccagcttggacgagggaccttgcattgctggcactggtctgtccactcttcgccgccttgagaacctcaggctggaccagctacatcaactccggccaatagggacccggggtctcaaactgcccagcttgtcccacaccggtaccactgtgtcccgccgcgtgggccccccagtctctcttgaacgccgcagcagcagctccagcagcatcagctctgcctatactgtcagccgccgctcctccctggcctctcctttcccccctggctccccaccagagaatggagcatcctccctgcctggccttatgcctgcccagcactacctgcttcgggcaagatatgcttcagccagagggggtggtacttcgcccactgcagcatccagcctggatcggataggtggtcttcccatgcctccttggagaagccgagccgagtatccaggatacaaccccaatgcaggggtcacccggagggccagtgacccagcccaggctgctgaccgtcctgctccagctagagtccagaggttcaagagcctgggctgtgtccataccccacccactgtggcagggggaggacagaactttgatccttacctcccaacctctgtctactcaccacagccccccagcatcactgagaatgctgccatggatgctagagggctacaggaagagccagaagttgggacctccatggtgggcagtggtctgaacccctatatggacttcccacctactgatactctgggatatgggggacctgaaggggcagcagctgagccttatggagcgaggggtccaggctctctgcctcttgggcctggtccacccaccaactatggccccaacccctgtccccagcaggcctcatatcctgaccccacccaagaaacatggggtgagttcccttcccactctgggctgtacccaggccccaaggctctaggtggaacctacagccagtgtcctcgacttgaacattatggacaagtgcaagtcaagccagaacaggggtgcccagtggggtctgactccacaggactggcaccctgcctcaatgcccaccccagtgaggggcccccacatccacagcctctcttttcccattacccccagccctctcctccccaatatctccagtcaggcccctatacccagccaccccctgattatcttccttcagaacccaggccttgcctggactttgattcccccacccattccacagggcagctcaaggctcagcttgtgtgtaattatgttcaatctcaacaggagctactgtgggagggtgggggcagggaagatgcccccgcccaggaaccttcctaccagagtcccaagtttctggggggttcccaggttagcccaagccgtgctaaagctccagtgaacacatatggacctggctttggacccaacttgcccaatcacaagtcaggttcctatcccaccccttcaccatgccatgaaaattttgtagtgggggcaaatagggcttcacatagggcagcagcaccacctcgacttctgcccccattgcccacttgctatgggcctctcaaagtgggaggcacaaaccccagctgtggtcatcctgaggtgggcaggctaggagggggtcctgccttgtaccctcctcccgaaggacaggtatgtaaccccctggactctcttgatcttgacaacactcagctggactttgtggctattctggatgagccccaggggctgagtcctcctccttcccatgatcagcggggcagctctggacataccccacctccctctgggccccccaacatggctgtgggcaacatgagtgtcttactgagatccctacctggggaaacagaattcctcaactctagtgcctaaagagtagggaatctcatccatcacagatcgcatttcctaaggggtttctatccttccagaaaaattgggggagctgcagtcccatgcacaagatgccccagggatgggaggtatgggctgggggctatgtatagtctgtatacgttttgaggagaaatttgataatgacactgtttcctgataataaaggaactgcatcag

SEQ ID NO: 3552 - protein, 1106 aa, Homosapiens; identical to SEQ ID NO: 488

SEQ ID NO: 3553 - DNA, 4027 bp, Homosapiens
cccagactccagccctggaccgcgcatcccgagcccagcgcccagacagagtgtccccacaccctcctctgagacgccatgttcaactcgatgaccccaccaccaatcagtagctatggcgagccctgctgtctccggcccctccccagtcagggggcccccagtgtggggacagaaggactgtctggcccgcccttctgccaccaagctaacctcatgtccggcccccacagttatgggccagccagagagaccaacagctgcaccgagggcccactcttttcttctccccggagtgcagtcaagttgaccaagaagcgggcactgtccatctcacctctgtcggatgccagcctggacctgcagacggttatccgcacctcacccagctccctcgtagctttcatcaactcgcgatgcacatctccaggaggctcctacggtcatctctccattggcaccatgagcccatctctgggattcccagcccagatgaatcaccaaaaagggccctcgccttcctttggggtccagccttgtggtccccatgactctgcccggggtgggatgatcccacatcctcagtcccggggacccttcccaacttgccagctgaagtctgagctggacatgctggttggcaagtgccgggaggaacccttggaaggtgatatgtccagccccaactccacaggcatacaggatcccctgttggggatgctggatgggcgggaggacctcgagagagaggagaagcgtgagcctgaatctgtgtatgaaactgactgccgttgggatggctgcagccaggaatttgactcccaagagcagctggtgcaccacatcaacagcgagcacatccacggggagcggaaggagttcgtgtgccactgggggggctgctccagggagctgaggcccttcaaagcccagtacatgctggtggttcacatgcgcagacacactggcgagaagccacacaagtgcacgtttgaagggtgccggaagtcatactcacgcctcgaaaacctgaagacgcacctgcggtcacacacgggtgagaagccatacatgtgtgagcacgagggctgcagtaaagccttcagcaatgccagtgaccgagccaagcaccagaatcggacccattccaatgagaagccgtatgtatgtaagctccctggctgcaccaaacgctatacagatcctagctcgctgcgaaaacatgtcaagacagtgcatggtcctgacgcccatgtgaccaaacggcaccgtggggatggccccctgcctcgggcaccatccatttctacagtggagcccaagagggagcgggaaggaggtcccatcagggaggaaagcagactgactgtgccagagggtgccatgaagccacagccaagccctggggcccagtcatcctgcagcagtgaccactccccggcagggagtgcagccaatacagacagtggtgtggaaatgactggcaatgcagggggcagcactgaagacctctccagcttggacgagggaccttgcattgctggcactggtctgtccactcttcgccgccttgagaacctcaggctggaccagctacatcaactccggccaatagggacccggggtctcaaactgcccagcttgtcccacaccggtaccactgtgtcccgccgcgtgggccccccagtctctcttgaacgccgcagcagcagctccagcagcatcagctctgcctatactgtcagccgccgctcctccctggcctctcctttcccccctggctccccaccagagaatggagcatcctccctgcctggccttatgcctgcccagcactacctgcttcgggcaagatatgcttcagccagagggggtggtacttcgcccactgcagcatccagcctggatcggataggtggtcttcccatgcctccttggagaagccgagccgagtatccaggatacaaccccaatgcaggggtcacccggagggccagtgacccagcccaggctgctgaccgtcctgctccagctagagtccagaggttcaagagcctgggctgtgtccataccccacccactgtggcagggggaggacagaactttgatccttacctcccaacctctgtctactcaccacagccccccagcatcactgagaatgctgccatggatgctagagggctacaggaagagccagaagttgggacctccatggtgggcagtggtctgaacccctatatggacttcccacctactgatactctgggatatgggggacctgaaggggcagcagctgagccttatggagcgaggggtccaggctctctgcctcttgggcctggtccacccaccaactatggccccaacccctgtccccagcaggcctcatatcctgaccccacccaagaaacatggggtgagttcccttcccactctgggctgtacccaggccccaaggctctaggtggaacctacagccagtgtcctcgacttgaacattatggacaagtgcaagtcaagccagaacaggggtgcccagtggggtctgactccacaggactggcaccctgcctcaatgcccaccccagtgaggggcccccacatccacagcctctcttttcccattacccccagccctctcctccccaatatctccagtcaggcccctatacccagccaccccctgattatcttccttcagaacccaggccttgcctggactttgattcccccacccattccacagggcagctcaaggctcagcttgtgtgtaattatgttcaatctcaacaggagctactgtgggagggtgggggcagggaagatgcccccgcccaggaaccttcctaccagagtcccaagtttctggggggttcccaggttagcccaagccgtgctaaagctccagtgaacacatatggacctggctttggacccaacttgcccaatcacaagtcaggttcctatcccaccccttcaccatgccatgaaaattttgtagtgggggcaaatagggcttcacatagggcagcagcaccacctcgacttctgcccccattgcccacttgctatgggcctctcaaagtgggaggcacaaaccccagctgtggtcatcctgaggtgggcaggctaggagggggtcctgccttgtaccctcctcccgaaggacaggtatgtaaccccctggactctcttgatcttgacaacactcagctggactttgtggctattctggatgagccccaggggctgagtcctcctccttcccatgatcagcggggcagctctggacataccccacctccctctgggccccccaacatggctgtgggcaacatgagtgtcttactgagatccctacctggggaaacagaattcctcaactctagtgcctaaagagtagggaatctcatccatcacagatcgcatttcctaaggggtttctatccttccagaaaaattgggggagctgcagtcccatgcacaagatgccccagggatgggaggtatgggctgggggctatgtatagtctgtatacgttttgaggagaaatttgataatgacactgtttcctgataataaaggaactgcatcagaaaaaataccatgccactttatgtattattatgttggggaggaatgataacagggaacaagaagagaagcaggggttaatccactcactttcctctttagagaagctccctcacccatcccaacacctcaagtcacactcatgaagatagagacagtcatttgggagatttaaagggatatcctcaaaacagaacaccagcctctcaccaccagagatgaccggaaatatgttttctcttcttccttccctgcatcaggggaagaggctggtgaagttggtgagcatcagctggaccagctgccctgggtagagagcatgggctgctgggtcagatgtctcctgctctggccgaaacagggttggtccaaacacaattcccaggttgtggggtgtcatgcgattcttatctgagtgtgctatcaccc

SEQ ID NO: 3554 - protein, 1106 aa, Homosapiens; identical to SEQ ID NO: 488

SEQ ID NO: 3555 - DNA, 314 bp, Homosapiens
ggatggctagctggaggtctgcgttgtagagaggtaaccccaggcccactcttttcttctccccggagtgcagtcaagttgaccaagaagcgggcactgtccatctcacctctgtcggatgccagcctggacctgcagacggttatccgcacctcacccagctccctcgtagctttcatcaactcgcgatgcacatctccaggaggctcctacggtcatctctccattggcaccatgaggtgcagtcagccccgggccaagaggcccctaaagcccctacccaagtccattaaaagtctcaagccctcaaacta

SEQ ID NO: 3556 - protein, 34 aa, Homosapiens
MHISRRLLRSSLHWHHEVQSAPGQEAPKAPTQVH

SEQ ID NO: 3557 - DNA, 1636 bp, Homosapiens
ggtaccactgtgtcccgccgcgtgggccccccagtctctcttgaacgccgcagcagcagctccagcagcatcagctctgcctatactgtcagccgccgctcctccctggcctctcctttcccccctggctccccaccagagaatggagcatcctccctgcctggccttatgcctgcccagcactacctgcttcgggcaagatatgcttcagccagagggggtggtacttcgcccactgcagcatccagcctggatcggataggtggtcttcccatgcctccttggagaagccgagccgagtatccaggatacaaccccaatgcaggggtcacccggagggccagtgacccagcccaggctgctgaccgtcctgctccagctagagtccagaggttcaagagcctgggctgtgtccataccccacccactgtggcagggggaggacagaactttgatccttacctcccaacctctgtctactcaccacagccccccagcatcactgagaatgctgccatggatgctagagggctacaggaagagccagaagttgggacctccatggtgggcagtggtctgaacccctatatggacttcccacctactgatactctgggatatgggggacctgaaggggcagcagctgagccttatggagcgaggggtccaggctctctgcctcttgggcctggtccacccaccaactatggccccaacccctgtccccagcaggcctcatatcctgaccccacccaagaaacatggggtgagttcccttcccactctgggctgtacccaggccccaaggctctaggtggaacctacagccagtgtcctcgacttgaacattatggacaagtgcaagtcaagccagaacaggggtgcccagtggggtctgactccacaggactggcaccctgcctcaatgcccacatggctgtgggcaacatgagtgtcttactgagatccctacctggggaaacagaattcctcaactctagtgcctaaagagtagggaatctcatccatcacagatcgcatttcctaaggggtttctatccttccagaaaaattgggggagctgcagtcccatgcacaagatgccccagggatgggaggtatgggctgggggctatgtatagtctgtatacgttttgaggagaaatttgataatgacactgtttcctgataataaaggaactgcatcagaaaaaataccatgccactttatgtattattatgttggggaggaatgataacagggaacaagaagagaagcaggggttaatccactcactttcctctttagagaagctccctcacccatcccaacacctcaagtcacactcatgaagatagagacagtcatttgggagatttaaagggatatcctcaaaacagaacaccagcctctcaccaccagagatgaccggaaatatgttttctcttcttccttccctgcatcaggggaagaggctggtgaagttggtgagcatcagctggaccagctgccctgggtagagagcatgggctgctgggtcagatgtctcctgctctggccgaaacagggttggtccaaacacaattcccaggttgtggggtgtcatgcgattcttatctgagtgtgctatcaccc

SEQ ID NO: 3558 - protein, 279 aa, Homosapiens
MPAQHYLLRARYASARGGGTSPTAASSLDRIGGLPMPPWRSRAEYPGYNPNAGVTRRASDPAQAADRPAPARVQRFKSLGCVHTPPTVAGGGQNFDPYLPTSVYSPQPPSITENAAMDARGLQEEPEVGTSMVGSGLNPYMDFPPTDTLGYGGPEGAAAEPYGARGPGSLPLGPGPPTNYGPNPCPQQASYPDPTQETWGEFPSHSGLYPGPKALGGTYSQCPRLEHYGQVQVKPEQGCPVGSDSTGLAPCLNAHMAVGNMSVLLRSLPGETEFLNSSA

SEQ ID NO: 3559 - DNA, 2572 bp, Homosapiens
ggaaaggggctcctcttcccttctgtagacccttctctgtcttcttttaccttgcaggatgtgagggtggggcacccccttcaacattccccccaccccacaaaaagcctgttcccctttcctgtggccctgaggtgggggtggggtgggggaggcgggaagttggcaacaggaagtgaggagaagagcaaagaaaactgtgagagagagaatttttaaaaagcagctggggcctgaggtttctcccccagtaccctgggtcacctcagcccagagctggcggcaggcccccagcccctcatgtcagagccccctgtgtactgtaacctggtggaccttcgccgctgtcctcggtccccacccccaggccctgcatgccccctgctgcagaggctggatgcctgggagcagcacctggaccccaactctggacgctgcttctacataaattcactgactggctgcaagtcctggaagcccccgcgccgcagtcgcagcgagacgaaccctggctccatggaggggacacagaccctgaagaggaacaatgatgtcctgcaacctcaggcaaagggcttcagatctgacacagggaccccagaaccgcttgacccacagggttcactcagcctcagccaacgcacctcgcagcttgaccctccagccttgcaggcccctcgacctctgccgcagctcctggacgacccccatgtgaatctcccatttctttgtgaaggccaagatcctccctgccccccctccccccttttcctgctccacataaacatcttcctctttctgaatatcctcctacccagccctcccccagcaactttaagggacttcactcctgggagaccccctagggaaagccgtggccactatggagggcgagggtgacttacagatcccattccctccacttcccaggaggtggaaaagtcgggtctgctcaacatgaccaagattgcccaaggggggcgcaagctcaggaagaactggggcccgtcttgggtggtgttaacgggtaacagcctggtgttctaccgagagccaccgccgacagcgccctcctcaggctggggaccagcgggtagccggcccgaaagtagcgtggacctgcgcggggcggccctggcgcacggccgccacctgtccagccgccgcaacgtcctgcacatccgcacgatccctggccacgagttcctgctgcagtcggaccacgagacagagctgcgagcctggcaccgcgcgctgcggactgtcatcgagcggctggttagatgggtggaggcccggagggaggctccgaccggccgggaccaagggagtggggatcgggagaaccccctggagctgcgtctgtcgggctctggacccgcggagctgagcgccggggaggacgaagaagaggagtcggagctggtgtccaagccgctgctgcgcctcagcagccgccggagctccattcgggggcccgaaggcaccgagcagaaccgcgtgcgcaacaaactaaagcggctcatcgcgaagagaccgcccttacaaagcctgcaggagcggggtctgctccgagaccaggtgttcggctgccagttggaatcactctgccagcgggaaggagacacggtgcccagctttttgcggctctgcattgctgctgtggataaaagaggtctagatgtggatggcatttatcgggtgagcgggaacttggcagtggtccagaagcttcgctttctggtggacagagagcgtgcggtcacctccgatgggaggtatgtgttcccagaacagccaggacaagaaggtcggttagatttggacagtactgagtgggatgacattcatgtggtcaccggagccctgaagctttttctccgggagctgccccagcctctggtgccaccactgctgctgccccatttccgtgctgcccttgcactctccgaatcagagcagtgcctctctcagatacaagaattaataggctcaatgccaaagcccaaccatgacactctacggtacctcctggagcatttatgcagggtgatagcacactcagataagaatcgcatgacaccccacaacctgggaattgtgtttggaccaaccctgtttcggccagagcaggagacatctgacccagcagcccatgctctctacccagggcagctggtccagctgatgctcaccaacttcaccagcctcttcccctgatgcagggaaggaagaagagaaaacatatttccggtcatctctggtggtgagaggctggtgttctgttttgaggatatccctttaaatctcccaaatgactgtctctatcttcatgagtgtgacttgaggtgttgggatgggtgagggagcttctctaaagaggaaagtgagtggattaacccctgcttctcttcttgttccctgttatcattcctccccaacataataatacataaagtggcatggtattttttctgatgcagttcctttattatcaggaaacagtgtcattatcaaatttctcctcaaaacgtatacagactatacatagcccccagcccatacctcccat

SEQ ID NO: 3560 - protein, 420 aa, Homosapiens
MTKIAQGGRKLRKNWGPSWVVLTGNSLVFYREPPPTAPSSGWGPAGSRPESSVDLRGAALAHGRHLSSRRNVLHIRTIPGHEFLLQSDHETELRAWHRALRTVIERLVRWVEARREAPTGRDQGSGDRENPLELRLSGSGPAELSAGEDEEEESELVSKPLLRLSSRRSSIRGPEGTEQNRVRNKLKRLIAKRPPLQSLQERGLLRDQVFGCQLESLCQREGDTVPSFLRLCIAAVDKRGLDVDGIYRVSGNLAVVQKLRFLVDRERAVTSDGRYVFPEQPGQEGRLDLDSTEWDDIHVVTGALKLFLRELPQPLVPPLLLPHFRAALALSESEQCLSQIQELIGSMPKPNHDTLRYLLEHLCRVIAHSDKNRMTPHNLGIVFGPTLFRPEQETSDPAAHALYPGQLVQLMLTNFTSLFP

SEQ ID NO: 3561 - DNA, 2296 bp, Homosapiens
ggaaaggggctcctcttcccttctgtagacccttctctgtcttcttttaccttgcaggatgtgagggtggggcacccccttcaacattccccccaccccacaaaaagcctgttcccctttcctgtggccctgaggtgggggtggggtgggggaggcgggaagttggcaacaggaagtgaggagaagagcaaagaaaactgtgagagagagaatttttaaaaagcagctggggcctgaggtttctcccccagtaccctgggtcacctcagcccagagctggcggcaggcccccagcccctcatgtcagagccccctgtgtactgtaacctggtggaccttcgccgctgtcctcggtccccacccccaggccctgcatgccccctgctgcagaggctggatgcctgggagcagcacctggaccccaactctggacgctgcttctacataaattcactgactggctgcaagtcctggaagcccccgcgccgcagtcgcagcgagacgaaccctggctccatggaggggacacagaccctgaagaggaacaatgatgtcctgcaacctcaggcaaagggcttcagatctgacacagggaccccagaaccgcttgacccacagggttcactcagcctcagccaacgcacctcgcagcttgaccctccagccttgcaggcccctcgacctctgccgcagctcctggacgacccccatgaggtggaaaagtcgggtctgctcaacatgaccaagattgcccaaggggggcgcaagctcaggaagaactggggcccgtcttgggtggtgttaacgggtaacagcctggtgttctaccgagagccaccgccgacagcgccctcctcaggctggggaccagcgggtagccggcccgaaagtagcgtggacctgcgcggggcggccctggcgcacggccgccacctgtccagccgccgcaacgtcctgcacatccgcacgatccctggccacgagttcctgctgcagtcggaccacgagacagagctgcgagcctggcaccgcgcgctgcggactgtcatcgagcggctggatcgggagaaccccctggagctgcgtctgtcgggctctggacccgcggagctgagcgccggggaggacgaagaagaggagtcggagctggtgtccaagccgctgctgcgcctcagcagccgccggagctccattcgggggcccgaaggcaccgagcagaaccgcgtgcgcaacaaactaaagcggctcatcgcgaagagaccgcccttacaaagcctgcaggagcggggtctgctccgagaccaggtgttcggctgccagttggaatcactctgccagcgggaaggagacacggtgcccagctttttgcggctctgcattgctgctgtggataaaagaggtctagatgtggatggcatttatcgggtgagcgggaacttggcagtggtccagaagcttcgctttctggtggacagagagcgtgcggtcacctccgatgggaggtatgtgttcccagaacagccaggacaagaaggtcggttagatttggacagtactgagtgggatgacattcatgtggtcaccggagccctgaagctttttctccgggagctgccccagcctctggtgccaccactgctgctgccccatttccgtgctgcccttgcactctccgaatcagagcagtgcctctctcagatacaagaattaataggctcaatgccaaagcccaaccatgacactctacggtacctcctggagcatttatgcagggtgatagcacactcagataagaatcgcatgacaccccacaacctgggaattgtgtttggaccaaccctgtttcggccagagcaggagacatctgacccagcagcccatgctctctacccagggcagctggtccagctgatgctcaccaacttcaccagcctcttcccctgatgcagggaaggaagaagagaaaacatatttccggtcatctctggtggtgagaggctggtgttctgttttgaggatatccctttaaatctcccaaatgactgtctctatcttcatgagtgtgacttgaggtgttgggatgggtgagggagcttctctaaagaggaaagtgagtggattaacccctgcttctcttcttgttccctgttatcattcctccccaacataataatacataaagtggcatggtattttttctgatgcagttcctttattatcaggaaacagtgtcattatcaaatttctcctcaaaacgtatacagactatacatagcccccagcccatacctcccat

SEQ ID NO: 3562 - protein, 547 aa, Homosapiens
MSEPPVYCNLVDLRRCPRSPPPGPACPLLQRLDAWEQHLDPNSGRCFYINSLTGCKSWKPPRRSRSETNPGSMEGTQTLKRNNDVLQPQAKGFRSDTGTPEPLDPQGSLSLSQRTSQLDPPALQAPRPLPQLLDDPHEVEKSGLLNMTKIAQGGRKLRKNWGPSWVVLTGNSLVFYREPPPTAPSSGWGPAGSRPESSVDLRGAALAHGRHLSSRRNVLHIRTIPGHEFLLQSDHETELRAWHRALRTVIERLDRENPLELRLSGSGPAELSAGEDEEEESELVSKPLLRLSSRRSSIRGPEGTEQNRVRNKLKRLIAKRPPLQSLQERGLLRDQVFGCQLESLCQREGDTVPSFLRLCIAAVDKRGLDVDGIYRVSGNLAVVQKLRFLVDRERAVTSDGRYVFPEQPGQEGRLDLDSTEWDDIHVVTGALKLFLRELPQPLVPPLLLPHFRAALALSESEQCLSQIQELIGSMPKPNHDTLRYLLEHLCRVIAHSDKNRMTPHNLGIVFGPTLFRPEQETSDPAAHALYPGQLVQLMLTNFTSLFP

SEQ ID NO: 3563 - DNA, 2668 bp, Homosapiens
acatacttcctcaccagacaccaccaggagttctcagcccccaaaacctgtcaccgatcctcaccaggctgtttgctctaccctctcccccaactcaagggctcccgtcctcacctccctgcaacactgctcctagaaccatgtctgtctacctggagacagccaggcctattcccttctgggtctccagtgtccctttttctcacaggtgacagtgctggctacaatgctatccagccggtggtggccaagttcctgggggatcctagggctgggcccccgaagccctcctcggggatcccagctctgtgccctctatgcctttacttatactggggcagatggccagcaggtgtctctggctgaaggggataggttcctactgcttcgaaagaccaactccgactggtggttggcaagacgcctagaagctccctccacctctcgacccatcttcgtcccagcagcctatatgatagaggaatccatcccttcccagagtccaactaccgtcatccccggccaattgctctggactcctgggccgaagttgtttcatggttccctggaggagttgtctcaggccctcccaagcagggctcaggctagctcggagcagcctcctccacttccccgcaaaatgtgtaggagcgtcagcactgacaatctgagccccagccttctgaagcctttccaggaaggaccaagcggaagatccctctcccaggaagacttgccgtcagaagccagtgccagcacagcaggcccccagcccctcatgtcagagccccctgtgtactgtaacctggtggaccttcgccgctgtcctcggtccccacccccaggccctgcatgccccctgctgcagaggctggatgcctgggagcagcacctggaccccaactctggacgctgcttctacataaattcactgactggctgcaagtcctggaagcccccgcgccgcagtcgcagcgagacgaaccctggctccatggaggggacacagaccctgaagaggaacaatgatgtcctgcaacctcaggcaaagggcttcagatctgacacagggaccccagaaccgcttgacccacagggttcactcagcctcagccaacgcacctcgcagcttgaccctccagccttgcaggcccctcgacctctgccgcagctcctggacgacccccatgaggtggaaaagtcgggtctgctcaacatgaccaagattgcccaaggggggcgcaagctcaggaagaactggggcccgtcttgggtggtgttaacgggtaacagcctggtgttctaccgagagccaccgccgacagcgccctcctcaggctggggaccagcgggtagccggcccgaaagtagcgtggacctgcgcggggcggccctggcgcacggccgccacctgtccagccgccgcaacgtcctgcacatccgcacgatccctggccacgagttcctgctgcagtcggaccacgagacagagctgcgagcctggcaccgcgcgctgcggactgtcatcgagcggctggatcgggagaaccccctggagctgcgtctgtcgggctctggacccgcggagctgagcgccggggaggacgaagaagaggagtcggagctggtgtccaagccgctgctgcgcctcagcagccgccggagctccattcgggggcccgaaggcaccgagcagaaccgcgtgcgcaacaaactaaagcggctcatcgcgaagagaccgcccttacaaagcctgcaggagcggggtctgctccgagaccaggtgttcggctgccagttggaatcactctgccagcgggaaggagacacggtgcccagctttttgcggctctgcattgctgctgtggataaaagaggtctagatgtggatggcatttatcgggtgagcgggaacttggcagtggtccagaagcttcgctttctggtggacagagagcgtgcggtcacctccgatgggaggtatgtgttcccagaacagccaggacaagaaggtcggttagatttggacagtactgagtgggatgacattcatgtggtcaccggagccctgaagctttttctccgggagctgccccagcctctggtgccaccactgctgctgccccatttccgtgctgcccttgggtgatagcacactcagataagaatcgcatgacaccccacaacctgggaattgtgtttggaccaaccctgtttcggccagagcaggagacatctgacccagcagcccatgctctctacccagggcagctggtccagctgatgctcaccaacttcaccagcctcttcccctgatgcagggaaggaagaagagaaaacatatttccggtcatctctggtggtgagaggctggtgttctgttttgaggatatccctttaaatctcccaaatgactgtctctatcttcatgagtgtgacttgaggtgttgggatgggtgagggagcttctctaaagaggaaagtgagtggattaacccctgcttctcttcttgttccctgttatcattcctccccaacataataatacataaagtggcatggtattttttctgatgcagttcctttattatcaggaaacagtgtcattatcaaatttctcctcaaaacgtatacagactatacatagcccccagcccatacctcccat

SEQ ID NO: 3564 - protein, 640 aa, Homosapiens
MLSSRWWPSSWGILGLGPRSPPRGSQLCALYAFTYTGADGQQVSLAEGDRFLLLRKTNSDWWLARRLEAPSTSRPIFVPAAYMIEESIPSQSPTTVIPGQLLWTPGPKLFHGSLEELSQALPSRAQASSEQPPPLPRKMCRSVSTDNLSPSLLKPFQEGPSGRSLSQEDLPSEASASTAGPQPLMSEPPVYCNLVDLRRCPRSPPPGPACPLLQRLDAWEQHLDPNSGRCFYINSLTGCKSWKPPRRSRSETNPGSMEGTQTLKRNNDVLQPQAKGFRSDTGTPEPLDPQGSLSLSQRTSQLDPPALQAPRPLPQLLDDPHEVEKSGLLNMTKIAQGGRKLRKNWGPSWVVLTGNSLVFYREPPPTAPSSGWGPAGSRPESSVDLRGAALAHGRHLSSRRNVLHIRTIPGHEFLLQSDHETELRAWHRALRTVIERLDRENPLELRLSGSGPAELSAGEDEEEESELVSKPLLRLSSRRSSIRGPEGTEQNRVRNKLKRLIAKRPPLQSLQERGLLRDQVFGCQLESLCQREGDTVPSFLRLCIAAVDKRGLDVDGIYRVSGNLAVVQKLRFLVDRERAVTSDGRYVFPEQPGQEGRLDLDSTEWDDIHVVTGALKLFLRELPQPLVPPLLLPHFRAALG

SEQ ID NO: 3565 - DNA, 2481 bp, Homosapiens
ggaaaggggctcctcttcccttctgtagacccttctctgtcttcttttaccttgcaggatgtgagggtggggcacccccttcaacattccccccaccccacaaaaagcctgttcccctttcctgtggccctgaggtgggggtggggtgggggaggcgggaagttggcaacaggaagtgaggagaagagcaaagaaaactgtgagagagagaatttttaaaaagcagctggggcctgaggtttctcccccagtaccctgggtcacctcagcccagagctggcggcaggcccccagcccctcatgtcagagccccctgtgtactgtaacctggtggaccttcgccgctgtcctcggtccccacccccaggccctgcatgccccctgctgcagaggctggatgcctgggagcagcacctggaccccaactctggacgctgcttctacataaattcactgactggctgcaagtcctggaagcccccgcgccgcagtcgcagcgagacgaaccctggctccatggaggggacacagaccctgaagaggaacaatgatgtcctgcaacctcaggcaaagggcttcagatctgacacagggaccccagaaccgcttgacccacagggttcactcagcctcagccaacgcacctcgcagcttgaccctccagccttgcaggcccctcgacctctgccgcagctcctggacgacccccatgtgaatctcccatttctttgtgaaggccaagatcctccctgccccccctccccccttttcctgctccacataaacatcttcctctttctgaatatcctcctacccagccctcccccagcaactttaagggacttcactcctgggagaccccctagggaaagccgtggccactatggagggcgagggtgacttacagatcccattccctccacttcccaggaggtggaaaagtcgggtctgctcaacatgaccaagattgcccaaggggggcgcaagctcaggaagaactggggcccgtcttgggtggtgttaacgggtaacagcctggtgttctaccgagagccaccgccgacagcgccctcctcaggctggggaccagcgggtagccggcccgaaagtagcgtggacctgcgcggggcggccctggcgcacggccgccacctgtccagccgccgcaacgtcctgcacatccgcacgatccctggccacgagttcctgctgcagtcggaccacgagacagagctgcgagcctggcaccgcgcgctgcggactgtcatcgagcggctggttagatgggtggaggcccggagggaggctccgaccggccgggaccaagggagtggggatcgggagaaccccctggagctgcgtctgtcgggctctggacccgcggagctgagcgccggggaggacgaagaagaggagtcggagctggtgtccaagccgctgctgcgcctcagcagccgccggagctccattcgggggcccgaaggcaccgagcagaaccgcgtgcgcaacaaactaaagcggctcatcgcgaagagaccgcccttacaaagcctgcaggagcggggtctgctccgagaccaggtgttcggctgccagttggaatcactctgccagcgggaaggagacacggtgcccagctttttgcggctctgcattgctgctgtggataaaagaggtctagatgtggatggcatttatcgggtgagcgggaacttggcagtggtccagaagcttcgctttctggtggacagagagcgtgcggtcacctccgatgggaggtatgtgttcccagaacagccaggacaagaaggtcggttagatttggacagtactgagtgggatgacattcatgtggtcaccggagccctgaagctttttctccgggagctgccccagcctctggtgccaccactgctgctgccccatttccgtgctgcccttgcactctccgaatcagagcagtgcctctctcagatacaagaattaataggctcaatgccaaagcccaaccatgacactctacggtacctcctggagcatttatgcagggtgatagcacactcagataagaatcgcatgacaccccacaacctgggaattgtgtttggaccaaccctgtttcggccagagcaggagacatctgacccagcagcccatgctctctacccagggcagctggtccagctgatgctcaccaacttcaccagcctcttcccctgatgcagggaaggaagaagagaaaacatatttccggtcatctctggtggtgagaggctggtgttctgttttgaggatatccctttaaatctcccaaatgactgtctctatcttcatgagtgtgacttgaggtgttgggatgggtgagggagcttctctaaagaggaaagtgagtggattaacccctgcttctcttcttgttccctgttatcattcctccccaacataataatacataaagtggcatggtattttttctgatgc

SEQ ID NO: 3566 - protein, 420 aa, Homosapiens; identical to SEQ ID NO: 3560

SEQ ID NO: 3567 - DNA, 2205 bp, Homosapiens
ggaaaggggctcctcttcccttctgtagacccttctctgtcttcttttaccttgcaggatgtgagggtggggcacccccttcaacattccccccaccccacaaaaagcctgttcccctttcctgtggccctgaggtgggggtggggtgggggaggcgggaagttggcaacaggaagtgaggagaagagcaaagaaaactgtgagagagagaatttttaaaaagcagctggggcctgaggtttctcccccagtaccctgggtcacctcagcccagagctggcggcaggcccccagcccctcatgtcagagccccctgtgtactgtaacctggtggaccttcgccgctgtcctcggtccccacccccaggccctgcatgccccctgctgcagaggctggatgcctgggagcagcacctggaccccaactctggacgctgcttctacataaattcactgactggctgcaagtcctggaagcccccgcgccgcagtcgcagcgagacgaaccctggctccatggaggggacacagaccctgaagaggaacaatgatgtcctgcaacctcaggcaaagggcttcagatctgacacagggaccccagaaccgcttgacccacagggttcactcagcctcagccaacgcacctcgcagcttgaccctccagccttgcaggcccctcgacctctgccgcagctcctggacgacccccatgaggtggaaaagtcgggtctgctcaacatgaccaagattgcccaaggggggcgcaagctcaggaagaactggggcccgtcttgggtggtgttaacgggtaacagcctggtgttctaccgagagccaccgccgacagcgccctcctcaggctggggaccagcgggtagccggcccgaaagtagcgtggacctgcgcggggcggccctggcgcacggccgccacctgtccagccgccgcaacgtcctgcacatccgcacgatccctggccacgagttcctgctgcagtcggaccacgagacagagctgcgagcctggcaccgcgcgctgcggactgtcatcgagcggctggatcgggagaaccccctggagctgcgtctgtcgggctctggacccgcggagctgagcgccggggaggacgaagaagaggagtcggagctggtgtccaagccgctgctgcgcctcagcagccgccggagctccattcgggggcccgaaggcaccgagcagaaccgcgtgcgcaacaaactaaagcggctcatcgcgaagagaccgcccttacaaagcctgcaggagcggggtctgctccgagaccaggtgttcggctgccagttggaatcactctgccagcgggaaggagacacggtgcccagctttttgcggctctgcattgctgctgtggataaaagaggtctagatgtggatggcatttatcgggtgagcgggaacttggcagtggtccagaagcttcgctttctggtggacagagagcgtgcggtcacctccgatgggaggtatgtgttcccagaacagccaggacaagaaggtcggttagatttggacagtactgagtgggatgacattcatgtggtcaccggagccctgaagctttttctccgggagctgccccagcctctggtgccaccactgctgctgccccatttccgtgctgcccttgcactctccgaatcagagcagtgcctctctcagatacaagaattaataggctcaatgccaaagcccaaccatgacactctacggtacctcctggagcatttatgcagggtgatagcacactcagataagaatcgcatgacaccccacaacctgggaattgtgtttggaccaaccctgtttcggccagagcaggagacatctgacccagcagcccatgctctctacccagggcagctggtccagctgatgctcaccaacttcaccagcctcttcccctgatgcagggaaggaagaagagaaaacatatttccggtcatctctggtggtgagaggctggtgttctgttttgaggatatccctttaaatctcccaaatgactgtctctatcttcatgagtgtgacttgaggtgttgggatgggtgagggagcttctctaaagaggaaagtgagtggattaacccctgcttctcttcttgttccctgttatcattcctccccaacataataatacataaagtggcatggtattttttctgatgc

SEQ ID NO: 3568 - protein, 547 aa, Homosapiens; identical to SEQ ID NO: 3562

SEQ ID NO: 3569 - DNA, 2596 bp, Homosapiens
ctccctgtttctgtcttgaacctgattctttcttcttatctccttcctgtgtccacctcaagactcccaccactacccaggaccaactcctgctcctgaatcttctgatgggccccacaaggtgacagtgctggctacaatgctatccagccggtggtggccaagttcctgggggatcctagggctgggcccccgaagccctcctcggggatcccagctctgtgccctctatgcctttacttatactggggcagatggccagcaggtgtctctggctgaaggggataggttcctactgcttcgaaagaccaactccgactggtggttggcaagacgcctagaagctccctccacctctcgacccatcttcgtcccagcagcctatatgatagaggaatccatcccttcccagagtccaactaccgtcatccccggccaattgctctggactcctgggccgaagttgtttcatggttccctggaggagttgtctcaggccctcccaagcagggctcaggctagctcggagcagcctcctccacttccccgcaaaatgtgtaggagcgtcagcactgacaatctgagccccagccttctgaagcctttccaggaaggaccaagcggaagatccctctcccaggaagacttgccgtcagaagccagtgccagcacagcaggcccccagcccctcatgtcagagccccctgtgtactgtaacctggtggaccttcgccgctgtcctcggtccccacccccaggccctgcatgccccctgctgcagaggctggatgcctgggagcagcacctggaccccaactctggacgctgcttctacataaattcactgactggctgcaagtcctggaagcccccgcgccgcagtcgcagcgagacgaaccctggctccatggaggggacacagaccctgaagaggaacaatgatgtcctgcaacctcaggcaaagggcttcagatctgacacagggaccccagaaccgcttgacccacagggttcactcagcctcagccaacgcacctcgcagcttgaccctccagccttgcaggcccctcgacctctgccgcagctcctggacgacccccatgaggtggaaaagtcgggtctgctcaacatgaccaagattgcccaaggggggcgcaagctcaggaagaactggggcccgtcttgggtggtgttaacgggtaacagcctggtgttctaccgagagccaccgccgacagcgccctcctcaggctggggaccagcgggtagccggcccgaaagtagcgtggacctgcgcggggcggccctggcgcacggccgccacctgtccagccgccgcaacgtcctgcacatccgcacgatccctggccacgagttcctgctgcagtcggaccacgagacagagctgcgagcctggcaccgcgcgctgcggactgtcatcgagcggctggatcgggagaaccccctggagctgcgtctgtcgggctctggacccgcggagctgagcgccggggaggacgaagaagaggagtcggagctggtgtccaagccgctgctgcgcctcagcagccgccggagctccattcgggggcccgaaggcaccgagcagaaccgcgtgcgcaacaaactaaagcggctcatcgcgaagagaccgcccttacaaagcctgcaggagcggggtctgctccgagaccaggtgttcggctgccagttggaatcactctgccagcgggaaggagacacggtgcccagctttttgcggctctgcattgctgctgtggataaaagaggtctagatgtggatggcatttatcgggtgagcgggaacttggcagtggtccagaagcttcgctttctggtggacagagagcgtgcggtcacctccgatgggaggtatgtgttcccagaacagccaggacaagaaggtcggttagatttggacagtactgagtgggatgacattcatgtggtcaccggagccctgaagctttttctccgggagctgccccagcctctggtgccaccactgctgctgccccatttccgtgctgcccttgcactctccgaatcagagcagtgcctctctcagatacaagaattaataggctcaatgccaaagcccaaccatgacactctacggtacctcctggagcatttatgcagggtgatagcacactcagataagaatcgcatgacaccccacaacctgggaattgtgtttggaccaaccctgtttcggccagagcaggagacatctgacccagcagcccatgctctctacccagggcagctggtccagctgatgctcaccaacttcaccagcctcttcccctgatgcagggaaggaagaagagaaaacatatttccggtcatctctggtggtgagaggctggtgttctgttttgaggatatccctttaaatctcccaaatgactgtctctatcttcatgagtgtgacttgaggtgttgggatgggtgagggagcttctctaaagaggaaagtgagtggattaacccctgcttctcttcttgttccctgttatcattcctccccaacataataatacataaagtggcatggtattttttctgatgc

SEQ ID NO: 3570 - protein, 731 aa, Homosapiens
MLSSRWWPSSWGILGLGPRSPPRGSQLCALYAFTYTGADGQQVSLAEGDRFLLLRKTNSDWWLARRLEAPSTSRPIFVPAAYMIEESIPSQSPTTVIPGQLLWTPGPKLFHGSLEELSQALPSRAQASSEQPPPLPRKMCRSVSTDNLSPSLLKPFQEGPSGRSLSQEDLPSEASASTAGPQPLMSEPPVYCNLVDLRRCPRSPPPGPACPLLQRLDAWEQHLDPNSGRCFYINSLTGCKSWKPPRRSRSETNPGSMEGTQTLKRNNDVLQPQAKGFRSDTGTPEPLDPQGSLSLSQRTSQLDPPALQAPRPLPQLLDDPHEVEKSGLLNMTKIAQGGRKLRKNWGPSWVVLTGNSLVFYREPPPTAPSSGWGPAGSRPESSVDLRGAALAHGRHLSSRRNVLHIRTIPGHEFLLQSDHETELRAWHRALRTVIERLDRENPLELRLSGSGPAELSAGEDEEEESELVSKPLLRLSSRRSSIRGPEGTEQNRVRNKLKRLIAKRPPLQSLQERGLLRDQVFGCQLESLCQREGDTVPSFLRLCIAAVDKRGLDVDGIYRVSGNLAVVQKLRFLVDRERAVTSDGRYVFPEQPGQEGRLDLDSTEWDDIHVVTGALKLFLRELPQPLVPPLLLPHFRAALALSESEQCLSQIQELIGSMPKPNHDTLRYLLEHLCRVIAHSDKNRMTPHNLGIVFGPTLFRPEQETSDPAAHALYPGQLVQLMLTNFTSLFP

SEQ ID NO: 3571 - DNA, 2920 bp, Homosapiens
gctggaagcaacagatggggactgcagaggaggtggtggtattgggatagtgctgcagccaagaacttaacgactgaaagtaactgggatatcttcataattatctgaaggtcacagtgggagaacaaaattaaaagaactgagaagacttacaagagaacctcctaagagtcacccaaacaatcggctgagaatgagaagaggttcaagtgattcttgtgcctcaggctcccaagtagctgggactacagtagctgggccagcacacccagaaagcctcacattgtgcagtggagaagctgagagaagaggaaaagaggagtggccagactcccaccactacccaggaccaactcctgctcctgaatcttctgatgggccccacaaggtgacagtgctggctacaatgctatccagccggtggtggccaagttcctgggggatcctagggctgggcccccgaagccctcctcggggatcccagctctgtgccctctatgcctttacttatactggggcagatggccagcaggtgtctctggctgaaggggataggttcctactgcttcgaaagaccaactccgactggtggttggcaagacgcctagaagctccctccacctctcgacccatcttcgtcccagcagcctatatgatagaggaatccatcccttcccagagtccaactaccgtcatccccggccaattgctctggactcctgggccgaagttgtttcatggttccctggaggagttgtctcaggccctcccaagcagggctcaggctagctcggagcagcctcctccacttccccgcaaaatgtgtaggagcgtcagcactgacaatctgagccccagccttctgaagcctttccaggaaggaccaagcggaagatccctctcccaggaagacttgccgtcagaagccagtgccagcacagcaggcccccagcccctcatgtcagagccccctgtgtactgtaacctggtggaccttcgccgctgtcctcggtccccacccccaggccctgcatgccccctgctgcagaggctggatgcctgggagcagcacctggaccccaactctggacgctgcttctacataaattcactgactggctgcaagtcctggaagcccccgcgccgcagtcgcagcgagacgaaccctggctccatggaggggacacagaccctgaagaggaacaatgatgtcctgcaacctcaggcaaagggcttcagatctgacacagggaccccagaaccgcttgacccacagggttcactcagcctcagccaacgcacctcgcagcttgaccctccagccttgcaggcccctcgacctctgccgcagctcctggacgacccccatgaggtggaaaagtcgggtctgctcaacatgaccaagattgcccaaggggggcgcaagctcaggaagaactggggcccgtcttgggtggtgttaacgggtaacagcctggtgttctaccgagagccaccgccgacagcgccctcctcaggctggggaccagcgggtagccggcccgaaagtagcgtggacctgcgcggggcggccctggcgcacggccgccacctgtccagccgccgcaacgtcctgcacatccgcacgatccctggccacgagttcctgctgcagtcggaccacgagacagagctgcgagcctggcaccgcgcgctgcggactgtcatcgagcggctggttagatgggtggaggcccggagggaggctccgaccggccgggaccaagggagtggggatcgggagaaccccctggagctgcgtctgtcgggctctggacccgcggagctgagcgccggggaggacgaagaagaggagtcggagctggtgtccaagccgctgctgcgcctcagcagccgccggagctccattcgggggcccgaaggcaccgagcagaaccgcgtgcgcaacaaactaaagcggctcatcgcgaagagaccgcccttacaaagcctgcaggagcggggtctgctccgagaccaggtgttcggctgccagttggaatcactctgccagcgggaaggagacacggtgcccagctttttgcggctctgcattgctgctgtggataaaagaggtctagatgtggatggcatttatcgggtgagcgggaacttggcagtggtccagaagcttcgctttctggtggacagagagcgtgcggtcacctccgatgggaggtatgtgttcccagaacagccaggacaagaaggtcggttagatttggacagtactgagtgggatgacattcatgtggtcaccggagccctgaagctttttctccgggagctgccccagcctctggtgccaccactgctgctgccccatttccgtgctgcccttgcactctccgaatcagagcagtgcctctctcagatacaagaattaataggctcaatgccaaagcccaaccatgacactctacggtacctcctggagcatttatgcagggtgatagcacactcagataagaatcgcatgacaccccacaacctgggaattgtgtttggaccaaccctgtttcggccagagcaggagacatctgacccagcagcccatgctctctacccagggcagctggtccagctgatgctcaccaacttcaccagcctcttcccctgatgcagggaaggaagaagagaaaacatatttccggtcatctctggtggtgagaggctggtgttctgttttgaggatatccctttaaatctcccaaatgactgtctctatcttcatgagtgtgacttgaggtgttgggatgggtgagggagcttctctaaagaggaaagtgagtggattaacccctgcttctcttcttgttccctgttatcattcctccccaacataataatacataaagtggcatggtattttttctgatgc

SEQ ID NO: 3572 - protein, 821 aa, Homosapiens
MRRGSSDSCASGSQVAGTTVAGPAHPESLTLCSGEAERRGKEEWPDSHHYPGPTPAPESSDGPHKVTVLATMLSSRWWPSSWGILGLGPRSPPRGSQLCALYAFTYTGADGQQVSLAEGDRFLLLRKTNSDWWLARRLEAPSTSRPIFVPAAYMIEESIPSQSPTTVIPGQLLWTPGPKLFHGSLEELSQALPSRAQASSEQPPPLPRKMCRSVSTDNLSPSLLKPFQEGPSGRSLSQEDLPSEASASTAGPQPLMSEPPVYCNLVDLRRCPRSPPPGPACPLLQRLDAWEQHLDPNSGRCFYINSLTGCKSWKPPRRSRSETNPGSMEGTQTLKRNNDVLQPQAKGFRSDTGTPEPLDPQGSLSLSQRTSQLDPPALQAPRPLPQLLDDPHEVEKSGLLNMTKIAQGGRKLRKNWGPSWVVLTGNSLVFYREPPPTAPSSGWGPAGSRPESSVDLRGAALAHGRHLSSRRNVLHIRTIPGHEFLLQSDHETELRAWHRALRTVIERLVRWVEARREAPTGRDQGSGDRENPLELRLSGSGPAELSAGEDEEEESELVSKPLLRLSSRRSSIRGPEGTEQNRVRNKLKRLIAKRPPLQSLQERGLLRDQVFGCQLESLCQREGDTVPSFLRLCIAAVDKRGLDVDGIYRVSGNLAVVQKLRFLVDRERAVTSDGRYVFPEQPGQEGRLDLDSTEWDDIHVVTGALKLFLRELPQPLVPPLLLPHFRAALALSESEQCLSQIQELIGSMPKPNHDTLRYLLEHLCRVIAHSDKNRMTPHNLGIVFGPTLFRPEQETSDPAAHALYPGQLVQLMLTNFTSLFP

SEQ ID NO: 3573 - DNA, 2574 bp, Homosapiens
acatacttcctcaccagacaccaccaggagttctcagcccccaaaacctgtcaccgatcctcaccaggctgtttgctctaccctctcccccaactcaagggctcccgtcctcacctccctgcaacactgctcctagaaccatgtctgtctacctggagacagccaggcctattcccttctgggtctccagtgtccctttttctcacaggtgacagtgctggctacaatgctatccagccggtggtggccaagttcctgggggatcctagggctgggcccccgaagccctcctcggggatcccagctctgtgccctctatgcctttacttatactggggcagatggccagcaggtgtctctggctgaaggggataggttcctactgcttcgaaagaccaactccgactggtggttggcaagacgcctagaagctccctccacctctcgacccatcttcgtcccagcagcctatatgatagaggaatccatcccttcccagagtccaactaccgtcatccccggccaattgctctggactcctgggccgaagttgtttcatggttccctggaggagttgtctcaggccctcccaagcagggctcaggctagctcggagcagcctcctccacttccccgcaaaatgtgtaggagcgtcagcactgacaatctgagccccagccttctgaagcctttccaggaaggaccaagcggaagatccctctcccaggaagacttgccgtcagaagccagtgccagcacagcaggcccccagcccctcatgtcagagccccctgtgtactgtaacctggtggaccttcgccgctgtcctcggtccccacccccaggccctgcatgccccctgctgcagaggctggatgcctgggagcagcacctggaccccaactctggacgctgcttctacataaattcactgactggctgcaagtcctggaagcccccgcgccgcagtcgcagcgagacgaaccctggctccatggaggggacacagaccctgaagaggaacaatgatgtcctgcaacctcaggcaaagggcttcagatctgacacagggaccccagaaccgcttgacccacagggttcactcagcctcagccaacgcacctcgcagcttgaccctccagccttgcaggcccctcgacctctgccgcagctcctggacgacccccatgaggtggaaaagtcgggtctgctcaacatgaccaagattgcccaaggggggcgcaagctcaggaagaactggggcccgtcttgggtggtgttaacgggtaacagcctggtgttctaccgagagccaccgccgacagcgccctcctcaggctggggaccagcgggtagccggcccgaaagtagcgtggacctgcgcggggcggccctggcgcacggccgccacctgtccagccgccgcaacgtcctgcacatccgcacgatccctggccacgagttcctgctgcagtcggaccacgagacagagctgcgagcctggcaccgcgcgctgcggactgtcatcgagcggctggatcgggagaaccccctggagctgcgtctgtcgggctctggacccgcggagctgagcgccggggaggacgaagaagaggagtcggagctggtgtccaagccgctgctgcgcctcagcagccgccggagctccattcgggggcccgaaggcaccgagcagaaccgcgtgcgcaacaaactaaagcggctcatcgcgaagagaccgcccttacaaagcctgcaggagcggggtctgctccgagaccaggtgttcggctgccagttggaatcactctgccagcgggaaggagacacggtgcccagctttttgcggctctgcattgctgctgtggataaaagaggtctagatgtggatggcatttatcgggtgagcgggaacttggcagtggtccagaagcttcgctttctggtggacagagagcgtgcggtcacctccgatgggaggtatgtgttcccagaacagccaggacaagaaggtcggttagatttggacagtactgagtgggatgacattcatgtggtcaccggagccctgaagctttttctccgggagctgccccagcctctggtgccaccactgctgctgccccatttccgtgctgcccttgggtgatagcacactcagataagaatcgcatgacaccccacaacctgggaattgtgtttggaccaaccctgtttcggccagagcaggagacatctgacccagcagcccatgctctctacccagggcagctggtccagctgatgctcaccaacttcaccagcctcttcccctgatgcagggaaggaagaagagaaaacatatttccggtcatctctggtggtgagaggctggtgttctgttttgaggatatccctttaaatctcccaaatgactgtctctatcttcatgagtgtgacttgaggtgttgggatgggtgagggagcttctctaaagaggaaagtgagtggattaacccctgcttctcttcttgttccctgttatcattcctccccaacataataatacataaagtggcatggtattttttctga

SEQ ID NO: 3574 - protein, 640 aa, Homosapiens; identical to SEQ ID NO: 3564

SEQ ID NO: 3575 - DNA, 105 bp, Homosapiens
gggtgcgggcgctgcctaccgcctcacgccaatgtgggggcggcagcggggagggcggtgcagaggaaagtaaagaatttcctccctcattgtcagggaccagcg

SEQ ID NO: 3576 - protein, 34 aa, Homosapiens
GCGRCLPPHANVGAAAGRAVQRKVKNFLPHCQGP

SEQ ID NO: 3577 - DNA, 1084 bp, Homosapiens
ggaaaggggctcctcttcccttctgtagacccttctctgtcttcttttaccttgcaggatgtgagggtggggcacccccttcaacattccccccaccccacaaaaagcctgttcccctttcctgtggccctgaggtgggggtggggtgggggaggcgggaagttggcaacaggaagtgaggagaagagcaaagaaaactgtgagagagagaatttttaaaaagcagctggggcctgaggtttctcccccagtaccctgggtcacctcagcccagagctggcggcaggcccccagcccctcatgtcagagccccctgtgtactgtaacctggtggaccttcgccgctgtcctcggtccccacccccaggccctgcatgccccctgctgcagaggctggatgcctgggagcagcacctggaccccaactctggacgctgcttctacataaattcactgactggctgcaagtcctggaagcccccgcgccgcagtcgcagcgagacgaaccctggctccatggaggggacacagaccctgaagaggaacaatgatgtcctgcaacctcaggcaaagggcttcagatctgacacagggaccccagaaccgcttgacccacagggttcactcagcctcagccaacgcacctcgcagcttgaccctccagccttgcaggcccctcgacctctgccgcagctcctggacgacccccatgtgaatctcccatttctttgtgaaggccaagatcctccctgccccccctccccccttttcctgctccacataaacatcttcctctttctgaatatcctcctacccagccctcccccagcaactttaagggacttcactcctgggagaccccctagggaaagccgtggccactatggagggcgagggtgacttacagatcccattccctccacttcccaggaggtggaaaagtcgggtctgctcaacatgaccaagattgcccaaggggggcgcaagctcaggaagaactggggcccgtcttgggtggtgttaacgggtaacagcctggtgttctaccgagagccaccgccgacagcgccctcctcaggctggg

SEQ ID NO: 3578 - protein, 199 aa, Homosapiens [sequence omitted]

SEQ ID NO: 3579 - DNA, 913 bp, Homosapiens
gaatttttaaaaagcagctggggcctgaggtttctcccccagtaccctgggtcacctcagcccagagctggcggcaggcccccagcccctcatgtcagagccccctgtgtactgtaacctggtggaccttcgccgctgtcctcggtccccacccccaggccctgcatgccccctgctgcagaggctggatgcctgggagcagcacctggaccccaactctggacgctgcttctacataaattcactgactggctgcaagtcctggaagcccccgcgccgcagtcgcagcgagacgaaccctggctccatggaggggacacagaccctgaagaggaacaatgatgtcctgcaacctcaggcaaagggcttcagatctgacacagggaccccagaaccgcttgacccacaggtgagatccctcccatctcccagtcacatgcagaaaaagccagcttgttatgactttctgttttgtgtaagacattctccattccccaccacaccccccacctctcacccgtatcccacccctcttcctccttcagccagggatccctgagtcgagcgtttccccacctgtttctccaatcctctcccctagggttcactcagcctcagccaacgcacctcgcagcttgaccctccagccttgcaggcccctcgacctctgccgcagctcctggacgacccccatgtgaatctcccatttctttgtgaaggccaagatcctccctgccccccctccccccttttcctgctccacataaacatcttcctctttctgaatatcctcctacccagccctcccccagcaactttaagggacttcactcctgggagaccccctagggaaagccgtggccactatggagggcgagggtgacttacagatcccattccctccacttcccag

SEQ ID NO: 3580 - protein, 155 aa, Homosapiens
MSEPPVYCNLVDLRRCPRSPPPGPACPLLQRLDAWEQHLDPNSGRCFYINSLTGCKSWKPPRRSRSETNPGSMEGTQTLKRNNDVLQPQAKGFRSDTGTPEPLDPQVRSLPSPSHMQKKPACYDFLFCVRHSPFPTTPPTSHPYPTPLPPSARDP

SEQ ID NO: 3581 - DNA, 526 bp, Homosapiens
ggagttgtcagacagaatatctacatgagacctctctagcatggcagctcaaagtggtaggatttcttacatggcagctcaaagctaccagtgtgctagatagcctgcaactgaagctgcaaaacttcttatggcctagcttcaaaaggcccagaacctccatagaattttctgagatcaaatataaagtgcttaaaacagtgcctagctcataagtactattagatattaattattcttaaaataatataaagatgaataagaagcgtccctttctcaataacaggtatgtgcttccttgcataatatatacttattgccaaactcttagccatcttgaatctcaatttttttttttttgagacgaagtcttgctctattgtgcaggctggagttgagccgagatcgcgccactgcagtccagactggggggcagagcaagactccgtctcaaagaaaaaaaaaaaaaagagatgctcttctacccctttgatgagacgtcgagctgtatatgaactcagactgg

SEQ ID NO: 3582 - protein, 35 aa, Homosapiens
MNKKRPFLNNRYVLPCIIYTYCQTLSHLESQFFFF

SEQ ID NO: 3583 - DNA, 4217 bp, Homosapiens
tgttgttgataggatggatatgtacactaacttccactttgtcactaattccgcacatggtaactccgaactctaaaactctgaccgttaagagcttgcatcgagagccactgcgagtagctgctgttatgacatggccatttcattctccacaacaagagaagcagccgcggcttcagtcaccgccctccagcagcgtaagaggataaaagtgcgacttgccctaaaacctaaacgtctcttctggatctccagaaaaaaagtgctgctctaggccgggcgcagtggctcacgcctgtaatcctagcactttggcaggccgaggcgggcggatcatctgaggtgaggacttcgagaccagcctagccaaaatggtcaaagcccgcctctactaaaaatacaaaaattagccgagcgtggtggcacgtgcctgtagtcccagctgcatgggaggctgaggccggagaatcacttgaaccctggaggcagaggttgcagcgagccaagaccgtgccactgcacttcagcccagcgttgcatgatgggagaaatagtctactttccggtagcggtgccagggcagtggcctaatacggaactccatttcccggcgtgcctcgcggaggccgctgaactcagaagcgggaggccggttccggttgcatcagcgagggattcacggcgaaatgagactgttcgtgagtgatggcgtcccgggttgcttgccggtgctggccgccgccgggagagcccggggcagagcagaggtgctcatcagcactgtaggcccggaagattgtgtggtcccgttcctgacccggcctaaggtccctgtcttgcagctggatagcggcaactacctcttctccactagtgcaatctgccgatatttttttttgttatctggctgggagcaagatgacctcactaaccagtggctggaatgggaagcgacagagctgcagccagctttgtctgctgccctgtactatttagtggtccaaggcaagaagggggaagatgttcttggttcagtgcggagagccctgactcacattgaccacagcttgagtcgtcagaactgtcctttcctggctggggagacagaatctctagccgacattgttttgtggggagccctatacccattactgcaagatcccgcctacctccctgaggagctgagtgccctgcacagctggttccagacactgagtacccaggaaccatgtcagcgagctgcagagactgtactgaaacagcaaggtgtcctggctctccggccttacctccaaaagcagccccagcccagccccgctgagggaagggctgtcaccaatgagcctgaggaggaggagctggctaccctatctgaggaggagattgctatggctgttactgcttgggagaagggcctagaaagtttgcccccgctgcggccccagcagaatccagtgttgcctgtggctggagaaaggaatgtgctcatcaccagtgccctcccttacgtcaacaatgtcccccaccttgggaacatcattggttgtgtgctcagtgccgatgtctttgccaggtactctcgcctccgccagtggaacaccctctatctgtgtgggacagatgagtatggtacagcaacagagaccaaggctctggaggagggactaaccccccaggagatctgcgacaagtaccacatcatccatgctgacatctaccgctggtttaacatttcgtttgatatttttggtcgcaccaccactccacagcagaccaaaatcacccaggacattttccagcagttgctgaaacgaggttttgtgctgcaagatactgtggagcaactgcgatgtgagcactgtgctcgcttcctggctgaccgcttcgtggagggcgtgtgtcccttctgtggctatgaggaggctcggggtgaccagtgtgacaagtgtggcaagctcatcaatgctgtcgagcttaagaagcctcagtgtaaagtctgccgatcatgccctgtggtgcagtcgagccagcacctgtttctggacctgcctaagctggagaagcgactggaggagtggttggggaggacattgcctggcagtgactggacacccaatgcccagtttatcacccgttcttggcttcgggatggcctcaagccacgctgcataacccgagacctcaaatggggaacccctgtacccttagaaggttttgaagacaaggtattctatgtctggtttgatgccactattggctatctgtccatcacagccaactacacagaccagtgggagagatggtggaagaacccagagcaaccctaggagctgaggataactataccttggtcagccacctcattgctacagagtacctgaactatgaggatgggaaattctctaagagccgcggtgtgggagtgtttggggacatggcccaggacacggggatccctgctgacatctggcgcttctatctgctgtacattcggcctgagggccaggacagtgctttctcctggacggacctgctgctgaagaataattctgagctgcttaacaacctgggcaacttcatcaacagagctgggatgtttgtgtctaagttctttgggggctatgtgcctgagatggtgctcacccctgatgatcagcgcctgctggcccatgtcaccctggagctccagcactatcaccagctacttgagaaggttcggatccgggatgccttgcgcagtatcctcaccatatctcgacatggcaaccaatatattcaggtgaatgagccctggaagcggattaaaggcagtgaggctgacaggcaacgggcaggaacagtgactggcttggcagtgaatatagctgccttgctctctgtcatgcttcagccttacatgcccacggttagtgccacaatccaggcccagctgcagctcccacctccagcctgcagtatcctgctgacaaacttcctgtgtaccttaccagcaggacaccagattggcacagtcagtcccttgttccaaaaattggaaaatgaccagattgaaagtttaaggcagcgctttggagggggccaggcaaaaacgtccccgaagccagcagttgtagagactgttacaacagccaagccacagcagatacaagcgctgatggatgaagtgacaaaacaaggaaacattgtccgagaactgaaagcacaaaaggcagacaagaacgaggttgctgcggaggtggcgaaactcttggatctaaagaaacagttggctgtagctgaggggaaaccccctgaagcccctaaaggaggtgaaacataggtacccccattttcatctgaagacaggacctcttgcaggtcctcataccaggcttccagctcccagctggacagtgtcccgaaggagaaaggcaatgactcagctgccatctctgcagttggatcagtctggaaaagcacatctgcaggataatggggagtggctggaacaagctccatgtagcaaacagtctatgccacaagttggcaagctggtctgatgcctgtttttgtaggtaaagttgtactggaatacagccacatctgtttatttacatattgtttatggctgctttggtgctacagtggcagagatgaagagtcacgctagagactataggacttttaacatctaaaatatttactgtcctgccgtttaaaatttttggaaaagggtaggttaagtttacctgctttcaggtgtggtgatgtatgaagatacacttccttcttgaacactgtgggcaacaaagagaaatgtcagccatttttggaagggggagaggcaacttacttttctttttctttttttctttctttttttttttttgagaccaagtcttgctctgttgccaggctgaagtgcagtggtgcgatctcggctcactgcaacctctgcctcctcggttcaagtgattcttctgcctcggcctcccgagtagctgggactacaggcgcgtgccaccacgcccagctaatttttgtgtttttagcagagatagggtttcactatgttggccaggatggtctccatctcttaaccttgtgatccatcgcttcccaaagtgctgggattataggcatgagctaccgtgctgggcccttatttttcttttacctccagcctcctactggtccttccttacttctggtcttgtggggtatgcatacttggtccc

SEQ ID NO: 3584 - protein, 546 aa, Homosapiens
MRLFVSDGVPGCLPVLAAAGRARGRAEVLISTVGPEDCVVPFLTRPKVPVLQLDSGNYLFSTSAICRYFFLLSGWEQDDLTNQWLEWEATELQPALSAALYYLVVQGKKGEDVLGSVRRALTHIDHSLSRQNCPFLAGETESLADIVLWGALYPLLQDPAYLPEELSALHSWFQTLSTQEPCQRAAETVLKQQGVLALRPYLQKQPQPSPAEGRAVTNEPEEEELATLSEEEIAMAVTAWEKGLESLPPLRPQQNPVLPVAGERNVLITSALPYVNNVPHLGNIIGCVLSADVFARYSRLRQWNTLYLCGTDEYGTATETKALEEGLTPQEICDKYHIIHADIYRWFNISFDIFGRTTTPQQTKITQDIFQQLLKRGFVLQDTVEQLRCEHCARFLADRFVEGVCPFCGYEEARGDQCDKCGKLINAVELKKPQCKVCRSCPVVQSSQHLFLDLPKLEKRLEEWLGRTLPGSDWTPNAQFITRSWLRDGLKPRCITRDLKWGTPVPLEGFEDKVFYVWFDATIGYLSITANYTDQWERWWKNPEQP

SEQ ID NO: 3585 - DNA, 818 bp, Homosapiens
gtgccagggcagtggcctaatacggaactccatttcccggcgtgcctcgcggaggccgctgaactcagaagcgggaggccggttccggttgcatcagcgagggattcacggcgaaatgagactgttcgtgagtgatggcgtcccgggttgcttgccggtgctggccgccgccgggagagcccggggcagagcagaggtgctcatcagcactgtaggcccggaagattgtgtggtcccgttcctgacccggcctaaggtccctgtcttgcagctggatagcggcaactacctcttctccactagtgcaatctgccgatatttttttttgttatctggctgggagcaagatgacctcactaaccagtggctggaatgggaagcgacagagctgcagccagctttgtctgctgccctgtactatttagtggtccaaggcaagaagggggaagatgttcttggttcagtgcggagagccctgactcacattgaccacagcttgagtcgtcagaactgtcctttcctggctggggagacagaatctctagccgacattgttttgtggggagccctatacccattactgcaagatcccgcctacctccctgaggagctgagtgccctgcacagctggttccagacactgagtacccaggaaccatgtcagcgagctgcagagactgtactgaaacagcaaggtgtcctggctctccggccttacctccaaaagcagccccagcccagccccgctgagggaagggctgtcaccaatgagcctgaggaggaggagctggctaccctatctgaggaggagattgcta

SEQ ID NO: 3586 - protein, 233 aa, Homosapiens
MRLFVSDGVPGCLPVLAAAGRARGRAEVLISTVGPEDCVVPFLTRPKVPVLQLDSGNYLFSTSAICRYFFLLSGWEQDDLTNQWLEWEATELQPALSAALYYLVVQGKKGEDVLGSVRRALTHIDHSLSRQNCPFLAGETESLADIVLWGALYPLLQDPAYLPEELSALHSWFQTLSTQEPCQRAAETVLKQQGVLALRPYLQKQPQPSPAEGRAVTNEPEEEELATLSEEEI

SEQ ID NO: 3587 - DNA, 2890 bp, Homosapiens
gtgccagggcagtggcctaatacggaactccatttcccggcgtgcctcgcggaggccgctgaactcagaagcgggaggccggttccggttgcatcagcgagggattcacggcgaaatgagactgttcgtgagtgatggcgtcccgggttgcttgccggtgctggccgccgccgggagagcccggggcagagcagaggtgctcatcagcactgtaggcccggaagattgtgtggtcccgttcctgacccggcctaaggtccctgtcttgcagctggatagcggcaactacctcttctccactagtgcaatctgccgatatttttttttgttatctggctgggagcaagatgacctcactaaccagtggctggaatgggaagcgacagagctgcagccagctttgtctgctgccctgtactatttagtggtccaaggcaagaagggggaagatgttcttggttcagtgcggagagccctgactcacattgaccacagcttgagtcgtcagaactgtcctttcctggctggggagacagaatctctagccgacattgttttgtggggagccctatacccattactgcaagatcccgcctacctccctgaggagctgagtgccctgcacagctggttccagacactgagtacccaggaaccatgtcagcgagctgcagagactgtactgaaacagcaaggtgtcctggctctccggccttacctccaaaagcagccccagcccagccccgctgagggaagggctgtcaccaatgagcctgaggaggaggagctggctaccctatctgaggaggagattgctatggctgttactgcttgggagaagggcctagaaagtttgcccccgctgcggccccagcagaatccagtgttgcctgtggctggagaaaggaatgtgctcatcaccagtgccctcccttacgtcaacaatgtcccccaccttgggaacatcattggttgtgtgctcagtgccgatgtctttgccaggtactctcgcctccgccagtggaacaccctctatctgtgtgggacagatgagtatggtacagcaacagagaccaaggctctggaggagggactaaccccccaggagatctgcgacaagtaccacatcatccatgctgacatctaccgctggtttaacatttcgtttgatatttttggtcgcaccaccactccacagcagaccaaaatcacccaggacattttccagcagttgctgaaacgaggttttgtgctgcaagatactgtggagcaactgcgatgtgagcactgtgctcgcttcctggctgaccgcttcgtggagggcgtgtgtcccttctgtggctatgaggaggctcggggtgaccagtgtgacaagtgtggcaagctcatcaatgctgtcgagcttaagaagcctcagtgtaaagtctgccgatcatgccctgtggtgcagtcgagccagcacctgtttctggacctgcctaagctggagaagcgactggaggagtggttggggaggacattgcctggcagtgactggacacccaatgcccagtttatcacccgttcttggcttcgggatggcctcaagccacgctgcataacccgagacctcaaatggggaacccctgtacccttagaaggttttgaagacaaggtattctatgtctggtttgatgccactattggctatctgtccatcacagccaactacacagaccagtgggagagatggtggaagaacccagagcaagtggacctgtatcagttcatggccaaagacaatgttcctttccatagcttagtctttccttgctcagccctaggagctgaggataactataccttggtcagccacctcattgctacagagtacctgaactatgaggatgggaaattctctaagagccgcggtgtgggagtgtttggggacatggcccaggacacggggatccctgctgacatctggcgcttctatctgctgtacattcggcctgagggccaggacagtgctttctcctggacggacctgctgctgaagaataattctgagctgcttaacaacctgggcaacttcatcaacagagctgggatgtttgtgtctaagttctttgggggctatgtgcctgagatggtgctcacccctgatgatcagcgcctgctggcccatgtcaccctggagctccagcactatcaccagctacttgagaaggttcggatccgggatgccttgcgcagtatcctcaccatatctcgacatggcaaccaatatattcaggtgaatgagccctggaagcggattaaaggcagtgaggctgacaggcaacgggcaggaacagtgactggcttggcagtgaatatagctgccttgctctctgtcatgcttcagccttacatgcccacggttagtgccacaatccaggcccagctgcagctcccacctccagcctgcagtatcctgctgacaaacttcctgtgtaccttaccagcaggacaccagattggcacagtcagtcccttgttccaaaaattggaaaatgaccagattgaaagtttaaggcagcgctttggagggggccaggcaaaaacgtccccgaagccagcagttgtagagactgttacaacagccaagccacagcagatacaagcgctgatggatgaagtgacaaaacaaggaaacattgtccgagaactgaaagcacaaaaggcagacaagaacgaggttgctgcggaggtggcgaaactcttggatctaaagaaacagttggctgtagctgaggggaaaccccctgaagcccctaaaggcaagaagaaaaagtaaaagaccttggctcatagaaagtcactttaatagatagggacagtaataaataaatgtacaatctctatatac

SEQ ID NO: 3588 - protein, 900 aa, Homosapiens; identical to SEQ ID NO: 492

SEQ ID NO: 3589 - DNA, 3369 bp, Homosapiens
gtgccagggcagtggcctaatacggaactccatttcccggcgtgcctcgcggaggccgctgaactcagaagcgggaggccggttccggttgcatcagcgagggattcacggcgaaatgagactgttcgtgagtgatggcgtcccgggttgcttgccggtgctggccgccgccgggagagcccggggcagagcagaggtgctcatcagcactgtaggcccggaagattgtgtggtcccgttcctgacccggcctaaggtccctgtcttgcagctggatagcggcaactacctcttctccactagtgcaatctgccgatatttttttttgttatctggctgggagcaagatgacctcactaaccagtggctggaatgggaagcgacagagctgcagccagctttgtctgctgccctgtactatttagtggtccaaggcaagaagggggaagatgttcttggttcagtgcggagagccctgactcacattgaccacagcttgagtcgtcagaactgtcctttcctggctggggagacagaatctctagccgacattgttttgtggggagccctatacccattactgcaagatcccgcctacctccctgaggagctgagtgccctgcacagctggttccagacactgagtacccaggaaccatgtcagcgagctgcagagactgtactgaaacagcaaggtgtcctggctctccggccttacctccaaaagcagccccagcccagccccgctgagggaagggctgtcaccaatgagcctgaggaggaggagctggctaccctatctgaggaggagattgctatggctgttactgcttgggagaagggcctagaaagtttgcccccgctgcggccccagcagaatccagtgttgcctgtggctggagaaaggaatgtgctcatcaccagtgccctcccttacgtcaacaatgtcccccaccttgggaacatcattggttgtgtgctcagtgccgatgtctttgccaggtactctcgcctccgccagtggaacaccctctatctgtgtgggacagatgagtatggtacagcaacagagaccaaggctctggaggagggactaaccccccaggagatctgcgacaagtaccacatcatccatgctgacatctaccgctggtttaacatttcgtttgatatttttggtcgcaccaccactccacagcagaccaaaatcacccaggacattttccagcagttgctgaaacgaggttttgtgctgcaagatactgtggagcaactgcgatgtgagcactgtgctcgcttcctggctgaccgcttcgtggagggcgtgtgtcccttctgtggctatgaggaggctcggggtgaccagtgtgacaagtgtggcaagctcatcaatgctgtcgagcttaagaagcctcagtgtaaagtctgccgatcatgccctgtggtgcagtcgagccagcacctgtttctggacctgcctaagctggagaagcgactggaggagtggttggggaggacattgcctggcagtgactggacacccaatgcccagtttatcacccgttcttggcttcgggatggcctcaagccacgctgcataacccgagacctcaaatggggaacccctgtacccttagaaggttttgaagacaaggtattctatgtctggtttgatgccactattggctatctgtccatcacagccaactacacagaccagtgggagagatggtggaagaacccagagcaagtggacctgtatcagttcatggccaaagacaatgttcctttccatagcttagtctttccttgctcagccctaggagctgaggataactataccttggtcagccacctcattgctacagagtacctgaactatgaggatgggaaattctctaagagccgcggtgtgggagtgtttggggacatggcccaggacacggggatccctgctgacatctggcgcttctatctgctgtacattcggcctgagggccaggacagtgctttctcctggacggacctgctgctgaagaataattctgagctgcttaacaacctgggcaacttcatcaacagagctgggatgtttgtgtctaagttctttgggggctatgtgcctgagatggtgctcacccctgatgatcagcgcctgctggcccatgtcaccctggagctccagcactatcaccagctacttgagaaggttcggatccgggatgccttgcgcagtatcctcaccatatctcgacatggcaaccaatatattcaggtgaatgagccctggaagcggattaaaggcagtgaggctgacaggcaacgggcaggaacagtgactggcttggcagtgaatatagctgccttgctctctgtcatgcttcagccttacatgcccacggttagtgccacaatccaggcccagctgcagctcccacctccagcctgcagtatcctgctgacaaacttcctgtgtaccttaccagcaggacaccagattggcacagtcagtcccttgttccaaaaattggaaaatgaccagattgaaagtttaaggcagcgctttggagggggccaggcaaaaacgtccccgaagccagcagttgtagagactgttacaacagccaagccacagcagatacaagcgctgatggatgaagtgacaaaacaaggaaacattgtccgagaactgaaagcacaaaaggcagacaagaacgaggttgctgcggaggtggcgaaactcttggatctaaagaaacagttggctgtagctgaggggaaaccccctgaagcccctaaaggcaagaagaaaaagtaaaagaccttggctcatagaaagtcactttaatagatagggacagtaataaataaatgtacaatctctatatacaagctgagacctttccttttgtctactccaagccttccccctgcgtatgtgggattgagggtcacatcattggcactagtgagagggtagtcagtagccacttctgggaaaggtgggtagtgtggcccaagtgggggactgatgctcccaattgttcatgcttggtgcagattcaccattcggtcaatcagagctcggcgagtcgcctctacttccctggtcaggcgctcgatttcctgcttgagccgttcattctcttcagctagctgtgccactttcctttcattctcctgttctttctccttcatgcgctgctttccagcccgggctggggaatgaccactctgtttccgtttcctggttctcccttggtcttcctcctcttcctcctgagccagggagctctgactggaatctggagagtgagggctctgggaggtgcttgtgacctctgctggttctggctcctcctcagtcag

SEQ ID NO: 3590 - protein, 900 aa, Homosapiens; identical to SEQ ID NO: 492

SEQ ID NO: 3591 - DNA, 577 bp, Homosapiens
agaagcgggaggccggttccggttgcatcagcgagggattcacggcgaaatgagactgttcgtgagtgatggcgtcccgggttgcttgccggtgctggccgccgccgggagagcccggggcagagcagaggtgctcatcagcactgtaggcccggaagattgtgtggtcccgttcctgacccggcctaaggtccctgtcttgcagctggatagcggcaactacctcttctccactagtgcaatctgccgatatttttttttgttatctggctgggagcaagatgacctcactaaccagtggctggaatgggaagcgacagagctgcagccagctttgtctgctgccctgtactatttagtggtccaaggcaagaagggggaagatgttcttggttcagtgcggagagccctgactcacattgaccacagcttgagtcgtcagaactgtcctttcctggctggggagacagaatctctagccgacattgttttgtggggagccctatacccattactgcaagatcccgcctacctccctggtgagaactgtgcatatcactccaaccctaggagcttg

SEQ ID NO: 3592 - protein, 175 aa, Homosapiens
MRLFVSDGVPGCLPVLAAAGRARGRAEVLISTVGPEDCVVPFLTRPKVPVLQLDSGNYLFSTSAICRYFFLLSGWEQDDLTNQWLEWEATELQPALSAALYYLVVQGKKGEDVLGSVRRALTHIDHSLSRQNCPFLAGETESLADIVLWGALYPLLQDPAYLPGENCAYHSNPRS

SEQ ID NO: 3593 - DNA, 2703 bp, Homosapiens
agcgagggattcacggcgaaatgagactgttcgtgagtgatggcgtcccgggttgcttgccggtgctggccgccgccgggagagcccggggcagagcagaggtgctcatcagcactgtaggcccggaagattgtgtggtcccgttcctgacccggcctaaggtccctgtcttgcagctggatagcggcaactacctcttctccactagtgcaatctgccggtcagtattggtccttggtgtagggaggtggctgaatcaaatcaggcctcactgtcatttgtgtggctttatttgcagccattgtttccctgtgtgatgagaaatgggctaaatgggcccctctaagtccatcatctgttgctctctctctgggcagatatttttttttgttatctggctgggagcaagatgacctcaccctgactcacattgaccacagcttgagtcgtcagaactgtcctttcctggctggggagacagaatctctagccgacattgttttgtggggagccctatacccattactgcaagatcccgcctacctccctgaggagctgagtgccctgcacagctggttccagacactgagtacccaggaaccatgtcagcgagctgcagagactgtactgaaacagcaaggtgtcctggctctccggccttacctccaaaagcagccccagcccagccccgctgagggaagggctgtcaccaatgagcctgaggaggaggagctggctaccctatctgaggaggagattgctatctgctgtacattcggcctgagggccaggacagtgctttctcctggacggacctgctgctgaagaataattctgagctgcttaacaacctgggcaacttcatcaacagagctgggatgtttgtgtctaagttctttgggggctatgtgcctgagatggtgctcacccctgatgatcagcgcctgctggcccatgtcaccctggagctccagcactatcaccagctacttgagaaggttcggatccgggatgccttgcgcagtatcctcaccatatctcgacatggcaaccaatatattcaggtgaatgagccctggaagcggattaaaggcagtgaggctgacaggtaggtaagcggggagggttggctaaaggcataaagtggcttgtaagctgtatcctcctggaggtcttgactaatgtctcctcttcctcaggcaacgggcaggaacagtgactggcttggcagtgaatatagctgccttgctctctgtcatgcttcagccttacatgcccacggttagtgccacaatccaggcccagctgcagctcccacctccagcctgcagtatcctgctgacaaacttcctgtgtaccttaccagcaggacaccagattggcacagtaggtggaagagccagcctctcttaaaattgatactcttgccatgcagcttttggagtgggtgagagaagacctaacatctctccagtgttactttggtcatgggactcctaagtttctgatataaagtccttggtagtcgttcacaagtccggaattatctgtacatcttcattgttcttcatgccagaaaccagaacctggcacacaaaactaactggtaaacagatatttgaagaaacactgtgatcacctagtctccataatgctagcagatagtgggcagggaaaatacaggaaagccatttcctctttgacacaaaatgaaaaagtaagtacattgctaaacttctggatcagcctagcatccttagagagcttaaagaatctttgaccctacaaattatttggggtttcacagggaaagctacagctaatttcctaaaatcagcagatattagctcagtgttaagctcgttctttctaaaacacatcagagattggggttggagaggtcatctgtatagtctatggtagagtctgtatccaatcagtagatgattctggaactctttttttacaggtcagtcccttgttccaaaaattggaaaatgaccagattgaaagtttaaggcagcgctttggagggggccaggtgagaaagctaaaggctgtgccctcgctccacaacagccacagcatcacttccctaatttccctaagtagtcctcacccatcactctttccatcttttggccctgccgcttcctcacttacagtttttctttcctgtcttaactagaagagaccttcgacttaaaggtaaccactttccctctgagatgctgtataaaactggaggttaggggatatttatggttgctggtgataactttgttgttctccaggcaaaaacgtccccgaagccagcagttgtagagactgttacaacagccaagccacagcagatacaagcgctgatggatgaagtgacaaaacaagtatgaagcttaagccctgtgggagactggacaagctgaatcctaaatagatctttttcttgcctcactgttacctccccacccccctttatcttagggaaacattgtccgagaactgaaagcacaaaaggcagacaagaacgaggttgctgcggaggtggcgaaactcttggatctaaagaaacagttggctgtagctgaggggaaaccccctgaagcccctaaaggcaagaagaaaaagtaaaagaccttggctcatagaaagtcactttaatagatagggacagtaataaataaatgtacaatctctatatac

SEQ ID NO: 3594 - protein, 98 aa, Homosapiens
MRLFVSDGVPGCLPVLAAAGRARGRAEVLISTVGPEDCVVPFLTRPKVPVLQLDSGNYLFSTSAICRSVLVLGVGRWLNQIRPHCHLCGFICSHCFPV

SEQ ID NO: 3595 - DNA, 3182 bp, Homosapiens
agcgagggattcacggcgaaatgagactgttcgtgagtgatggcgtcccgggttgcttgccggtgctggccgccgccgggagagcccggggcagagcagaggtgctcatcagcactgtaggcccggaagattgtgtggtcccgttcctgacccggcctaaggtccctgtcttgcagctggatagcggcaactacctcttctccactagtgcaatctgccggtcagtattggtccttggtgtagggaggtggctgaatcaaatcaggcctcactgtcatttgtgtggctttatttgcagccattgtttccctgtgtgatgagaaatgggctaaatgggcccctctaagtccatcatctgttgctctctctctgggcagatatttttttttgttatctggctgggagcaagatgacctcaccctgactcacattgaccacagcttgagtcgtcagaactgtcctttcctggctggggagacagaatctctagccgacattgttttgtggggagccctatacccattactgcaagatcccgcctacctccctgaggagctgagtgccctgcacagctggttccagacactgagtacccaggaaccatgtcagcgagctgcagagactgtactgaaacagcaaggtgtcctggctctccggccttacctccaaaagcagccccagcccagccccgctgagggaagggctgtcaccaatgagcctgaggaggaggagctggctaccctatctgaggaggagattgctatctgctgtacattcggcctgagggccaggacagtgctttctcctggacggacctgctgctgaagaataattctgagctgcttaacaacctgggcaacttcatcaacagagctgggatgtttgtgtctaagttctttgggggctatgtgcctgagatggtgctcacccctgatgatcagcgcctgctggcccatgtcaccctggagctccagcactatcaccagctacttgagaaggttcggatccgggatgccttgcgcagtatcctcaccatatctcgacatggcaaccaatatattcaggtgaatgagccctggaagcggattaaaggcagtgaggctgacaggtaggtaagcggggagggttggctaaaggcataaagtggcttgtaagctgtatcctcctggaggtcttgactaatgtctcctcttcctcaggcaacgggcaggaacagtgactggcttggcagtgaatatagctgccttgctctctgtcatgcttcagccttacatgcccacggttagtgccacaatccaggcccagctgcagctcccacctccagcctgcagtatcctgctgacaaacttcctgtgtaccttaccagcaggacaccagattggcacagtaggtggaagagccagcctctcttaaaattgatactcttgccatgcagcttttggagtgggtgagagaagacctaacatctctccagtgttactttggtcatgggactcctaagtttctgatataaagtccttggtagtcgttcacaagtccggaattatctgtacatcttcattgttcttcatgccagaaaccagaacctggcacacaaaactaactggtaaacagatatttgaagaaacactgtgatcacctagtctccataatgctagcagatagtgggcagggaaaatacaggaaagccatttcctctttgacacaaaatgaaaaagtaagtacattgctaaacttctggatcagcctagcatccttagagagcttaaagaatctttgaccctacaaattatttggggtttcacagggaaagctacagctaatttcctaaaatcagcagatattagctcagtgttaagctcgttctttctaaaacacatcagagattggggttggagaggtcatctgtatagtctatggtagagtctgtatccaatcagtagatgattctggaactctttttttacaggtcagtcccttgttccaaaaattggaaaatgaccagattgaaagtttaaggcagcgctttggagggggccaggtgagaaagctaaaggctgtgccctcgctccacaacagccacagcatcacttccctaatttccctaagtagtcctcacccatcactctttccatcttttggccctgccgcttcctcacttacagtttttctttcctgtcttaactagaagagaccttcgacttaaaggtaaccactttccctctgagatgctgtataaaactggaggttaggggatatttatggttgctggtgataactttgttgttctccaggcaaaaacgtccccgaagccagcagttgtagagactgttacaacagccaagccacagcagatacaagcgctgatggatgaagtgacaaaacaagtatgaagcttaagccctgtgggagactggacaagctgaatcctaaatagatctttttcttgcctcactgttacctccccacccccctttatcttagggaaacattgtccgagaactgaaagcacaaaaggcagacaagaacgaggttgctgcggaggtggcgaaactcttggatctaaagaaacagttggctgtagctgaggggaaaccccctgaagcccctaaaggcaagaagaaaaagtaaaagaccttggctcatagaaagtcactttaatagatagggacagtaataaataaatgtacaatctctatatacaagctgagacctttccttttgtctactccaagccttccccctgcgtatgtgggattgagggtcacatcattggcactagtgagagggtagtcagtagccacttctgggaaaggtgggtagtgtggcccaagtgggggactgatgctcccaattgttcatgcttggtgcagattcaccattcggtcaatcagagctcggcgagtcgcctctacttccctggtcaggcgctcgatttcctgcttgagccgttcattctcttcagctagctgtgccactttcctttcattctcctgttctttctccttcatgcgctgctttccagcccgggctggggaatgaccactctgtttccgtttcctggttctcccttggtcttcctcctcttcctcctgagccagggagctctgactggaatctggagagtgagggctctgggaggtgcttgtgacctctgctggttctggctcctcctcagtcag

SEQ ID NO: 3596 - protein, 98 aa, Homosapiens; identical to SEQ ID NO: 3594

SEQ ID NO: 3597 - DNA, 2198 bp, Homosapiens
ccggccaatactaagcactttcaaggctcatatagaataggaagtactgccgtggctcatgcctgaaatcccagcactttgggaggttgaggcgggaggatcacttgagcccaggagttcgagaccagtcctgtcaacatagactgcatctctacaaaaaaaatttaaaaattatccaggcacggtgatgcctgcctgaagttccagctacctgggaggctgagatggaaggatcattttgagcccaggagttcaagattacagtgtgctgtgttgtgccactgccctcctgcctaggtgacagagggagaccctgtctccaaaaaaaaaaaaaaagggagataacctttctcaggcatgtatacaggcaaatacatttaaatgcataagtggaggaggagacagttggcattgaagatcctatgggcagactaagctgtgttgggctagagtgcttgccttcctttgatctcctttgacactttgcacctcttcattacactgatcccagtcagcagttacataatagaatgtaatacccttgggagcagaacctagggcatatttgcctctatacttgccacagcagtaagcacactcattctgagagataagtgacagggtaacacaaaaggagcactactcaatatggtacaaagtggttagggggttgggatacaaaaaagactgtgtgggaagatggccatcagtgaaggaaggttttcttggaggaggtgatttctaagctggatttcagagaaagttacgatattcagttatggagagaaagggtgatggatgcacaagaaattagtgagatgcgttttatggaaataagctgtaaatgttctaggaagtagttgggccatctattgggatatatagcagcagctgggaagaagggttgaggttaatgtgagggaatcggggaggcagtgactgtaggctaagaatggttggaaagatgataggagccttagtgtagtgtcagtgctaaagaggggatgttgatacaggatgtgtacagctcagatgtcaaggatgatgaaacttgaaaaggaatactgcattgagtgccttcagacagcaggttgaatggcatgaccagcaacgatctagaaaagtgggaaggagagggtgacggtgaaggcaaaactggtgcctgctggtttgagttaggccatgaggaagtgacagacatgggttagagagtcggtacaaaaggacttgttacgggtcgtatctaggctggtgagctctttggatttcagatagtggctagagattatagtaacatagcacctggaaagaaggggagaagccagcgctgggaaagtgttcttgggagtggtgagagggtaatgattggacagatgtcccgaaggagaaaggcaatgactcagctgccatctctgcagttggatcagtctggaaaagcacatctgcaggataatggggagtggctggaacaagctccatgtagcaaacagtctatgccacaagttggcaagctggtctgatgcctgtttttgtaggtaaagttgtactggaatacagccacatctgtttatttacatattgtttatggctgctttggtgctacagtggcagagatgaagagtcacgctagagactataggacttttaacatctaaaatatttactgtcctgccgtttaaaatttttggaaaagggtaggttaagtttacctgctttcaggtgtggtgatgtatgaagatacacttccttcttgaacactgtgggcaacaaagagaaatgtcagccatttttggaagggggagaggcaacttacttttctttttctttttttctttctttttttttttttgagaccaagtcttgctctgttgccaggctgaagtgcagtggtgcgatctcggctcactgcaacctctgcctcctcggttcaagtgattcttctgcctcggcctcccgagtagctgggactacaggcgcgtgccaccacgcccagctaatttttgtgtttttagcagagatagggtttcactatgttggccaggatggtctccatctcttaaccttgtgatccatcgcttcccaaagtgctgggattataggcatgagctaccgtgctgggcccttatttttcttttacctccagcctcctactggtccttccttacttctggtcttgtggggtatgcatacttggtccc

SEQ ID NO: 3598 - protein, 52 aa, Homosapiens
MIGQMSRRRKAMTQLPSLQLDQSGKAHLQDNGEWLEQAPCSKQSMPQVGKLV

SEQ ID NO: 3599 - DNA, 900 bp, Homosapiens
tatgaggatgggaaattctctaagagccgcggtgtgggagtgtttggggacatggcccaggacacggggatccctgctgacatctggcgcttctatctgctgtacattcggcctgagggccaggacagtgctttctcctggacggacctgctgctgaagaataattctgagctgcttaacaacctgggcaacttcatcaacagagctgggatgtttgtgtctaagttctttgggggctatgtgcctgagatggtgctcacccctgatgatcagcgcctgctggcccatgtcaccctggagctccagcactatcaccagctacttgagaaggttcggatccgggatgccttgcgcagtatcctcaccatatctcgacatggcaaccaatatattcagccttacatgcccacggttagtgccacaatccaggcccagctgcagctcccacctccagcctgcagtatcctgctgacaaacttcctgtgtaccttaccagcaggacaccagattggcacagtcagtcccttgttccaaaaattggaaaatgaccagattgaaagtttaaggcagcgctttggagggggccaggcaaaaacgtccccgaagccagcagttgtagagactgttacaacagccaagccacagcagatacaagcgctgatggatgaagtgacaaaacaaggaaacattgtccgagaactgaaagcacaaaaggcagacaagaacgaggttgctgcggaggtggcgaaactcttggatctaaagaaacagttggctgtagctgaggggaaaccccctgaagcccctaaaggcaagaagaaaaagtaaaagaccttggctcatagaaagtcactttaatagatagggacagtaataaataaatgtacaatctctatatac

SEQ ID NO: 3600 - protein, 258 aa, Homosapiens
MAQDTGIPADIWRFYLLYIRPEGQDSAFSWTDLLLKNNSELLNNLGNFINRAGMFVSKFFGGYVPEMVLTPDDQRLLAHVTLELQHYHQLLEKVRIRDALRSILTISRHGNQYIQPYMPTVSATIQAQLQLPPPACSILLTNFLCTLPAGHQIGTVSPLFQKLENDQIESLRQRFGGGQAKTSPKPAVVETVTTAKPQQIQALMDEVTKQGNIVRELKAQKADKNEVAAEVAKLLDLKKQLAVAEGKPPEAPKGKKKK

SEQ ID NO: 3601 - DNA, 985 bp, Homosapiens
ctcgacatggcaaccaatatattcaggtgaatgagccctggaagcggattaaaggcagtgaggctgacaggtaggtaagcggggagggttggctaaaggcataaagtggcttgtaagctgtatcctcctggaggtcttgactaatgtctcctcttcctcaggcaacgggcaggaacagtgactggcttggcagtgaatatagctgccttgctctctgtcatgcttcagccttacatgcccacggttagtgccacaatccaggcccagctgcagctcccacctccagcctgcagtatcctgctgacaaacttcctgtgtaccttaccagcaggacaccagattggcacagtcagtcccttgttccaaaaattggaaaatgaccagattgaaagtttaaggcagcgctttggagggggccaggtgagaaagctaaaggctgtgccctcgctccacaacagccacagcatcacttccctaatttccctaagtagtcctcacccatcactctttccatcttttggccctgccgcttcctcacttacagtttttctttcctgtcttaactagaagagaccttcgacttaaaggtaaccactttccctctgagatgctgtataaaactggaggttaggggatatttatggttgctggtgataactttgttgttctccaggcaaaaacgtccccgaagccagcagttgtagagactgttacaacagccaagccacagcagatacaagcgctgatggatgaagtgacaaaacaaggaaacattgtccgagaactgaaagcacaaaaggcagacaagaacgaggttgctgcggaggtggcgaaactcttggatctaaagaaacagttggctgtagctgaggggaaaccccctgaagcccctaaaggcaagaagaaaaagtaaaagaccttggctcatagaaagtcactttaatagatagggacagtaataaataaatgtacaatctctatatac

SEQ ID NO: 3602 - protein, 115 aa, Homosapiens
MLQPYMPTVSATIQAQLQLPPPACSILLTNFLCTLPAGHQIGTVSPLFQKLENDQIESLRQRFGGGQVRKLKAVPSLHNSHSITSLISLSSPHPSLFPSFGPAASSLTVFLSCLN

SEQ ID NO: 3603 - DNA, 1464 bp, Homosapiens
ctcgacatggcaaccaatatattcaggtgaatgagccctggaagcggattaaaggcagtgaggctgacaggtaggtaagcggggagggttggctaaaggcataaagtggcttgtaagctgtatcctcctggaggtcttgactaatgtctcctcttcctcaggcaacgggcaggaacagtgactggcttggcagtgaatatagctgccttgctctctgtcatgcttcagccttacatgcccacggttagtgccacaatccaggcccagctgcagctcccacctccagcctgcagtatcctgctgacaaacttcctgtgtaccttaccagcaggacaccagattggcacagtcagtcccttgttccaaaaattggaaaatgaccagattgaaagtttaaggcagcgctttggagggggccaggtgagaaagctaaaggctgtgccctcgctccacaacagccacagcatcacttccctaatttccctaagtagtcctcacccatcactctttccatcttttggccctgccgcttcctcacttacagtttttctttcctgtcttaactagaagagaccttcgacttaaaggtaaccactttccctctgagatgctgtataaaactggaggttaggggatatttatggttgctggtgataactttgttgttctccaggcaaaaacgtccccgaagccagcagttgtagagactgttacaacagccaagccacagcagatacaagcgctgatggatgaagtgacaaaacaaggaaacattgtccgagaactgaaagcacaaaaggcagacaagaacgaggttgctgcggaggtggcgaaactcttggatctaaagaaacagttggctgtagctgaggggaaaccccctgaagcccctaaaggcaagaagaaaaagtaaaagaccttggctcatagaaagtcactttaatagatagggacagtaataaataaatgtacaatctctatatacaagctgagacctttccttttgtctactccaagccttccccctgcgtatgtgggattgagggtcacatcattggcactagtgagagggtagtcagtagccacttctgggaaaggtgggtagtgtggcccaagtgggggactgatgctcccaattgttcatgcttggtgcagattcaccattcggtcaatcagagctcggcgagtcgcctctacttccctggtcaggcgctcgatttcctgcttgagccgttcattctcttcagctagctgtgccactttcctttcattctcctgttctttctccttcatgcgctgctttccagcccgggctggggaatgaccactctgtttccgtttcctggttctcccttggtcttcctcctcttcctcctgagccagggagctctgactggaatctggagagtgagggctctgggaggtgcttgtgacctctgctggttctggctcctcctcagtcag

SEQ ID NO: 3604 - protein, 115 aa, Homosapiens; identical to SEQ ID NO: 3602

SEQ ID NO: 3605 - DNA, 1326 bp, Homosapiens
cttacatgcccacggttagtgccacaatccaggcccagctgcagctcccacctccagcctgcagtatcctgctgacaaacttcctgtgtaccttaccagcaggacaccagattggcacagtcagtcccttgttccaaaaattggaaaatgaccagattgaaagtttaaggcagcgctttggagggggccaggcaaaaacgtccccgaagccagcagttgtagagactgttacaacagccaagccacagcagatacaagcgctgatggatgaagtgacaaaacaaggaaacattgtccgagaactgaaagcacaaaaggcagacaagaacgaggttgctgcggaggtggcgaaactcttggatctaaagaaacagttggctgtagctgaggggaaaccccctgaagcccctaaaggaggtgaaacataggtacccccattttcatctgaagacaggacctcttgcaggtcctcataccaggcttccagctcccagctggacagtgtcccgaaggagaaaggcaatgactcagctgccatctctgcagttggatcagtctggaaaagcacatctgcaggataatggggagtggctggaacaagctccatgtagcaaacagtctatgccacaagttggcaagctggtctgatgcctgtttttgtaggtaaagttgtactggaatacagccacatctgtttatttacatattgtttatggctgctttggtgctacagtggcagagatgaagagtcacgctagagactataggacttttaacatctaaaatatttactgtcctgccgtttaaaatttttggaaaagggtaggttaagtttacctgctttcaggtgtggtgatgtatgaagatacacttccttcttgaacactgtgggcaacaaagagaaatgtcagccatttttggaagggggagaggcaacttacttttctttttctttttttctttctttttttttttttgagaccaagtcttgctctgttgccaggctgaagtgcagtggtgcgatctcggctcactgcaacctctgcctcctcggttcaagtgattcttctgcctcggcctcccgagtagctgggactacaggcgcgtgccaccacgcccagctaatttttgtgtttttagcagagatagggtttcactatgttggccaggatggtctccatctcttaaccttgtgatccatcgcttcccaaagtgctgggattataggcatgagctaccgtgctgggcccttatttttcttttacctccagcctcctactggtccttccttacttctggtcttgtggggtatgcatacttggtccc

SEQ ID NO: 3606 - protein, 140 aa, Homosapiens
MPTVSATIQAQLQLPPPACSILLTNFLCTLPAGHQIGTVSPLFQKLENDQIESLRQRFGGGQAKTSPKPAVVETVTTAKPQQIQALMDEVTKQGNIVRELKAQKADKNEVAAEVAKLLDLKKQLAVAEGKPPEAPKGGET

SEQ ID NO: 3607 - DNA, 981 bp, Homosapiens
ttacatgcccacggttagtgccacaatccaggcccagctgcagctcccacctccagcctgcagtatcctgctgacaaacttcctgtgtaccttaccagcaggacaccagattggcacagtcagtcccttgttccaaaaattggaaaatgaccagattgaaagtttaaggcagcgctttggagggggccaggcaaaaacgtccccgaagccagcagttgtagagactgttacaacagccaagccacagcagatacaagcgctgatggatgaagtgacaaaacaaggaaacattgtccgagaactgaaagcacaaaaggcagacaagaacgaggttgctgcggaggtggcgaaactcttggatctaaagaaacagttggctgtagctgaggggaaaccccctgaagcccctaaaggcaagaagaaaaagtaaaagaccttggctcatagaaagtcactttaatagatagggacagtaataaataaatgtacaatctctatatacaagctgagacctttccttttgtctactccaagccttccccctgcgtatgtgggattgagggtcacatcattggcactagtgagagggtagtcagtagccacttctgggaaaggtgggtagtgtggcccaagtgggggactgatgctcccaattgttcatgcttggtgcagattcaccattcggtcaatcagagctcggcgagtcgcctctacttccctggtcaggcgctcgatttcctgcttgagccgttcattctcttcagctagctgtgccactttcctttcattctcctgttctttctccttcatgcgctgctttccagcccgggctggggaatgaccactctgtttccgtttcctggttctcccttggtcttcctcctcttcctcctgagccagggagctctgactggaatctggagagtgagggctctgggaggtgcttgtgacctctgctggttctggctcctcctcagtcag

SEQ ID NO: 3608 - protein, 141 aa, Homosapiens [sequence omitted]

SEQ ID NO: 3609 - DNA, 1208 bp, Homosapiens
gccagcctctcttaaaattgatactcttgccatgcagcttttggagtgggtgagagaagacctaacatctctccagtgttactttggtcatgggactcctaagtttctgatataaagtccttggtagtcgttcacaagtccggaattatctgtacatcttcattgttcttcatgccagaaaccagaacctggcacacaaaactaactggtaaacagatatttgaagaaacactgtgatcacctagtctccataatgctagcagatagtgggcagggaaaatacaggaaagccatttcctctttgacacaaaatgaaaaagtaagtacattgctaaacttctggatcagcctagcatccttagagagcttaaagaatctttgaccctacaaattatttggggtttcacagggaaagctacagctaatttcctaaaatcagcagatattagctcagtgttaagctcgttctttctaaaacacatcagagattggggttggagaggtcatctgtatagtctatggtagagtctgtatccaatcagtagatgattctggaactctttttttacaggtcagtcccttgttccaaaaattggaaaatgaccagattgaaagtttaaggcagcgctttggagggggccaggtgagaaagctaaaggctgtgccctcgctccacaacagccacagcatcacttccctaatttccctaagtagtcctcacccatcactctttccatcttttggccctgccgcttcctcacttacagtttttctttcctgtcttaactagaagagaccttcgacttaaaggtaaccactttccctctgagatgctgtataaaactggaggttaggggatatttatggttgctggtgataactttgttgttctccaggcaaaaacgtccccgaagccagcagttgtagagactgttacaacagccaagccacagcagatacaagcgctgatggatgaagtgacaaaacaaggaaacattgtccgagaactgaaagcacaaaaggcagacaagaacgaggttgctgcggaggtggcgaaactcttggatctaaagaaacagttggctgtagctgaggggaaaccccctgaagcccctaaaggcaagaagaaaaagtaaaagaccttggctcatagaaagtcactttaatagatagggacagtaataaataaatgtacaatctctatatac

SEQ ID NO: 3610 - protein, 90 aa, Homosapiens [sequence omitted]

SEQ ID NO: 3611 - DNA, 1687 bp, Homosapiens
gccagcctctcttaaaattgatactcttgccatgcagcttttggagtgggtgagagaagacctaacatctctccagtgttactttggtcatgggactcctaagtttctgatataaagtccttggtagtcgttcacaagtccggaattatctgtacatcttcattgttcttcatgccagaaaccagaacctggcacacaaaactaactggtaaacagatatttgaagaaacactgtgatcacctagtctccataatgctagcagatagtgggcagggaaaatacaggaaagccatttcctctttgacacaaaatgaaaaagtaagtacattgctaaacttctggatcagcctagcatccttagagagcttaaagaatctttgaccctacaaattatttggggtttcacagggaaagctacagctaatttcctaaaatcagcagatattagctcagtgttaagctcgttctttctaaaacacatcagagattggggttggagaggtcatctgtatagtctatggtagagtctgtatccaatcagtagatgattctggaactctttttttacaggtcagtcccttgttccaaaaattggaaaatgaccagattgaaagtttaaggcagcgctttggagggggccaggtgagaaagctaaaggctgtgccctcgctccacaacagccacagcatcacttccctaatttccctaagtagtcctcacccatcactctttccatcttttggccctgccgcttcctcacttacagtttttctttcctgtcttaactagaagagaccttcgacttaaaggtaaccactttccctctgagatgctgtataaaactggaggttaggggatatttatggttgctggtgataactttgttgttctccaggcaaaaacgtccccgaagccagcagttgtagagactgttacaacagccaagccacagcagatacaagcgctgatggatgaagtgacaaaacaaggaaacattgtccgagaactgaaagcacaaaaggcagacaagaacgaggttgctgcggaggtggcgaaactcttggatctaaagaaacagttggctgtagctgaggggaaaccccctgaagcccctaaaggcaagaagaaaaagtaaaagaccttggctcatagaaagtcactttaatagatagggacagtaataaataaatgtacaatctctatatacaagctgagacctttccttttgtctactccaagccttccccctgcgtatgtgggattgagggtcacatcattggcactagtgagagggtagtcagtagccacttctgggaaaggtgggtagtgtggcccaagtgggggactgatgctcccaattgttcatgcttggtgcagattcaccattcggtcaatcagagctcggcgagtcgcctctacttccctggtcaggcgctcgatttcctgcttgagccgttcattctcttcagctagctgtgccactttcctttcattctcctgttctttctccttcatgcgctgctttccagcccgggctggggaatgaccactctgtttccgtttcctggttctcccttggtcttcctcctcttcctcctgagccagggagctctgactggaatctggagagtgagggctctgggaggtgcttgtgacctctgctggttctggctcctcctcagtcag

SEQ ID NO: 3612 - protein, 90 aa, Homosapiens [sequence omitted]

SEQ ID NO: 3613 - DNA, 1479 bp, Homosapiens
agagacttaagtctaaggcactgagcgtatcatgttaaagatgagcgggtggcagcgacagagccaaaatcagagctggaacctgaggagagagtgttcaagaaggaagtgtatcttcatacatcaccacacctgaaagcaggtaaacttaacctacccttttccaaaaattttaaacggcaggacagtaaatattttagatgttaaaagtcctatagtctctagcgtgactcttcatctctgccactgtagcaccaaagcagccataaacaatatgtaaataaacagatgtggctgtattccagtacaactttacctacaaaaacaggcatcagaccagcttgccaacttgtggcatagactgtttgctacatggagcttgttccagccactccccattatcctgcagatgtgcttttccagactgatccaactgcagagatggcagctgagtcattgcctttctccttcgggacactgtccagctgggagctggaagcctggtatgaggacctgcaagaggtcctgtcttcagatgaaaatgggggtacctatgtttcacctcctggaaatgaagaggaagaatcaaaaatcttcaccactcttgaccctgcttctctggcttggctgactgaggaggagccagaaccagcagaggtcacaagcacctcccagagccctcactctccagattccagtcagagctccctggctcaggaggaagaggaggaagaccaagggagaaccaggaaacggaaacagagtggtcattccccagcccgggctggaaagcagcgcatgaaggagaaagaacaggagaatgaaaggaaagtggcacagctagctgaagagaatgaacggctcaagcaggaaatcgagcgcctgaccagggaagtagaggcgactcgccgagctctgattgaccgaatggtgaatctgcaccaagcatgaacaattgggagcatcagtcccccacttgggccacactacccacctttcccagaagtggctactgactaccctctcactagtgccaatgatgtgaccctcaatcccacatacgcagggggaaggcttggagtagacaaaaggaaaggtctcagcttgtatatagagattgtacatttatttattactgtccctatctattaaagtgactttctatgagccaaggtcttttactttttcttcttgcctttaggggcttcagggggtttcccctcagctacagccaactgtttctttagatccaagagtttcgccacctccgcagcaacctcgttcttgtctgccttttgtgctttcagttctcggacaatgtttccctaagataaaggggggtggggaggtaacagtgaggcaagaaaaagatctatttaggattcagcttgtccagtctcccacagggcttaagcttcatacttgttttgtcacttcatccatcagcgcttgtatctgctgtggcttggctgttgtaac

SEQ ID NO: 3614 - protein, 192 aa, Homosapiens
MELVPATPHYPADVLFQTDPTAEMAAESLPFSFGTLSSWELEAWYEDLQEVLSSDENGGTYVSPPGNEEEESKIFTTLDPASLAWLTEEEPEPAEVTSTSQSPHSPDSSQSSLAQEEEEEDQGRTRKRKQSGHSPARAGKQRMKEKEQENERKVAQLAEENERLKQEIERLTREVEATRRALIDRMVNLHQA

SEQ ID NO: 3615 - DNA, 1293 bp, Homosapiens
agagacttaagtctaaggcactgagcgtatcatgttaaagatgagcgggtggcagcgacagagccaaaatcagagctggaacctgaggagagagtgttcaagaaggaagtgtatcttcatacatcaccacacctgaaagcaggcatcagaccagcttgccaacttgtggcatagactgtttgctacatggagcttgttccagccactccccattatcctgcagatgtgcttttccagactgatccaactgcagagatggcagctgagtcattgcctttctccttcgggacactgtccagctgggagctggaagcctggtatgaggacctgcaagaggtcctgtcttcagatgaaaatgggggtacctatgtttcacctcctggaaatgaagaggaagaatcaaaaatcttcaccactcttgaccctgcttctctggcttggctgactgaggaggagccagaaccagcagaggtcacaagcacctcccagagccctcactctccagattccagtcagagctccctggctcaggaggaagaggaggaagaccaagggagaaccaggaaacggaaacagagtggtcattccccagcccgggctggaaagcagcgcatgaaggagaaagaacaggagaatgaaaggaaagtggcacagctagctgaagagaatgaacggctcaagcaggaaatcgagcgcctgaccagggaagtagaggcgactcgccgagctctgattgaccgaatggtgaatctgcaccaagcatgaacaattgggagcatcagtcccccacttgggccacactacccacctttcccagaagtggctactgactaccctctcactagtgccaatgatgtgaccctcaatcccacatacgcagggggaaggcttggagtagacaaaaggaaaggtctcagcttgtatatagagattgtacatttatttattactgtccctatctattaaagtgactttctatgagccaaggtcttttactttttcttcttgcctttaggggcttcagggggtttcccctcagctacagccaactgtttctttagatccaagagtttcgccacctccgcagcaacctcgttcttgtctgccttttgtgctttcagttctcggacaatgtttccctaagataaaggggggtggggaggtaacagtgaggcaagaaaaagatctatttaggattcagcttgtccagtctcccacagggcttaagcttcatacttgttttgtcacttcatccatcagcgcttgtatctgctgtggcttggctgttgtaac

SEQ ID NO: 3616 - protein, 192 aa, Homosapiens; identical to SEQ ID NO: 3614

SEQ ID NO: 3617 - DNA, 1160 bp, Homosapiens
agagacttaagtctaaggcactgagcgtatcatgttaaagatgagcgggtggcagcgacagagccaaaatcagagctggaacctgaggagagagtgttcaagaaggaagtgtatcttcatacatcaccacacctgaaagcagatgtgcttttccagactgatccaactgcagagatggcagctgagtcattgcctttctccttcgggacactgtccagctgggagctggaagcctggtatgaggacctgcaagaggtcctgtcttcagatgaaaatgggggtacctatgtttcacctcctggaaatgaagaggtaagaatgagccagaaccagcagaggtcacaagcacctcccagagccctcactctccagattccagtcagagctccctggctcaggaggaagaggaggaagaccaagggagaaccaggaaacggaaacagagtggtcattccccagcccgggctggaaagcagcgcatgaaggagaaagaacaggagaatgaaaggaaagtggcacagctagctgaagagaatgaacggctcaagcaggaaatcgagcgcctgaccagggaagtagaggcgactcgccgagctctgattgaccgaatggtgaatctgcaccaagcatgaacaattgggagcatcagtcccccacttgggccacactacccacctttcccagaagtggctactgactaccctctcactagtgccaatgatgtgaccctcaatcccacatacgcagggggaaggcttggagtagacaaaaggaaaggtctcagcttgtatatagagattgtacatttatttattactgtccctatctattaaagtgactttctatgagccaaggtcttttactttttcttcttgcctttaggggcttcagggggtttcccctcagctacagccaactgtttctttagatccaagagtttcgccacctccgcagcaacctcgttcttgtctgccttttgtgctttcagttctcggacaatgtttccctaagataaaggggggtggggaggtaacagtgaggcaagaaaaagatctatttaggattcagcttgtccagtctcccacagggcttaagcttcatacttgttttgtcacttcatccatcagcgcttgtatctgctgtggcttggctgttgtaac

SEQ ID NO: 3618 - protein, 102 aa, Homosapiens
MAAESLPFSFGTLSSWELEAWYEDLQEVLSSDENGGTYVSPPGNEEVRMSQNQQRSQAPPRALTLQIPVRAPWLRRKRRKTKGEPGNGNRVVIPQPGLESSA

SEQ ID NO: 3619 - DNA, 1140 bp, Homosapiens
agagacttaagtctaaggcactgagcgtatcatgttaaagatgagcgggtggcagcgacagagccaaaatcagagctggaacctgaggagagagtgttcaagaaggaagtgtatcttcatacatcaccacacctgaaagcagatgtgcttttccagactgatccaactgcagagatggcagctgagtcattgcctttctccttcgggacactgtccagctgggagctggaagcctggtatgaggacctgcaagaggtcctgtcttcagatgaaaatgggggtacctatgtttcacctcctggaaatgaagaggaagaatcaaaaatcttcaccactcttgaccctgcttctctggcttggctgactgaggaggagccagaaccagcagaggaagaccaagggagaaccaggaaacggaaacagagtggtcattccccagcccgggctggaaagcagcgcatgaaggagaaagaacaggagaatgaaaggaaagtggcacagctagctgaagagaatgaacggctcaagcaggaaatcgagcgcctgaccagggaagtagaggcgactcgccgagctctgattgaccgaatggtgaatctgcaccaagcatgaacaattgggagcatcagtcccccacttgggccacactacccacctttcccagaagtggctactgactaccctctcactagtgccaatgatgtgaccctcaatcccacatacgcagggggaaggcttggagtagacaaaaggaaaggtctcagcttgtatatagagattgtacatttatttattactgtccctatctattaaagtgactttctatgagccaaggtcttttactttttcttcttgcctttaggggcttcagggggtttcccctcagctacagccaactgtttctttagatccaagagtttcgccacctccgcagcaacctcgttcttgtctgccttttgtgctttcagttctcggacaatgtttccctaagataaaggggggtggggaggtaacagtgaggcaagaaaaagatctatttaggattcagcttgtccagtctcccacagggcttaagcttcatacttgttttgtcacttcatccatcagcgcttgtatctgctgtggcttggctgttgtaac

SEQ ID NO: 3620 - protein, 145 aa, Homosapiens
MAAESLPFSFGTLSSWELEAWYEDLQEVLSSDENGGTYVSPPGNEEEESKIFTTLDPASLAWLTEEEPEPAEEDQGRTRKRKQSGHSPARAGKQRMKEKEQENERKVAQLAEENERLKQEIERLTREVEATRRALIDRMVNLHQA

SEQ ID NO: 3621 - DNA, 1224 bp, Homosapiens
gctcccgaggtcagagacttaagtctaaggcactgagcgtatcatgttaaagatgagcgggtggcagcgacagagccaaaatcagagctggaacctgaggagagagtgttcaagaaggaagtgtatcttcatacatcaccacacctgaaagcagatgtgcttttccagactgatccaactgcagagatggcagctgagtcattgcctttctccttcgggacactgtccagctgggagctggaagcctggtatgaggacctgcaagaggtcctgtcttcagatgaaaatgggggtacctatgtttcacctcctggaaatgaagaggaagaatcaaaaatcttcaccactcttgaccctgcttctctggcttggctgactgaggaggagccagaaccagcagaggtcacaagcacctcccagagccctcactctccagattccagtcagagctccctggctcaggaggaagaggaggaagaccaagggagaaccaggaaacggaaacagagtggtcattccccagcccgggctggaaagcagcgcatgaaggagaaagaacaggagaatgaaaggaaagtggcacagctagctgaagagaatgaacggctcaagcaggaaatcgagcgcctgaccagggaagtagaggcgactcgccgagctctgattgaccgaatggtgaatctgcaccaagcatgaacaattgggagcatcagtcccccacttgggccacactacccacctttcccagaagtggctactgactaccctctcactagtgccaatgatgtgaccctcaatcccacatacgcagggggaaggcttggagtagacaaaaggaaaggtctcagcttgtatatagagattgtacatttatttattactgtccctatctattaaagtgactttctatgagccaaggtcttttactttttcttcttgcctttaggggcttcagggggtttcccctcagctacagccaactgtttctttagatccaagagtttcgccacctccgcagcaacctcgttcttgtctgccttttgtgctttcagttctcggacaatgtttccctaagataaaggggggtggggaggtaacagtgaggcaagaaaaagatctatttaggattcagcttgtccagtctcccacagggcttaagcttcatacttgttttgtcacttcatccatcagcgcttgtatctgctgtggcttggctgttgtaac

SEQ ID NO: 3622 - protein, 169 aa, Homosapiens; identical to SEQ ID NO: 494

SEQ ID NO: 3623 - DNA, 1170 bp, Homosapiens
agagacttaagtctaaggcactgagcgtatcatgttaaagatgagcgggtggcagcgacagagccaaaatcagagctggaacctgaggagagagtgttcaagaaggaagtgtatcttcatacatcaccacacctgaaagcaggtaaacttaacctacccttttccaaaaattttaaacggcaggacagtaaatattttagatgttaaaagtcctatagtctctagcgtgactcttcatctctgccactgtagcaccaaagcagccataaacaatatgtaaataaacagatgtggctgtattccagtacaactttacctacaaaaacaggcatcagaccagcttgccaacttgtggcatagactgtttgctacatggagcttgttccagccactccccattatcctgcagatgtgcttttccagactgatccaactgcagagatggcagctgagtcattgcctttctccttcgggacactgtccagctgggagctggaagcctggtatgaggacctgcaagaggtcctgtcttcagatgaaaatgggggtacctatgtttcacctcctggaaatgaagaggaagaatcaaaaatcttcaccactcttgaccctgcttctctggcttggctgactgaggaggagccagaaccagcagaggtcacaagcacctcccagagccctcactctccagattccagtcagagctccctggctcaggaggaagaggaggaagaccaagggagaaccaggaaacggaaacagagtggtcattccccagcccgggctggaaagcagcgcatgaaggagaaagaacaggagaatgaaaggaaagtggcacagctagctgaagagaatgaacggctcaagcaggaaatcgagcgcctgaccagggaagtagaggcgactcgccgagctctgattgaccgaatggtgaatctgcaccaagcatgaacaattgggagcatcagtcccccacttgggccacactacccacctttcccagaagtggctactgactaccctctcactagtgccaatgatgtgaccctcaatcccacatacgcagggggaaggcttggagtagacaaaaggaaaggtctcagcttgtatatagagattgtacatttatttattactgtccctatctattaaagtgactttctatgagcc

SEQ ID NO: 3624 - protein, 192 aa, Homosapiens; identical to SEQ ID NO: 3614

SEQ ID NO: 3625 - DNA, 984 bp, Homosapiens
agagacttaagtctaaggcactgagcgtatcatgttaaagatgagcgggtggcagcgacagagccaaaatcagagctggaacctgaggagagagtgttcaagaaggaagtgtatcttcatacatcaccacacctgaaagcaggcatcagaccagcttgccaacttgtggcatagactgtttgctacatggagcttgttccagccactccccattatcctgcagatgtgcttttccagactgatccaactgcagagatggcagctgagtcattgcctttctccttcgggacactgtccagctgggagctggaagcctggtatgaggacctgcaagaggtcctgtcttcagatgaaaatgggggtacctatgtttcacctcctggaaatgaagaggaagaatcaaaaatcttcaccactcttgaccctgcttctctggcttggctgactgaggaggagccagaaccagcagaggtcacaagcacctcccagagccctcactctccagattccagtcagagctccctggctcaggaggaagaggaggaagaccaagggagaaccaggaaacggaaacagagtggtcattccccagcccgggctggaaagcagcgcatgaaggagaaagaacaggagaatgaaaggaaagtggcacagctagctgaagagaatgaacggctcaagcaggaaatcgagcgcctgaccagggaagtagaggcgactcgccgagctctgattgaccgaatggtgaatctgcaccaagcatgaacaattgggagcatcagtcccccacttgggccacactacccacctttcccagaagtggctactgactaccctctcactagtgccaatgatgtgaccctcaatcccacatacgcagggggaaggcttggagtagacaaaaggaaaggtctcagcttgtatatagagattgtacatttatttattactgtccctatctattaaagtgactttctatgagcc

SEQ ID NO: 3626 - protein, 192 aa, Homosapiens; identical to SEQ ID NO: 3614

SEQ ID NO: 3627 - DNA, 851 bp, Homosapiens
agagacttaagtctaaggcactgagcgtatcatgttaaagatgagcgggtggcagcgacagagccaaaatcagagctggaacctgaggagagagtgttcaagaaggaagtgtatcttcatacatcaccacacctgaaagcagatgtgcttttccagactgatccaactgcagagatggcagctgagtcattgcctttctccttcgggacactgtccagctgggagctggaagcctggtatgaggacctgcaagaggtcctgtcttcagatgaaaatgggggtacctatgtttcacctcctggaaatgaagaggtaagaatgagccagaaccagcagaggtcacaagcacctcccagagccctcactctccagattccagtcagagctccctggctcaggaggaagaggaggaagaccaagggagaaccaggaaacggaaacagagtggtcattccccagcccgggctggaaagcagcgcatgaaggagaaagaacaggagaatgaaaggaaagtggcacagctagctgaagagaatgaacggctcaagcaggaaatcgagcgcctgaccagggaagtagaggcgactcgccgagctctgattgaccgaatggtgaatctgcaccaagcatgaacaattgggagcatcagtcccccacttgggccacactacccacctttcccagaagtggctactgactaccctctcactagtgccaatgatgtgaccctcaatcccacatacgcagggggaaggcttggagtagacaaaaggaaaggtctcagcttgtatatagagattgtacatttatttattactgtccctatctattaaagtgactttctatgagcc

SEQ ID NO: 3628 - protein, 102 aa, Homosapiens; identical to SEQ ID NO: 3618

SEQ ID NO: 3629 - DNA, 831 bp, Homosapiens
agagacttaagtctaaggcactgagcgtatcatgttaaagatgagcgggtggcagcgacagagccaaaatcagagctggaacctgaggagagagtgttcaagaaggaagtgtatcttcatacatcaccacacctgaaagcagatgtgcttttccagactgatccaactgcagagatggcagctgagtcattgcctttctccttcgggacactgtccagctgggagctggaagcctggtatgaggacctgcaagaggtcctgtcttcagatgaaaatgggggtacctatgtttcacctcctggaaatgaagaggaagaatcaaaaatcttcaccactcttgaccctgcttctctggcttggctgactgaggaggagccagaaccagcagaggaagaccaagggagaaccaggaaacggaaacagagtggtcattccccagcccgggctggaaagcagcgcatgaaggagaaagaacaggagaatgaaaggaaagtggcacagctagctgaagagaatgaacggctcaagcaggaaatcgagcgcctgaccagggaagtagaggcgactcgccgagctctgattgaccgaatggtgaatctgcaccaagcatgaacaattgggagcatcagtcccccacttgggccacactacccacctttcccagaagtggctactgactaccctctcactagtgccaatgatgtgaccctcaatcccacatacgcagggggaaggcttggagtagacaaaaggaaaggtctcagcttgtatatagagattgtacatttatttattactgtccctatctattaaagtgactttctatgagcc

SEQ ID NO: 3630 - protein, 145 aa, Homosapiens; identical to SEQ ID NO: 3620

SEQ ID NO: 3631 - DNA, 915 bp, Homosapiens
gctcccgaggtcagagacttaagtctaaggcactgagcgtatcatgttaaagatgagcgggtggcagcgacagagccaaaatcagagctggaacctgaggagagagtgttcaagaaggaagtgtatcttcatacatcaccacacctgaaagcagatgtgcttttccagactgatccaactgcagagatggcagctgagtcattgcctttctccttcgggacactgtccagctgggagctggaagcctggtatgaggacctgcaagaggtcctgtcttcagatgaaaatgggggtacctatgtttcacctcctggaaatgaagaggaagaatcaaaaatcttcaccactcttgaccctgcttctctggcttggctgactgaggaggagccagaaccagcagaggtcacaagcacctcccagagccctcactctccagattccagtcagagctccctggctcaggaggaagaggaggaagaccaagggagaaccaggaaacggaaacagagtggtcattccccagcccgggctggaaagcagcgcatgaaggagaaagaacaggagaatgaaaggaaagtggcacagctagctgaagagaatgaacggctcaagcaggaaatcgagcgcctgaccagggaagtagaggcgactcgccgagctctgattgaccgaatggtgaatctgcaccaagcatgaacaattgggagcatcagtcccccacttgggccacactacccacctttcccagaagtggctactgactaccctctcactagtgccaatgatgtgaccctcaatcccacatacgcagggggaaggcttggagtagacaaaaggaaaggtctcagcttgtatatagagattgtacatttatttattactgtccctatctattaaagtgactttctatgagcc

SEQ ID NO: 3632 - protein, 169 aa, Homosapiens; identical to SEQ ID NO: 494

SEQ ID NO: 3633 - DNA, 247 bp, Homosapiens
aggatcacagctcagtcttctcccaggatcctgggaagctcctgattttccctcaagcctacggcaaagggattcagaacctcctattccactggcttccgattatctccaagagagcctgtcctccgatagaaggggaagcccctccaacctgcaggaagcgccgctgccgccgccgcggatcaccgagcggcctcccgcgcatgcgccatgggggccaggggcagccctggggattccgttccca

SEQ ID NO: 3634 - protein, 81 aa, Homosapiens
GSQLSLLPGSWEAPDFPSSLRQRDSEPPIPLASDYLQESLSSDRRGSPSNLQEAPLPPPRITERPPAHAPWGPGAALGIPF

SEQ ID NO: 3635 - DNA, 3598 bp, Homosapiens
tggcgcatgcgcgggaggccgctcggtgatccgcggcggcggcagcggcgcttcctgctaggaccggccggggccgtaccggaggctcgggctccaccgaccctcctcccaccccctcccactcaccctctgggccgcgactgcgcagggcggggccggccgaaccatgggccgcggtgtgggctaagctggtggccccggctttagactggaccccacaatgtttgcagagatgttcaggcacgcgggagctgattacacacaatgaatgggggcaatgagagcagtggagcagacagagctgggggccctgtggccacatctgtccccatcggctggcagcgctgtgtgcgagagggtgctgtgctctacatcagtccaagtggcacagagctgtcttccttggagcaaacccggagctacctcctcagcgatgggacctgcaagtgcggtctggagtgtccacttaatgtccccaaggttttcaactttgaccctttggccccggtgaccccgggtggggctggggtggggccagcatcagaggaggacatgaccaagctgtgcaaccaccggcggaaagctgttgctatggcaactctgtaccgcagcatggagaccacctgctcacactcttctcctggagagggagcgagcccccaaatgttccacactgtgtccccagggcccccctctgcccgccctccctgtcgagttcctcctacaactccacttaatgggggtcctggctcccttcccccagaaccaccctcagtttcccaggcctttcccactctagcaggccctggggggcttttccccccaaggcttgctgacccagtcccttctgggggcagtagcagcccccgtttcctcccaaggggcaatgccccctctccagccccacctcctccacctgctatcagcctcaatgctccctcatacaactggggagctgccctcagatccagcctggtgccctctgacctgggctctcctccggcccctcatgcctcctcctcaccaccttcagaccctcctctcttccactgtagtgatgccttaacaccccctcccctgcccccgagcaataatctccccgcccaccctggtcctgcctctcagccaccagtgtcttcagccactatgcacctgcccctggtcctggggcccctgggaggggcccccacggtggaggggcctggggcaccccccttccttgctagcagcctactctctgcagcggccaaggcacagcatcccccactaccccctcccagcactttacagggccgaaggccccgtgcccaggcaccctcagcttcccactcctcatcacttcgtccctctcagcgtcgtccccgcagaccccctactgtatttcgattgctagaagggagaggccctcaaacccctagacggagccgtcctcgggcccctgctcctgtcccccaacccttttctctcccggagccatcccaaccaattctcccttctgtgctgtccctgctgggactccccacccctggcccttcccactctgatggaagctttaaccttttggggtcagatgcacaccttcctcctcccccaaccctctcctcagggagccctccccagcccaggcaccccatccagccctccctgcctgggaccaccagtggcagcctcagcagtgtgccaggtgcccctgccccaccagctgcctccaaagccccagtagtccccagccctgtgcttcaaagcccatccgaaggactggggatgggggcaggcccggcctgccctctgcctcccctggctggtggagaggctttccctttccccagccctgagcagggcctggcactgagtggagctggcttccctgggatgcttggggccttgcctctccctctgagtctggggcagcctccaccttctccattgctcaaccacagtttatttggtgtgctgactgggggaggaggacaacctccccctgagcccctgctacccccaccaggaggacctggtcctcccctagccccaggagagcctgaagggccttcgcttttggtggcttccttgcttcctccaccaccctcagaccttcttccacctccttcagcacctcccagcaacctccttgcctctttcctgcccctgttggctctgggccccacagctggggatggggagggatctgcagagggagccgggggtccaagtggggagccattttcaggcttgggagacctgtcccccctacttttccccccactttcagccccccctaccctcatagctttaaattctgcgctgctggctgccaccctggatcccccctcggggacacccccccagccctgtgtcctgagtgccccccaacctggaccacctacctccagtgtcaccacggcaactactgacccgggggcctcctctctgggcaaggccccctccaactcagggagacccccccaactccttagccctctgctgggtgccagcctgctgggtgacctgtcttcactgaccagcagccctggagccctccccagcctgttgcagcctcctggccctcttctctctggccagttggggctgcagctcctccctggggggggagctcctccacccctctcagaggcttctagtcccctagcctgcctgctacagagtctccagatccctccagagcagccagaagccccctgtctaccccccgagagccctgcctcagccctcgaaccagagcctgccaggcctcccctcagtgccttagccccaccccatggttctcccgaccccccagtccctgagctgctcactgggagggggtcagggaaacggggccggaggggaggagggggacttaggggcattaatggtgaggccaggccagcccggggccgaaagcctggcagccggcgggagcctggccgactggccctcaaatgggggacacgtggtggcttcaatggacaaatggaaaggtccccaagaagaacccaccattggcagcataatggggagctggctgaagggggtgctgagcccaaggatccaccccctcccgggccccattctgaggaccttaaggtgcccccgggagtagtcagaaagtctcgtcgtggccgtaggagaaaatacaaccctacccggaacagcaatagctcccgccaggacattaccttggaacccagccctacagcccgagcagctgtccctctgcctccccgggcccgccctggccgtcctgccaaaaacaagaggaggaaactggccccatagcagccatacctggagctggatctgaccctgattggggagagctgagtgctgagccttgggagcccctgccagccacctgcacctgctgccctccttcccagtgaaagagacgttgtgatgatgcgactgaggattatgcaacgtggtccaaccggagcggccagcatgaccagctgtccaggggctgcctcctgccttttcttttgtaaagacaagacccttgggagttttaattctgttttgtacttgccctgtggggcctccactgcttttctatgggagacactcttaatttaacagatgagaatattttgaaactctg

SEQ ID NO: 3636 - protein, 1003 aa, Homosapiens; identical to SEQ ID NO: 496

SEQ ID NO: 3637 - DNA, 4191 bp, Homosapiens
tggcgcatgcgcgggaggccgctcggtgatccgcggcggcggcagcggcgcttcctgctaggaccggccggggccgtaccggaggctcgggctccaccgaccctcctcccaccccctcccactcaccctctgggccgcgactgcgcagggcggggccggccgaaccatgggccgcggtgtgggctaagctggtggccccggctttagactggaccccacaatgtttgcagagatgttcaggcacgcgggagctgattacacacaatgaatgggggcaatgagagcagtggagcagacagagctgggggccctgtggccacatctgtccccatcggctggcagcgctgtgtgcgagagggtgctgtgctctacatcagtccaagtggcacagagctgtcttccttggagcaaacccggagctacctcctcagcgatgggacctgcaagtgcggtctggagtgtccacttaatgtccccaaggttttcaactttgaccctttggccccggtgaccccgggtggggctggggtggggccagcatcagaggaggacatgaccaagctgtgcaaccaccggcggaaagctgttgctatggcaactctgtaccgcagcatggagaccacctgctcacactcttctcctggagagggagcgagcccccaaatgttccacactgtgtccccagggcccccctctgcccgccctccctgtcgagttcctcctacaactccacttaatgggggtcctggctcccttcccccagaaccaccctcagtttcccaggcctttcccactctagcaggccctggggggcttttccccccaaggcttgctgacccagtcccttctgggggcagtagcagcccccgtttcctcccaaggggcaatgccccctctccagccccacctcctccacctgctatcagcctcaatgctccctcatacaactggggagctgccctcagatccagcctggtgccctctgacctgggctctcctccggcccctcatgcctcctcctcaccaccttcagaccctcctctcttccactgtagtgatgccttaacaccccctcccctgcccccgagcaataatctccccgcccaccctggtcctgcctctcagccaccagtgtcttcagccactatgcacctgcccctggtcctggggcccctgggaggggcccccacggtggaggggcctggggcaccccccttccttgctagcagcctactctctgcagcggccaaggcacagcatcccccactaccccctcccagcactttacagggccgaaggccccgtgcccaggcaccctcagcttcccactcctcatcacttcgtccctctcagcgtcgtccccgcagaccccctactgtatttcgattgctagaagggagaggccctcaaacccctagacggagccgtcctcgggcccctgctcctgtcccccaacccttttctctcccggagccatcccaaccaattctcccttctgtgctgtccctgctgggactccccacccctggcccttcccactctgatggaagctttaaccttttggggtcagatgcacaccttcctcctcccccaaccctctcctcagggagccctccccagcccaggcaccccatccagccctccctgcctgggaccaccagtggcagcctcagcagtgtgccaggtgcccctgccccaccagctgcctccaaagccccagtagtccccagccctgtgcttcaaagcccatccgaaggactggggatgggggcaggcccggcctgccctctgcctcccctggctggtggagaggctttccctttccccagccctgagcagggcctggcactgagtggagctggcttccctgggatgcttggggccttgcctctccctctgagtctggggcagcctccaccttctccattgctcaaccacagtttatttggtgtgctgactgggggaggaggacaacctccccctgagcccctgctacccccaccaggaggacctggtcctcccctagccccaggagagcctgaagggccttcgcttttggtggcttccttgcttcctccaccaccctcagaccttcttccacctccttcagcacctcccagcaacctccttgcctctttcctgcccctgttggctctgggccccacagctggggatggggagggatctgcagagggagccgggggtccaagtggggagccattttcaggcttgggagacctgtcccccctacttttccccccactttcagccccccctaccctcatagctttaaattctgcgctgctggctgccaccctggatcccccctcggggacacccccccagccctgtgtcctgagtgccccccaacctggaccacctacctccagtgtcaccacggcaactactgacccgggggcctcctctctgggcaaggccccctccaactcagggagacccccccaactccttagccctctgctgggtgccagcctgctgggtgacctgtcttcactgaccagcagccctggagccctccccagcctgttgcagcctcctggccctcttctctctggccagttggggctgcagctcctccctggggggggagctcctccacccctctcagaggcttctagtcccctagcctgcctgctacagagtctccagatccctccagagcagccagaagccccctgtctaccccccgagagccctgcctcagccctcgaaccagagcctgccaggcctcccctcagtgccttagccccaccccatggttctcccgaccccccagtccctgagctgctcactgggagggggtcagggaaacggggccggaggggaggagggggacttaggggcattaatggtgaggccaggccagcccggggccgaaagcctggcagccggcgggagcctggccgactggccctcaaatgggggacacgtggtggcttcaatggacaaatggaaaggtccccaagaagaacccaccattggcagcataatggggagctggctgaagggggtgctgagcccaaggatccaccccctcccgggccccattctgaggaccttaaggtgcccccgggagtagtcagaaagtctcgtcgtggccgtaggagaaaatacaaccctacccggaacagcaatagctcccgccaggacattaccttggaacccagccctacagcccgagcagctgtccctctgcctccccgggcccgccctggccgtcctgccaaaaacaagaggaggaaactggccccatagcagccatacctggagctggatctgaccctgattggggagagctgagtgctgagccttgggagcccctgccagccacctgcacctgtggacagtgggtgggggcactactccccactcagagcacaaatgcaactccttcccctacaatcccatcctgagccattgcagggggcagggaagttcacccccccccaccacccccccgcccccccgaagccatgtcactgaaaaggcctgggggggatggtatatggccctttccccaccaggcgctaaggggaacacccccttccccaggtcttttatttgtttaagttatttttgcacaaatgactcttttatatttaattcgatttcattgcctcccttcttaaagccaacaggctcagtttacaaacctgtgagctactgttggctgctgccctccttcccagtgaaaggtacaaagcaataagcatcatgcatcctccccttacccctccaacacccctctgcctctggctcaggttgctcaaagcacagatcctctcttaccccgtccccaggtttgaaacacatagcctcatttcaaggtgtagccaggttcccccgactttcctctgggatataaaaaagggggtaagggggcaaagagagccctctgggcctctcctcccatacacactacactgccccttctccccccatcaaaacgctcagagacgttgtgatgatgcgactgaggattatgcaacgtggtccaaccggagcggccagcatgaccagctgtccaggggctgcctcctgccttttcttttgtaaagacaagacccttgggagttttaattctgttttgtacttgccctgtggggcctccactgcttttctatgggagacactcttaatttaacagatgagaatattttgaaactctgg

SEQ ID NO: 3638 - protein, 1003 aa, Homosapiens; identical to SEQ ID NO: 496

SEQ ID NO: 3639 - DNA, 1726 bp, Homosapiens
ctagggagagacccctgactataatttctcaacaggtgacctgtcttcactgaccagcagccctggagccctccccagcctgttgcagcctcctggccctcttctctctggccagttggggctgcagctcctccctggggggggagctcctccacccctctcagaggcttctagtcccctagcctgcctgctacagagtctccagatccctccagagcagccagaagccccctgtctaccccccgagagccctgcctcagccctcgaaccagagcctgccaggcctcccctcagtgccttagccccaccccatggttctcccgaccccccagtccctgagctgctcactgggagggggtcagggaaacggggccggaggggaggagggggacttaggggcattaatggtgaggccaggccagcccggggccgaaagcctggcagccggcgggagcctggccgactggccctcaaatgggggacacgtggtggcttcaatggacaaatggaaaggtccccaagaagaacccaccattggcagcataatggggagctggctgaagggggtgctgagcccaaggatccaccccctcccgggccccattctgaggaccttaaggtgcccccgggagtagtcagaaagtctcgtcgtggccgtaggagaaaatacaaccctacccggaacagcaatagctcccgccaggacattaccttggaacccagccctacagcccgagcagctgtccctctgcctccccgggcccgccctggccgtcctgccaaaaacaagaggaggaaactggccccatagcagccatacctggagctggatctgaccctgattggggagagctgagtgctgagccttgggagcccctgccagccacctgcacctgtggacagtgggtgggggcactactccccactcagagcacaaatgcaactccttcccctacaatcccatcctgagccattgcagggggcagggaagttcacccccccccaccacccccccgcccccccgaagccatgtcactgaaaaggcctgggggggatggtatatggccctttccccaccaggcgctaaggggaacacccccttccccaggtcttttatttgtttaagttatttttgcacaaatgactcttttatatttaattcgatttcattgcctcccttcttaaagccaacaggctcagtttacaaacctgtgagctactgttggctgctgccctccttcccagtgaaaggtacaaagcaataagcatcatgcatcctccccttacccctccaacacccctctgcctctggctcaggttgctcaaagcacagatcctctcttaccccgtccccaggtttgaaacacatagcctcatttcaaggtgtagccaggttcccccgactttcctctgggatataaaaaagggggtaagggggcaaagagagccctctgggcctctcctcccatacacactacactgccccttctccccccatcaaaacgctcagagacgttgtgatgatgcgactgaggattatgcaacgtggtccaaccggagcggccagcatgaccagctgtccaggggctgcctcctgccttttcttttgtaaagacaagacccttgggagttttaattctgttttgtacttgccctgtggggcctccactgcttttctatgggagacactcttaatttaacagatgagaatattttgaaactctgg

SEQ ID NO: 3640 - protein, 107 aa, Homosapiens
MVLPTPQSLSCSLGGGQGNGAGGEEGDLGALMVRPGQPGAESLAAGGSLADWPSNGGHVVASMDKWKGPQEEPTIGSIMGSWLKGVLSPRIHPLPGPILRTLRCPRE

SEQ ID NO: 3641 - DNA, 1597 bp, Homosapiens
gcccgggacccgaacccagcctctcccctacccgaacaccggccccggctccaccgaggcccgggtcccccagcccgtctcgccgccgccatggcggaccctaaatacgccgaccttcccggcattgccaggaatgagccagatgtttatgaaactagcgacctacctgaggatgatcaagcggagttcgatgcggaggagctgacaagcacaagtgtggaacacatcattacttgtcaccatcaagcagctgcacgagcaagccatgcagtttggtcagctcctgacacacttggataccacccagcagatgattgctaattccttgaaggacaataccaccctcttgacccaggtgcagacaaccatgcgtgaaaacctggccacagttgaggggaactttgccagcattgatgaacggatgaagaagctgggaaagtgagcacatttgggagctggagaacaggggttatccctacccctgtgaactctgttaacagcttacatagggtttcccctttactataactctagcatccccatcccatttgacactgggggcaagggttcttcttgcatgtggggtttatacccctcccctgatgaatacagagtggtagctaggggttggttatcatcagaaggtggtctcccctcaggcctgggggataaggacgtgggcccagccacatgccaactcatgtccaatactgctttgcctggtgtggggaaggattgggtcttgtcccccaacacagcttctgtggctgactgtaatactgtacaactgtttctgaccattaaatgctgttgtactctgtgtggcctctgctgtgtttcctggggaggaagcagcactaggatatagatattcattcgtcataacaggcaatctaagccactctatactacaagagatggatttaaattgtaacctgttcttaccaaagaactaaataaaaaatgagtacagagccagagccagagtttcaaaatattctcatctgttaaattaagagtgtctcccatagaaaagcagtggaggccccacagggcaagtacaaaacagaattaaaactcccaagggtcttgtctttacaaaagaaaaggcaggaggcagcccctggacagctggtcatgctggccgctccggttggaccacgttgcataatcctcagtcgcatcatcacaacgtctctgagcgttttgatggggggagaaggggcagtgtagtgtgtatgggaggagaggcccagagggctctctttgcccccttacccccttttttatatcccagaggaaagtcgggggaacctggctacaccttgaaatgaggctatgtgtttcaaacctggggacggggtaagagaggatctgtgctttgagcaacctgagccagaggcagaggggtgttggaggggtaaggggaggatgcatgatgcttattgctttgtacctttcactgggaaggagggcagcagccaacagtagctcacaggtttgtaaactgagcctgttggctttaagaagggaggcaatgaaatcgaattaaatataaaagagtcatttgtgcaaaaataacttaaacaaataaaag

SEQ ID NO: 3642 - protein, 76 aa, Homosapiens
MADPKYADLPGIARNEPDVYETSDLPEDDQAEFDAEELTSTSVEHIITCHHQAAARASHAVWSAPDTLGYHPADDC

SEQ ID NO: 3643 - DNA, 2504 bp, Homosapiens
agcccgggacccgaacccagcctctcccctacccgaacaccggccccggctccaccgaggcccgggtcccccagcccgtctcgccgccgccatggcggaccctaaatacgccgaccttcccggcattgccaggaatgagccagatgtttatgaaactagcgacctacctgaggatgatcaagcggagttcgatgcgtttttaaagtaggtaatgtatgcacagggaacagaggattcaagggtaagtagaggagctgacaagcacaagtgtggaacacatcattgtcaatcctaatgctgcctatgacaagttcaaggacaagagagtggggacaaagggacttgatttctcagatcgtattggaaaaaccaagaggacaggatatgaatctggagaatatgagatgcttggagagggtctgggagtgaaggagacaccccagcaaaagtaccagcgcctactgcatgaggtccaagagctgacaactgaagttgaaaaaatcaagacgacagtgaaggagtcagccacagaggagaagctgacccctgtgttgctggctaaacagctggcagccctgaagcagcagctggttgcttcccacctggagaagctgctgggaccagatgctgcaatcaaccttaccgaccccgatggcgccctggctaagcgcctactactgcagctggaagcaacaaagaacagcaaagggggatcagggggaaaaaccactgggacccccccagatagcagccttgtcacttatgaactacattctcggcctgagcaggacaagttctctcaagctgccaaagtcgcagaacttgaaaagcgcctgacagagctggagacagctgtacgttgtgatcaggatgctcagaatcccctttctgcaggtctacagggagcctgtctcatggagactgtagagctgttgcaagcaaaggtgagcgccctagaccttgcagttttggatcaagtggaggctcggctacagagtgtcctgggaaaggtgaacgagattgccaagcataaagcctctgtagaagatgcagatacacaaagcaaggtgcaccagctatatgaaactatacagcgctggagccccattgcctccaccctccctgagctggtgcagagacttgtcaccatcaagcagctgcacgagcaagccatgcagtttggtcagctcctgacacacttggataccacccagcagatgattgctaattccttgaaggacaataccaccctcttgacccaggtgcagacaaccatgcgtgaaaacctggccacagttgaggggaactttgccagcattgatgaacggatgaagaagctgggaaagtgagcacatttgggagctggagaacaggggttatccctacccctgtgaactctgttaacagcttacatagggtttcccctttactataactctagcatccccatcccatttgacactgggggcaagggttcttcttgcatgtggggtttatacccctcccctgatgaatacagagtggtagctaggggttggttatcatcagaaggtggtctcccctcaggcctgggggataaggacgtgggcccagccacatgccaactcatgtccaatactgctttgcctggtgtggggaaggattgggtcttgtcccccaacacagcttctgtggctgactgtaatactgtacaactgtttctgaccattaaatgctgttgtactctgtgtggcctctgctgtgtttcctggggaggaagcagcactaggatatagatattcattcgtcataacaggcaatctaagccactctatactacaagagatggatttaaattgtaacctgttcttaccaaagaactaaataaaaaatgagtacagagccagagccagagtttcaaaatattctcatctgttaaattaagagtgtctcccatagaaaagcagtggaggccccacagggcaagtacaaaacagaattaaaactcccaagggtcttgtctttacaaaagaaaaggcaggaggcagcccctggacagctggtcatgctggccgctccggttggaccacgttgcataatcctcagtcgcatcatcacaacgtctctgagcgttttgatggggggagaaggggcagtgtagtgtgtatgggaggagaggcccagagggctctctttgcccccttacccccttttttatatcccagaggaaagtcgggggaacctggctacaccttgaaatgaggctatgtgtttcaaacctggggacggggtaagagaggatctgtgctttgagcaacctgagccagaggcagaggggtgttggaggggtaaggggaggatgcatgatgcttattgctttgtacctttcactgggaaggagggcagcagccaacagtagctcacaggtttgtaaactgagcctgttggctttaagaagggaggcaatgaaatcgaattaaatataaaagagtcatttgtgcaaaaataacttaaacaaataaaag

SEQ ID NO: 3644 - protein, 314 aa, Homosapiens
MLGEGLGVKETPQQKYQRLLHEVQELTTEVEKIKTTVKESATEEKLTPVLLAKQLAALKQQLVASHLEKLLGPDAAINLTDPDGALAKRLLLQLEATKNSKGGSGGKTTGTPPDSSLVTYELHSRPEQDKFSQAAKVAELEKRLTELETAVRCDQDAQNPLSAGLQGACLMETVELLQAKVSALDLAVLDQVEARLQSVLGKVNEIAKHKASVEDADTQSKVHQLYETIQRWSPIASTLPELVQRLVTIKQLHEQAMQFGQLLTHLDTTQQMIANSLKDNTTLLTQVQTTMRENLATVEGNFASIDERMKKLGK

SEQ ID NO: 3645 - DNA, 2546 bp, Homosapiens
agggctgttctcgcgacttttgctttacccttctgctgtgctactgctgtcgcgagacttcctgctcatctgccgctccctttgccgccgccttagcccgggacccgaacccagcctctcccctacccgaacaccggccccggctccaccgaggcccgggtcccccagcccgtctcgccgccgccatggcggaccctaaatacgccgaccttcccggcattgccaggaatgagccagatgtttatgaaactagcgacctacctgaggatgatcaagcggagttcgatgcggaggagctgacaagcacaagtgtggaacacatcattgtcaatcctaatgctgcctatgacaagttcaaggacaagagagtggggacaaagggacttgatttctcagatcgtattggaaaaaccaagaggacaggatatgaatctggagaatatgagatgcttggagagggtctgggagtgaaggagacaccccagcaaaagtaccagcgcctactgcatgaggtccaagagctgacaactgaagttgaaaaaatcaagacgacagtgaaggagtcagccacagaggagaagctgacccctgtgttgctggctaaacagctggcagccctgaagcagcagctggttgcttcccacctggagaagctgctgggaccagatgctgcaatcaaccttaccgaccccgatggcgccctggctaagcgcctactactgcagctggaagcaacaaagaacagcaaagggggatcagggggaaaaaccactgggacccccccagatagcagccttgtcacttatgaactacattctcggcctgagcaggacaagttctctcaagctgccaaagtcgcagaacttgaaaagcgcctgacagagctggagacagctgtacgttgtgatcaggatgctcagaatcccctttctgcaggtctacagggagcctgtctcatggagactgtagagctgttgcaagcaaaggtgagcgccctagaccttgcagttttggatcaagtggaggctcggctacagagtgtcctgggaaaggtgaacgagattgccaagcataaagcctctgtagaagatgcagatacacaaagcaaggtgcaccagctatatgaaactatacagcgctggagccccattgcctccaccctccctgagctggtgcagagacttgtcaccatcaagcagctgcacgagcaagccatgcagtttggtcagctcctgacacacttggataccacccagcagatgattgctaattccttgaaggacaataccaccctcttgacccaggtgcagacaaccatgcgtgaaaacctggccacagttgaggggaactttgccagcattgatgaacggatgaagaagctgggaaagtgagcacatttgggagctggagaacaggggttatccctacccctgtgaactctgttaacagcttacatagggtttcccctttactataactctagcatccccatcccatttgacactgggggcaagggttcttcttgcatgtggggtttatacccctcccctgatgaatacagagtggtagctaggggttggttatcatcagaaggtggtctcccctcaggcctgggggataaggacgtgggcccagccacatgccaactcatgtccaatactgctttgcctggtgtggggaaggattgggtcttgtcccccaacacagcttctgtggctgactgtaatactgtacaactgtttctgaccattaaatgctgttgtactctgtgtggcctctgctgtgtttcctggggaggaagcagcactaggatatagatattcattcgtcataacaggcaatctaagccactctatactacaagagatggatttaaattgtaacctgttcttaccaaagaactaaataaaaaatgagtacagagccagagccagagtttcaaaatattctcatctgttaaattaagagtgtctcccatagaaaagcagtggaggccccacagggcaagtacaaaacagaattaaaactcccaagggtcttgtctttacaaaagaaaaggcaggaggcagcccctggacagctggtcatgctggccgctccggttggaccacgttgcataatcctcagtcgcatcatcacaacgtctctgagcgttttgatggggggagaaggggcagtgtagtgtgtatgggaggagaggcccagagggctctctttgcccccttacccccttttttatatcccagaggaaagtcgggggaacctggctacaccttgaaatgaggctatgtgtttcaaacctggggacggggtaagagaggatctgtgctttgagcaacctgagccagaggcagaggggtgttggaggggtaaggggaggatgcatgatgcttattgctttgtacctttcactgggaaggagggcagcagccaacagtagctcacaggtttgtaaactgagcctgttggctttaagaagggaggcaatgaaatcgaattaaatataaaagagtcatttgtgcaaaaataacttaaacaaataaaag

SEQ ID NO: 3646 - protein, 401 aa, Homosapiens
MADPKYADLPGIARNEPDVYETSDLPEDDQAEFDAEELTSTSVEHIIVNPNAAYDKFKDKRVGTKGLDFSDRIGKTKRTGYESGEYEMLGEGLGVKETPQQKYQRLLHEVQELTTEVEKIKTTVKESATEEKLTPVLLAKQLAALKQQLVASHLEKLLGPDAAINLTDPDGALAKRLLLQLEATKNSKGGSGGKTTGTPPDSSLVTYELHSRPEQDKFSQAAKVAELEKRLTELETAVRCDQDAQNPLSAGLQGACLMETVELLQAKVSALDLAVLDQVEARLQSVLGKVNEIAKHKASVEDADTQSKVHQLYETIQRWSPIASTLPELVQRLVTIKQLHEQAMQFGQLLTHLDTTQQMIANSLKDNTTLLTQVQTTMRENLATVEGNFASIDERMKKLGK

SEQ ID NO: 3647 - DNA, 351 bp, Homosapiens
atttgtttaagttatttttgcacaaatgactcttttatatttaattcgatttcattgcctcccttcttaaagccaacaggctcagtttacaaacctgtgagctactgttggctgctgccctccttcccagtgaaagagacgttgtgatgatgcgactgaggattatgcaacgtggtccaaccggagcggccagcatgaccagctgtccaggggctgcctcctgccttttcttttgtaaagacaagacccttgggagttttaattctgttttgtacttgccctgtggggcctccactgcttttctatgggagacactcttaatttaacagatgagaatattttgaaactctg

SEQ ID NO: 3648 - protein, 59 aa, Homosapiens
MMRLRIMQRGPTGAASMTSCPGAASCLFFCKDKTLGSFNSVLYLPCGASTAFLWETLLI

SEQ ID NO: 3649 - DNA, 985 bp, Homosapiens
gcccgggacccgaacccagcctctcccctacccgaacaccggccccggctccaccgaggcccgggtcccccagcccgtctcgccgccgccatggcggaccctaaatacgccgaccttcccggcattgccaggaatgagccagatgtttatgaaactagcgacctacctgaggatgatcaagcggagttcgatgcggaggagctgacaagcacaagtgtggaacacatcattacttgtcaccatcaagcagctgcacgagcaagccatgcagtttggtcagctcctgacacacttggataccacccagcagatgattgctaattccttgaaggacaataccaccctcttgacccaggtgcagacaaccatgcgtgaaaacctggccacagttgaggggaactttgccagcattgatgaacggatgaagaagctgggaaagtgagcacatttgggagctggagaacaggggttatccctacccctgtgaactctgttaacagcttacatagggtttcccctttactataactctagcatccccatcccatttgacactgggggcaagggttcttcttgcatgtggggtttatacccctcccctgatgaatacagagtggtagctaggggttggttatcatcagaaggtggtctcccctcaggcctgggggataaggacgtgggcccagccacatgccaactcatgtccaatactgctttgcctggtgtggggaaggattgggtcttgtcccccaacacagcttctgtggctgactgtaatactgtacaactgtttctgaccattaaatgctgttgtactctgtgtggcctctgctgtgtttcctggggaggaagcagcactaggatatagatattcattcgtcataacaggcaatctaagccactctatactacaagagatggatttaaattgtaacctgttcttaccaaagaactaaataaaaaatgagtacagagccagagccag

SEQ ID NO: 3650 - protein, 76 aa, Homosapiens; identical to SEQ ID NO: 3642

SEQ ID NO: 3651 - DNA, 1892 bp, Homosapiens
agcccgggacccgaacccagcctctcccctacccgaacaccggccccggctccaccgaggcccgggtcccccagcccgtctcgccgccgccatggcggaccctaaatacgccgaccttcccggcattgccaggaatgagccagatgtttatgaaactagcgacctacctgaggatgatcaagcggagttcgatgcgtttttaaagtaggtaatgtatgcacagggaacagaggattcaagggtaagtagaggagctgacaagcacaagtgtggaacacatcattgtcaatcctaatgctgcctatgacaagttcaaggacaagagagtggggacaaagggacttgatttctcagatcgtattggaaaaaccaagaggacaggatatgaatctggagaatatgagatgcttggagagggtctgggagtgaaggagacaccccagcaaaagtaccagcgcctactgcatgaggtccaagagctgacaactgaagttgaaaaaatcaagacgacagtgaaggagtcagccacagaggagaagctgacccctgtgttgctggctaaacagctggcagccctgaagcagcagctggttgcttcccacctggagaagctgctgggaccagatgctgcaatcaaccttaccgaccccgatggcgccctggctaagcgcctactactgcagctggaagcaacaaagaacagcaaagggggatcagggggaaaaaccactgggacccccccagatagcagccttgtcacttatgaactacattctcggcctgagcaggacaagttctctcaagctgccaaagtcgcagaacttgaaaagcgcctgacagagctggagacagctgtacgttgtgatcaggatgctcagaatcccctttctgcaggtctacagggagcctgtctcatggagactgtagagctgttgcaagcaaaggtgagcgccctagaccttgcagttttggatcaagtggaggctcggctacagagtgtcctgggaaaggtgaacgagattgccaagcataaagcctctgtagaagatgcagatacacaaagcaaggtgcaccagctatatgaaactatacagcgctggagccccattgcctccaccctccctgagctggtgcagagacttgtcaccatcaagcagctgcacgagcaagccatgcagtttggtcagctcctgacacacttggataccacccagcagatgattgctaattccttgaaggacaataccaccctcttgacccaggtgcagacaaccatgcgtgaaaacctggccacagttgaggggaactttgccagcattgatgaacggatgaagaagctgggaaagtgagcacatttgggagctggagaacaggggttatccctacccctgtgaactctgttaacagcttacatagggtttcccctttactataactctagcatccccatcccatttgacactgggggcaagggttcttcttgcatgtggggtttatacccctcccctgatgaatacagagtggtagctaggggttggttatcatcagaaggtggtctcccctcaggcctgggggataaggacgtgggcccagccacatgccaactcatgtccaatactgctttgcctggtgtggggaaggattgggtcttgtcccccaacacagcttctgtggctgactgtaatactgtacaactgtttctgaccattaaatgctgttgtactctgtgtggcctctgctgtgtttcctggggaggaagcagcactaggatatagatattcattcgtcataacaggcaatctaagccactctatactacaagagatggatttaaattgtaacctgttcttaccaaagaactaaataaaaaatgagtacagagccagagccag

SEQ ID NO: 3652 - protein, 314 aa, Homosapiens; identical to SEQ ID NO: 3644

SEQ ID NO: 3653 - DNA, 1934 bp, Homosapiens
agggctgttctcgcgacttttgctttacccttctgctgtgctactgctgtcgcgagacttcctgctcatctgccgctccctttgccgccgccttagcccgggacccgaacccagcctctcccctacccgaacaccggccccggctccaccgaggcccgggtcccccagcccgtctcgccgccgccatggcggaccctaaatacgccgaccttcccggcattgccaggaatgagccagatgtttatgaaactagcgacctacctgaggatgatcaagcggagttcgatgcggaggagctgacaagcacaagtgtggaacacatcattgtcaatcctaatgctgcctatgacaagttcaaggacaagagagtggggacaaagggacttgatttctcagatcgtattggaaaaaccaagaggacaggatatgaatctggagaatatgagatgcttggagagggtctgggagtgaaggagacaccccagcaaaagtaccagcgcctactgcatgaggtccaagagctgacaactgaagttgaaaaaatcaagacgacagtgaaggagtcagccacagaggagaagctgacccctgtgttgctggctaaacagctggcagccctgaagcagcagctggttgcttcccacctggagaagctgctgggaccagatgctgcaatcaaccttaccgaccccgatggcgccctggctaagcgcctactactgcagctggaagcaacaaagaacagcaaagggggatcagggggaaaaaccactgggacccccccagatagcagccttgtcacttatgaactacattctcggcctgagcaggacaagttctctcaagctgccaaagtcgcagaacttgaaaagcgcctgacagagctggagacagctgtacgttgtgatcaggatgctcagaatcccctttctgcaggtctacagggagcctgtctcatggagactgtagagctgttgcaagcaaaggtgagcgccctagaccttgcagttttggatcaagtggaggctcggctacagagtgtcctgggaaaggtgaacgagattgccaagcataaagcctctgtagaagatgcagatacacaaagcaaggtgcaccagctatatgaaactatacagcgctggagccccattgcctccaccctccctgagctggtgcagagacttgtcaccatcaagcagctgcacgagcaagccatgcagtttggtcagctcctgacacacttggataccacccagcagatgattgctaattccttgaaggacaataccaccctcttgacccaggtgcagacaaccatgcgtgaaaacctggccacagttgaggggaactttgccagcattgatgaacggatgaagaagctgggaaagtgagcacatttgggagctggagaacaggggttatccctacccctgtgaactctgttaacagcttacatagggtttcccctttactataactctagcatccccatcccatttgacactgggggcaagggttcttcttgcatgtggggtttatacccctcccctgatgaatacagagtggtagctaggggttggttatcatcagaaggtggtctcccctcaggcctgggggataaggacgtgggcccagccacatgccaactcatgtccaatactgctttgcctggtgtggggaaggattgggtcttgtcccccaacacagcttctgtggctgactgtaatactgtacaactgtttctgaccattaaatgctgttgtactctgtgtggcctctgctgtgtttcctggggaggaagcagcactaggatatagatattcattcgtcataacaggcaatctaagccactctatactacaagagatggatttaaattgtaacctgttcttaccaaagaactaaataaaaaatgagtacagagccagagccag

SEQ ID NO: 3654 - protein, 401 aa, Homosapiens; identical to SEQ ID NO: 3646

SEQ ID NO: 3655 - DNA, 529 bp, Homosapiens
cctgatttttctactatccctttaaaacaattttagcaggaagtaaaatcttctaaaacaggaatggaccaggaaagtgcacgggctgtagccctttcctcctcaatctgggaagatctctttgcacttcagacactcccaggttaattggggcaataggcttgcttggagatttttcttaaaatgtttggaaaactaattcccaaatagaattccacccacacacacaccccgacccacatgccaactcatgtccaatactgctttgcctggtgtggggaaggattgggtcttgtcccccaacacagcttctgtggctgactgtaatactgtacaactgtttctgaccattaaatgctgttgtactctgtgtggcctctgctgtgtttcctggggaggaagcagcactaggatatagatattcattcgtcataacaggcaatctaagccactctatactacaagagatggatttaaattgtaacctgttcttaccaaagaactaaataaaaaatgagtacagagccag

SEQ ID NO: 3656 - protein, 55 aa, Homosapiens
MSNTALPGVGKDWVLSPNTASVADCNTVQLFLTIKCCCTLCGLCCVSWGGSSTRI

SEQ ID NO: 3657 - DNA, 732 bp, Homosapiens
tgaaatagcagtctgtacatactgacctggctgcctcagccatcccctctgggccccattgtgtcccttcaggtgcaccagctatatgaaactatacagcgctggagccccattgcctccaccctccctgagctggtgcagagacttgtcaccatcaagcagctgcacgagcaagccatgcagtttggtcagctcctgacacacttggataccacccagcagatgattgctaattccttgaaggacaataccaccctcttgacccaggtgcagacaaccatgcgtgaaaacctggccacagttgaggggaactttgccagcattgatgaacggatgaagaagctgggaaagtgagcacatttgggagctggagaacaggggttatccctacccctgtgaactctgttaacagcttacatagggtttcccctttactataactctagcatccccatcccatttgacactgggggcaagggttcttcttgcatgtggggtttatacccctcccctgatgaatacagagtggtagctaggggttggttatcatcagaaggtggtctcccctcaggcctgggggataaggacgtgggcccagccacatgccaactcatgtccaatactgctttgcctggtgtggggaaggattgggtcttgtcccccaacacagcttctgtggctgactgtaatactgtacaactgtttctgaccattaaatgctgttgtactctg

SEQ ID NO: 3658 - protein, 58 aa, Homosapiens [sequence omitted]

SEQ ID NO: 3659 - DNA, 820 bp, Homosapiens
gcccgggacccgaacccagcctctcccctacccgaacaccggccccggctccaccgaggcccgggtcccccagcccgtctcgccgccgccatggcggaccctaaatacgccgaccttcccggcattgccaggaatgagccagatgtttatgaaactagcgacctacctgaggatgatcaagcggagttcgatgcggaggagctgacaagcacaagtgtggaacacatcattacttgtcaccatcaagcagctgcacgagcaagccatgcagtttggtcagctcctgacacacttggataccacccagcagatgattgctaattccttgaaggacaataccaccctcttgacccaggtgcagacaaccatgcgtgaaaacctggccacagttgaggggaactttgccagcattgatgaacggatgaagaagctgggaaagtgagcacatttgggagctggagaacaggggttatccctacccctgtgaactctgttaacagcttacatagggtttcccctttactataactctagcatccccatcccatttgacactgggggcaagggttcttcttgcatgtggggtttatacccctcccctgatgaatacagagtggtagctaggggttggttatcatcagaaggtggtctcccctcaggcctgggggataaggacgtgggcccagccacatgccaactcatgtccaatactgctttgcctggtgtggggaaggattgggtcttgtcccccaacacagcttctgtggctgactgtaatactgtacaactgtttctgaccattaaatgctgttgtactctg

SEQ ID NO: 3660 - protein, 76 aa, Homosapiens; identical to SEQ ID NO: 3642

SEQ ID NO: 3661 - DNA, 1769 bp, Homosapiens
agggctgttctcgcgacttttgctttacccttctgctgtgctactgctgtcgcgagacttcctgctcatctgccgctccctttgccgccgccttagcccgggacccgaacccagcctctcccctacccgaacaccggccccggctccaccgaggcccgggtcccccagcccgtctcgccgccgccatggcggaccctaaatacgccgaccttcccggcattgccaggaatgagccagatgtttatgaaactagcgacctacctgaggatgatcaagcggagttcgatgcggaggagctgacaagcacaagtgtggaacacatcattgtcaatcctaatgctgcctatgacaagttcaaggacaagagagtggggacaaagggacttgatttctcagatcgtattggaaaaaccaagaggacaggatatgaatctggagaatatgagatgcttggagagggtctgggagtgaaggagacaccccagcaaaagtaccagcgcctactgcatgaggtccaagagctgacaactgaagttgaaaaaatcaagacgacagtgaaggagtcagccacagaggagaagctgacccctgtgttgctggctaaacagctggcagccctgaagcagcagctggttgcttcccacctggagaagctgctgggaccagatgctgcaatcaaccttaccgaccccgatggcgccctggctaagcgcctactactgcagctggaagcaacaaagaacagcaaagggggatcagggggaaaaaccactgggacccccccagatagcagccttgtcacttatgaactacattctcggcctgagcaggacaagttctctcaagctgccaaagtcgcagaacttgaaaagcgcctgacagagctggagacagctgtacgttgtgatcaggatgctcagaatcccctttctgcaggtctacagggagcctgtctcatggagactgtagagctgttgcaagcaaaggtgagcgccctagaccttgcagttttggatcaagtggaggctcggctacagagtgtcctgggaaaggtgaacgagattgccaagcataaagcctctgtagaagatgcagatacacaaagcaaggtgcaccagctatatgaaactatacagcgctggagccccattgcctccaccctccctgagctggtgcagagacttgtcaccatcaagcagctgcacgagcaagccatgcagtttggtcagctcctgacacacttggataccacccagcagatgattgctaattccttgaaggacaataccaccctcttgacccaggtgcagacaaccatgcgtgaaaacctggccacagttgaggggaactttgccagcattgatgaacggatgaagaagctgggaaagtgagcacatttgggagctggagaacaggggttatccctacccctgtgaactctgttaacagcttacatagggtttcccctttactataactctagcatccccatcccatttgacactgggggcaagggttcttcttgcatgtggggtttatacccctcccctgatgaatacagagtggtagctaggggttggttatcatcagaaggtggtctcccctcaggcctgggggataaggacgtgggcccagccacatgccaactcatgtccaatactgctttgcctggtgtggggaaggattgggtcttgtcccccaacacagcttctgtggctgactgtaatactgtacaactgtttctgaccattaaatgctgttgtactctg

SEQ ID NO: 3662 - protein, 401 aa, Homosapiens; identical to SEQ ID NO: 3646

SEQ ID NO: 3663 - DNA, 361 bp, Homosapiens
atcaaagggcttcagttacagggatcagctagtgggttcccagctagaaccaggaaagatgggagaagacgataatcatggagatataaggaccactcacttcttcccttcctttcccaccagaatcccctttctgcaggtctacagggagcctgtctcatggagactgtagagctgttgcaagcaaaggtgagcgccctagaccttgcagttttggatcaagtggaggctcggctacagagtgtcctgggaaaggtgaacgagattgccaagcataaagcctctgtagaagatgcagatacacaaagcaaggtcaggaagacaccttccccatctcctttccactccctcaggttctccg

SEQ ID NO: 3664 - protein, 66 aa, Homosapiens
METVELLQAKVSALDLAVLDQVEARLQSVLGKVNEIAKHKASVEDADTQSKVRKTPSPSPFHSLRF

SEQ ID NO: 3665 - DNA, 696 bp, Homosapiens
actgctgtcgcgagacttcctgctcatctgccgctccctttgccgccgccttagcccgggacccgaacccagcctctcccctacccgaacaccggccccggctccaccgaggcccgggtcccccagcccgtctcgccgccgccatggcggaccctaaatacgccgaccttcccggcattgccaggaatgagccagatgtttatgaaactagcgacctacctgaggatgatcaagcggagttcgatgcggaggagctgacaagcacaagtgtggaacacatcattgtcaatcctaatgctgcctatgacaagttcaaggacaagagagtggggacaaagggacttgatttctcagatcgtattggaaaaaccaagaggacaggatatgaatctggagaatatgagatgcttggagagggtctgggagtgaaggagacaccccagcaaaagtaccagcgcctactgcatgaggtccaagagctgacaactgaagttgaaaaaatcaaggtcgcagaacttgaaaagcgcctgacagagctggagacagctgtacgttgtgatcaggatgctcagaatcccctttctgcaggtctacagggagcctgtctcatggagactgtagagctgttgcaagcaaaggtgagcgccctagaccttgcagttttggatcaagtggaggctcggctacagagtgtcc

SEQ ID NO: 3666 - protein, 183 aa, Homosapiens
MADPKYADLPGIARNEPDVYETSDLPEDDQAEFDAEELTSTSVEHIIVNPNAAYDKFKDKRVGTKGLDFSDRIGKTKRTGYESGEYEMLGEGLGVKETPQQKYQRLLHEVQELTTEVEKIKVAELEKRLTELETAVRCDQDAQNPLSAGLQGACLMETVELLQAKVSALDLAVLDQVEARLQS

SEQ ID NO: 3667 - DNA, 5793 bp, Homosapiens
gaggggcggagaggcagagagcccgaaaggaccagacgcccaggtcgcccgcatcccgctgccgcaggagagagacagcgcgccccggccctgctccccaggcttcgcccgggcgccctcaactctgtccccagagactgagcacctgtcctccgcctcggcctctgctgagagccctctcctctggagcacacaccacccctgcagcccaagaagagtcccagccccacgccggctaccaccatggcggagaccaacaacgaatgtagcatcaaggtgctctgccgattccggcccctgaaccaggctgagattctgcggggagacaagttcatccccattttccaaggggacgacagcgtcgttattggggggaagccatatgtttttgaccgtgtattccccccaaacacgactcaagagcaagtttatcatgcatgtgccatgcagattgtcaaagatgtccttgctggctacaatggcaccatttttgcttatggacagacatcctcagggaaaacacataccatggagggaaagctgcacgaccctcagctgatgggaatcattcctcgaattgcccgagacatcttcaaccacatctactccatggatgagaaccttgagttccacatcaaggtttcttactttgaaatttacctggacaaaattcgtgaccttctggatgtgaccaagacaaatctgtccgtgcacgaggacaagaaccgggtgccatttgtcaagggttgtactgaacgctttgtgtccagcccggaggagattctggatgtgattgatgaagggaaatcaaatcgtcatgtggctgtcaccaacatgaatgaacacagctctcggagccacagcatcttcctcatcaacatcaagcaggagaacatggaaacggagcagaagctcagtgggaagctgtatctggtggacctggcagggagtgagaaggtcagcaagactggagcagagggagccgtgctggacgaggcaaagaatatcaacaagtcactgtcagctctgggcaatgtgatctccgcactggctgagggcactaaaagctatgttccatatcgtgacagcaaaatgacaaggattctccaggactctctcgggggaaactgccggacgactatgttcatctgttgctcaccatccagttataatgatgcagagaccaagtccaccctgatgtttgggcagcgggcaaagaccattaagaacactgcctcagtaaatttggagttgactgctgagcagtggaagaagaaatatgagaaggagaaggagaagacaaaggcccagaaggagacgattgcgaagctggaggctgagctgagccggtggcgcaatggagagaatgtgcctgagacagagcgcctggctggggaggaggcagccctgggagccgagctctgtgaggagacccctgtgaatgacaactcatccatcgtggtgcgcatcgcgcccgaggagcggcagaaatacgaggaggagatccgccgtctctataagcagcttgacgacaaggatgatgaaatcaaccaacaaagccaactcatagagaagctcaagcagcaaatgctggaccaggaagagctgctggtgtccacccgaggagacaacgagaaggtccagcgggagctgagccacctgcaatcagagaacgatgccgctaaggatgaggtgaaggaagtgctgcaggccctggaggagctggctgtgaactatgaccagaagtcccaggaggtggaggagaagagccagcagaaccagcttctggtggatgagctgtctcagaaggtggccaccatgctgtccctggagtctgagttgcagcggctacaggaggtcagtggacaccagcgaaaacgaattgctgaggtgctgaacgggctgatgaaggatctgagcgagttcagtgtcattgtgggcaacggggagattaagctgccagtggagatcagtggggccatcgaggaggagttcactgtggcccgactctacatcagcaaaatcaaatcagaagtcaagtctgtggtcaagcggtgccggcagctggagaacctccaggtggagtgtcaccgcaagatggaagtgaccgggcgggagctctcatcctgccagctcctcatctctcagcatgaggccaagatccgctcgcttacggaatacatgcagagcgtggagctaaagaagcggcacctggaagagtcctatgactccttgagcgatgagctggccaagctccaggcccaggaaactgtgcatgaagtggccctgaaggacaaggagcctgacactcaggatgcagatgaagtgaagaaggctctggagctgcagatggagagtcaccgggaggcccatcaccggcagctggcccggctccgggacgagatcaacgagaagcagaagaccattgatgagctcaaagacctaaatcagaagctccagttagagctagagaagcttcaggctgactacgagaagctgaagagcgaagaacacgagaagagcaccaagctgcaggagctgacatttctgtacgagcgacatgagcagtccaagcaggacctcaagggtctggaggagacagttgcccgggaactccagaccctccacaaccttcgcaagctgttcgttcaagacgtcacgactcgagtcaagaaaagtgcagaaatggagcccgaagacagtggggggattcactcccaaaagcagaagatttcctttcttgagaacaacctggaacagcttacaaaggttcacaaacagctggtacgtgacaatgcagatctgcgttgtgagcttcctaaattggaaaaacgacttagggctacggctgagagagttaaggccctggagggtgcactgaaggaggccaaggagggcgccatgaaggacaagcgccggtaccagcaggaggtggaccgcatcaaggaggccgttcgctacaagagctcgggcaaacggggccattctgcccagattgccaaacccgtccggcctggccactacccagcatcctcacccaccaacccctatggcacccggagccctgagtgcatcagttacaccaacagcctcttccagaactaccagaatctctacctgcaggccacacccagctccacctcagatatgtactttgcaaactcctgtaccagcagtggagccacatcttctggcggccccttggcttcctaccagaaggccaacatggacaatggaaatgccacagatatcaatgacaataggagtgacctgccgtgtggctatgaggctgaggaccaggccaagcttttccctctccaccaagagacagcagccagctaatctcccacacccacggctgcatacctgcactttcagtttctaagagggactgaggcctcttctcagcatgctgcaaacctgtggtctctgatactaactccctccccaacccctgttgttggactgtactatgtttgatgtcttctcttacttactctgtatctctttgtactctgtatctatatatcaaaagctgctgctatgtctctcttctgtcttattctcaagtatctactgatgtatttagcaatttcaaagcatagtctaccttccttatttggggcaatagggaggagggtgaatgtttcttctttctcatctactcgtctcacactgagtggtgttagtcactgagtagaggtcacagagatgacaaaaggaaaaatgggagctagagggttgtgacccttcatacacacacgcacgcacgcacacaaacatgcacacacgcatgcacacacacaaagccttaagcagaagaatgtcttagcatcatgagacagagaaatagactcttcctccctcctctttcacatatagcacaggggaaggtaaaatggaagggctgctaattgagacatataattttcttcatacacccctcaccttaatcaaaggattcaggtgttacttctgccctacaaagtctgccttttgcctccctcttcctgttttcccctggactgagaaatgggttgctcaagggaccatttccctttttcttcaagctccttttgatattccctgccccagagctcatgaccagaacccagagctgatttaaaatattttgaaaaatggaggaggcagactgctcccagcagcctgtcaatggctgctcatctgtccatggagatggttacaggcaggtgtagtcaaaatgattgattccttgggtttgggggtgaataggctgggaaatttctgagccttttttttttgtcacagtgccctcaagttgaagtgatgagctggatttctttcttgttccatactgggcggcatgctcctcccatctccaccccttggtttgggggcttccagctcattggcaaaatctctctagttgccttcctttcaagctggagcctgacttttccccaatgtacattttttttttctccacaaagagttccttctctaatgtccccatctggtattaagtgcactttaaagaaaggggcagggtggattttcaagaggtgggaagctctaaggcttgaccctgaggggtcttctcccagccattctcagcccatatgcagcaccctccatactgaagaggactgttgttttagtttcagacggtcctttccttccacatggtgctaaggtggttttctaggtaactgcagggatggaggtcactagccattccaaaccaggagagaaagtctggtgtcctgatatccagtcttttctaggaggaagaccaagattctccagcggcagggcagcctatcacccaacttctaagtcaggaaaggaagctgagtgggaatgccagctggtaagcgcaggctgcactggcccatgactccttcaaggaaaagaggccctgctccctttacctgctgagctccttttagcagttagggagaactgcagggggaaaaataccagtggagtgtggaataaatccaaagcagtgatttttaaatgtttttcaaaaacaaatcttacatagaaccccaatataaaaaataaagtaatgcagacctgggcagtttgcatttttttttttttttttttttggtggaagaagtctcagcgtctcttaggactgactgttcaaaggctcctcagcaaatgagcccttgaacagtcctaagagaccctgaggattctgtggagtagtttgaaaaccattgttctgaggaagggggtccaatctggctcctctgcactaaagctgcaactcatggaaaagagggcaacggtggggtagacaagccatgctgtctccagacccactagggtggaaggaaggttcctgtgggcctgtggacttaggctaatatttgctgtcagcagggcacttaagaatccagggggttttatgtaatgttgccaccacatggttcttttaaaaacacataaggaaatgtgagggtgtagcgcagatgaggagagagatgacacagagggagcagccttctctttagcaagatgtaagggaaatataattcacttacataaaaaagaaacaacacacacgcaaacccttcaccagaagcttcacactacatcctcctcctcctcctgctccccaccttcaccgcatccctttcagagccagggtcactgcaaggggcacctggcctgcccactcacatctgccaaaatgttgcatgccagcgtggaagacaaaccaaactgcgcaaccccctgtgtgtatttacttggtgtacatagataactttaaaataaaataaattcaatgataactct

SEQ ID NO: 3668 - protein, 1032 aa, Homosapiens; identical to SEQ ID NO: 500

SEQ ID NO: 3669 - DNA, 3037 bp, Homosapiens
tcgccctgttcgcgcgtccgctgtccggcctccggtcacgtgacagcagcgcaggtgagcgccgcttccggggtcgggcgcctggatagctgccggctccggcttccacttggtcggttgcgcgggagactatggcgtcctcctcggtcccaccagccacggtatcggcggcgacagcaggccccggcccaggtttcggcttcgcctccaagaccaagaagaagcatttcgtgcagcagaaggtgaaggtgttccgggcggccgacccgctggtgggtgtgttcctgtggggcgtagcccactcgatcaatgagctcagccaggtgcctcccccggtgatgctgctgccagatgactttaaggccagctccaagatcaaggtcaacaatcaccttttccacagggaaaatctgcccagtcatttcaagttcaaggagtattgtccccaggtcttcaggaacctccgtgatcgatttggcattgatgaccaagattacttggtgtcccttacccgaaacccccccagcgaaagtgaaggcagtgatggtcgcttccttatctcctacgatcggactctggtcatcaaagaagtatccagtgaggacattgctgacatgcatagcaacctctccaactatcaccagtacattgtgaagtgccatggcaacacgcttctgccccagttcctggggatgtaccgagtcagtgtggacaacgaagacagctacatgcttgtgatgcgcaatatgtttagccaccgtcttcctgtgcacaggaagtatgacctcaagggttccctagtgtcccgggaagccagcgataaggaaaaggttaaagaattgcccacccttaaggatatggactttctcaacaagaaccagaaagtatatattggtgaagaggagaagaaaatatttctggagaagctgaagagagatgtggagtttctagtgcagctgaagatcatggactacagccttctgctaggcatccacgacatcattcggggctctgaaccagaggaggaagcgcccgtgcgggaggatgagtcagaggtggatggggactgcagcctgactggacctcctgctcttgtgggctcctatggcacctccccagagggtatcggaggctacatccattcccatcggcccctgggcccaggagagtttgagtccttcattgatgtctatgccatccggagtgctgaaggagccccccagaaggaggtctacttcatgggcctcattgatatccttacacagtatgatgctaagaagaaagcagctcatgcagccaaaactgtcaagcatggggctggggcagagatctctactgtccatccggagcagtatgctaagcgattcctggattttattaccaacatctttgcctaagagactgcctggttctctctgatgttcaaggtggtggggttctgagacacttgggggaattgtggggatattctagccaccagttctcttcttcctttgctaaattcaggctgcaggctccttccatccagataactccatcctgtcgagtaggctctttctgaccctcagaaatacattgtcctttttcctctttgcccatttttcttccctctcttcctccccatgagaagtctgcttgtagtattagaatgttattgttgactctctcccaagtgccttgatctttgtaatatctcctgttgtttctatgatataggagctaggggaagggggttgtttgccttcttcaggacctgactggacagatggacctggctcaagcaactactctggatgcactttgctgtgtgggatgaactaaaagtgtctgaattttgctgataactttataaaactcactatggcatgcttccctcctggtgggccctaggatggatgacactcaagatactacagatgtgggtgcaggcatgcacacacacgatggaatatggccattcctacacaggtggggtagagagtgggtcagcagcctggcacctcacagaggtgggacctaagaggactcatgattatgcagagaattggattgggtctctgtcatagattgagtaatctcttcccttacctcaattccatctccacccatctctacatctgggcacagcaacccagagatggccaaaagcattcaagcctgggggaagatgtttgactattgctgctcttcaccagaacctcacacctctcctgggactggaacccttcagtgggtgtgtggccagttttggaggctggaatgatgggccagggtgtaggattcattctccatgtaaagtttcctttcatcctgcctagccatccccaaggtttatttccagaagaaaggaatatctctacttggatcaattctggtcatttcaagaggatggaggcctcaagtgtgggaacttcccctactccctggatgtgtgtacctagcacacttccttctcccacccctttttccagttggatttgtttttctgttctcttctgtcctgtcttatactgcaactgtgtctcctaggggacagatggccttctttgtcatcttcactctccacccccagagaggagtcagagccataactcaatcactcagcccctccaaagatagttgatgtgtgataatctcataatgttgagaaccctgatgagatacattgtcttcctctccctacaatgcctctggggccaaggcacccattcttcttgctatcctccatcccccttgaggcttccactttttttttttttagacataaagctgggcatcagcaactggcctgtggtgatgcaaagctgctttgctctgtatctggctggactgatctgtctcacaagaagccatgaggccatagggagaagctccctctccccttcatcttctgctccaaaggtggtagcaagaggagtacccagttaggggttggagcccccatataacatcttcctgtcagaagactgatggatctttttcattccaaccatctccctttcccccgatgaatgcaataaaactctgtgacaccagc

SEQ ID NO: 3670 - protein, 421 aa, Homosapiens
MASSSVPPATVSAATAGPGPGFGFASKTKKKHFVQQKVKVFRAADPLVGVFLWGVAHSINELSQVPPPVMLLPDDFKASSKIKVNNHLFHRENLPSHFKFKEYCPQVFRNLRDRFGIDDQDYLVSLTRNPPSESEGSDGRFLISYDRTLVIKEVSSEDIADMHSNLSNYHQYIVKCHGNTLLPQFLGMYRVSVDNEDSYMLVMRNMFSHRLPVHRKYDLKGSLVSREASDKEKVKELPTLKDMDFLNKNQKVYIGEEEKKIFLEKLKRDVEFLVQLKIMDYSLLLGIHDIIRGSEPEEEAPVREDESEVDGDCSLTGPPALVGSYGTSPEGIGGYIHSHRPLGPGEFESFIDVYAIRSAEGAPQKEVYFMGLIDILTQYDAKKKAAHAAKTVKHGAGAEISTVHPEQYAKRFLDFITNIFA

SEQ ID NO: 3671 - DNA, 3218 bp, Homosapiens
tcgccctgttcgcgcgtccgctgtccggcctccggtcacgtgacagcagcgcaggtgagcgccgcttccggggtcgggcgcctggatagctgccggctccggcttccacttggtcggttgcgcgggagactatggcgtcctcctcggtcccaccagccacggtatcggcggcgacagcaggccccggcccaggtttcggcttcgcctccaagaccaagaagaagcatttcgtgcagcagaaggtgaaggtgttccgggcggccgacccgctggtgggtgtgttcctgtggggcgtagcccactcgatcaatgagctcagccaggtgcctcccccggtgatgctgctgccagatgactttaaggccagctccaagatcaaggtcaacaatcaccttttccacagggaaaatctgcccagtcatttcaagttcaaggagtattgtccccaggtcttcaggaacctccgtgatcgatttggcattgatgaccaagattacttggtgtcccttacccgaaacccccccagcgaaagtgaaggcagtgatggtcgcttccttatctcctacgatcggactctggtcatcaaagaagtatccagtgaggacattgctgacatgcatagcaacctctccaactatcaccagtacattgtgaagtgccatggcaacacgcttctgccccagttcctggggatgtaccgagtcagtgtggacaacgaagacagctacatgcttgtgatgcgcaatatgtttagccaccgtcttcctgtgcacaggaagtatgacctcaagggttccctagtgtcccgggaagccagcgataaggaaaaggttaaagaattgcccacccttaaggatatggactttctcaacaagaaccagaaagtatatattggtgaagaggagaagaaaatatttctggagaagctgaagagagatgtggagtttctagtgcagctgaagatcatggactacagccttctgctaggcatccacgacatcattcggggctctgaaccagaggaggaagcgcccgtgcgggaggatgagtcagaggtggatggggactgcagcctgactggacctcctgctcttgtgggctcctatggcacctccccagagggtatcggaggctacatccattcccatcggcccctgggcccaggagagtttgagtccttcattgatgtctatgccatccggagtgctgaaggagccccccagaaggaggtctacttcatgggcctcattgatatccttacacagtatgatgctaagaagaaagcagctcatgcagccaaaactgtcaagcatggggctggggcagagatctctactgtccatccggagcagtatgctaagcgattcctggattttattaccaacatctttgcctaagagactgcctggttctctctgatgttcaaggtggtggggttctgagacacttgggggaattgtggggatattctagccaccagttctcttcttcctttgctaaattcaggctgcaggctccttccatccagataactccatcctgtcgagtaggctctttctgaccctcagaaatacattgtcctttttcctctttgcccatttttcttccctctcttcctccccatgagaagtctgcttgtagtattagaatgttattgttgactctctcccaagtgccttgatctttgtaatatctcctgttgtttctatgatataggagctaggggaagggggttgtttgccttcttcaggacctgactggacagatggacctggctcaagcaactactctggatgcactttgctgtgtgggatgaactaaaagtgtctgaattttgctgataactttataaaactcactatggcatgcttccctcctggtgggccctaggatggatgacactcaagatactacagatgtgggtgcaggcatgcacacacacgatggaatatggccattcctacacaggtggggtagagagtgggtcagcagcctggcacctcacagaggtgggacctaagaggactcatgattatgcagagaattggattgggtctctgtcatagattgagtaatctcttcccttacctcaattccatctccacccatctctacatctgggcacagcaacccagagatggccaaaagcattcaagcctgggggaagatgtttgactattgctgctcttcaccagaacctcacacctctcctgggactggaacccttcagtgggtgtgtggccagttttggaggctggaatgatgggccagggtgtaggattcattctccatgtaaagtttcctttcatcctgcctagccatccccaaggtttatttccagaagaaaggaatatctctacttggatcaattctggtcatttcaagaggatggaggcctcaagtgtgggaacttcccctactccctggatgtgtgtacctagcacacttccttctcccacccctttttccagttggatttgtttttctgttctcttctgtcctgtcttatactgcaactgtgtctcctaggggacagatggccttctttgtcatcttcactctccacccccagagaggagtcagagccataactcaatcactcagcccctccaaagatagttgatgtgtgataatctcataatgttgagaaccctgatgagatacattgtcttcctctccctacaatgcctctggggccaaggcacccattcttcttgctatcctccatcccccttgaggcttccactttttttttttttagacataaagctgggcatcagcaactggcctgtggtgatgcaaagctgctttgctctgtatctggctggactgatctgtctcacaagaagccatgaggccatagggagaagctccctctccccttcatcttctgctccaaaggtggtagcaagaggagtacccagttaggggttggagcccccatataacatcttcctgtcagaagactgatggatctttttcattccaaccatctccctttcccccgatgaatgcaataaaactctgtgacaccagcaaccattgctctttagaaatgggttttctgatcatatggctgatgtgttatgggcagtatggatgtcttcatttgttgcttctgtttttcatcttttttgttttattaataaaaatttatgtatttgctcctgttactataataatacagggaataaattattcaatccaaatttctgtac

SEQ ID NO: 3672 - protein, 421 aa, Homosapiens; identical to SEQ ID NO: 3670

SEQ ID NO: 3673 - DNA, 2929 bp, Homosapiens
tcgccctgttcgcgcgtccgctgtccggcctccggtcacgtgacagcagcgcaggtgagcgccgcttccggggtcgggcgcctggatagctgccggctccggcttccacttggtcggttgcgcgggagactatggcgtcctcctcggtcccaccagccacggtatcggcggcgacagcaggccccggcccaggtttcggcttcgcctccaagaccaagaagaagcatttcgtgcagcagaaggtgaaggtgttccgggcggccgacccgctggtgggtgtgttcctgtggggcgtagcccactcgatcaatgagctcagccaggtgcctcccccggtgatgctgctgccagatgactttaaggccagctccaagatcaaggtcaacaatcaccttttccacagggaaaatctgcccagtcatttcaagttcaaggagtattgtccccaggtcttcaggaacctccgtgatcgatttggcattgatgaccaagattacttggtgtcccttacccgaaacccccccagcgaaagtgaaggcagtgatggtcgcttccttatctcctacgatcggactctggtcatcaaagaagtatccagtgaggacattgctgacatgcatagcaacctctccaactatcaccagtacattgtgaagtgccatggcaacacgcttctgccccagttcctggggatgtaccgagtcagtgtggacaacgaagacagctacatgcttgtgatgcgcaatatgtttagccaccgtcttcctgtgcacaggaagtatgacctcaagggttccctagtgtcccgggaagccagcgataaggaaaaggttaaagaattgcccacccttaaggatatggactttctcaacaagaaccagaaagtatatattggtgaagaggagaagaaaatatttctggagaagctgaagagagatgtggagtttctagtgcagctgaagatcatggactacagccttctgctaggcatccacgacatcattcggggctctgaaccagaggaggaagcgcccgtgcgggaggatgagtcagaggtggatggggactgcagcctgactggacctcctgctcttgtgggctcctatggcacctccccagagggtatcggaggctacatccattcccatcggcccctgggcccaggagagtttgagtccttcattgatgtctatgccatccggagtgctgaaggagccccccagaaggaggtctacttcatgggcctcattgatatccttacacagtatgatgctaagaagaaagcagctcatgcagccaaaactgtcaagcatggggctggggcagagatctctactgtccatccggagcagtatgctaagcgattcctggattttattaccaacatctttgcctaagagactgcctggttctctctgatgttcaaggagctaggggaagggggttgtttgccttcttcaggacctgactggacagatggacctggctcaagcaactactctggatgcactttgctgtgtgggatgaactaaaagtgtctgaattttgctgataactttataaaactcactatggcatgcttccctcctggtgggccctaggatggatgacactcaagatactacagatgtgggtgcaggcatgcacacacacgatggaatatggccattcctacacaggtggggtagagagtgggtcagcagcctggcacctcacagaggtgggacctaagaggactcatgattatgcagagaattggattgggtctctgtcatagattgagtaatctcttcccttacctcaattccatctccacccatctctacatctgggcacagcaacccagagatggccaaaagcattcaagcctgggggaagatgtttgactattgctgctcttcaccagaacctcacacctctcctgggactggaacccttcagtgggtgtgtggccagttttggaggctggaatgatgggccagggtgtaggattcattctccatgtaaagtttcctttcatcctgcctagccatccccaaggtttatttccagaagaaaggaatatctctacttggatcaattctggtcatttcaagaggatggaggcctcaagtgtgggaacttcccctactccctggatgtgtgtacctagcacacttccttctcccacccctttttccagttggatttgtttttctgttctcttctgtcctgtcttatactgcaactgtgtctcctaggggacagatggccttctttgtcatcttcactctccacccccagagaggagtcagagccataactcaatcactcagcccctccaaagatagttgatgtgtgataatctcataatgttgagaaccctgatgagatacattgtcttcctctccctacaatgcctctggggccaaggcacccattcttcttgctatcctccatcccccttgaggcttccactttttttttttttagacataaagctgggcatcagcaactggcctgtggtgatgcaaagctgctttgctctgtatctggctggactgatctgtctcacaagaagccatgaggccatagggagaagctccctctccccttcatcttctgctccaaaggtggtagcaagaggagtacccagttaggggttggagcccccatataacatcttcctgtcagaagactgatggatctttttcattccaaccatctccctttcccccgatgaatgcaataaaactctgtgacaccagcaaccattgctctttagaaatgggttttctgatcatatggctgatgtgttatgggcagtatggatgtcttcatttgttgcttctgtttttcatcttttttgttttattaataaaaatttatgtatttgctcctgttactataataatacagggaataaattattcaatccaaatttctgtac

SEQ ID NO: 3674 - protein, 421 aa, Homosapiens; identical to SEQ ID NO: 3670

SEQ ID NO: 3675 - DNA, 2223 bp, Homosapiens
tttggggaggaagggcaggggcttgcggatagaagggggtcaaaggaacggtgattatcacctgtgaggggaaagggggtgctgtcctccctccttcccttttcctcagcctgcaccccctgcaatcccccacctttcggggtctccccctccttgttgctaaggcccggaccgtcatcccagcaacagcctcagtcatgtgaccggcaatggcggcgctgacgagagctgcatttggaagtgttgtggagacagccccgtagcccaatgcgaccagactcagggaaaacatcaggcccctccagctgagcccttgtgtgagccccgcccctccctaaatgccagacttgggagctgacagacagcactgcctgtgctgggtttaaaagtcctggtcagctgagtggaaatagaaggatttctgctgccatcatcttccatgggctttccaggtcacacgacctacaagtagggagcagggaaagaagagtgagcctgcatgccaattctaagctcttcaggatcaaatgtcgttcgtcctgtccagaatggcagcctgtggaggcacctgcaagaacaaagtgactgtgtccaagcccgtgtgggacttcctgagcaaagagaccccagcccggctggcccggcttcgggaggagcaccgtgtgtccatcctcatagatggcgagacttctgacatctatgttctccagctttccccacagggtcctcccccggcccctccaaatgggctctacctagcccggaaggctctcaaggggctgctaaaagaggcagagaaagagctgaagaaagctcagaggcagggggagctgatgggctgcctggctctggggggtggaggggagcaccctgagatgcaccgcgcaggcccaccccctctccgagcagccccacttctgcccccaggagctcgggggctcccccctcctcctccccccctgcccccacctcttcctcctcgccttcgggaggaggcagaagagcaggagagcacctgccccatctgtctgggggagatccagaatgccaagacattggagaagtgccggcattcattctgcgagggctgcatcacccgggctctgcaggtgaaaaaggcctgccccatgtgcggccgcttctatgggcagctggtgggcaaccagccccagaatgggcggatgctggtctctaaggacgccaccctcctactgcccagctatgagaagtacggcaccattgtcatccagtacgtcttcccgcccggtgtccagggggctgaacacccaaacccaggagttcggtatcctggcaccacacgggtggcctacctcccggactgccctgagggcaacaaggtgctgaccctgttccgcaaggcgtttgaccagcgtctcaccttcactatcggcacgtccatgaccacagggagaccgaatgtcatcacctggaacgacatccaccacaagaccagctgcacagggggaccccagctgtttgggtacccagaccccacctacctgacccgggtgcaagaggagctgagagcgaagggtatcacagatgactgaaggacatcgcctttgccaaggcccctgctgtctgcctctactaggacccagcagaagcctctttctcctctctgccccctgccccccacaccacacctgtaggggacctgtctgactgggaagggagttccgagagggagggggcaatcccttcccccatcccccactggccaagtgtttcaatgcagtgtgagccactcccttctggcagaggccgacctccaaggctctgttctcccctccccgtgtacatatactcccggtttccctgcccctccattgcccttggctttttctggtatgtgctgtgctccacgaccaagccgagaaaggacctagggtggggaagggagggtctcttgattcctaaccgcccccacatactgctccaccgctgaacttcgggtgccggggaggagaaattgggctgatgtgagctccccgtcacccgccatggagccggctgtgtgtgttcatcagatacagttctcccttaaccttgtcctttctctcctgtgtctcagtctccgtcagtctgtctttctccgctcttctctgacccctgtgaggaacctccttaccctgttctggaatcgctgccagactgtagcttttaatttaataaaaataaagtaaaatatgcaactcttta

SEQ ID NO: 3676 - protein, 347 aa, Homosapiens; identical to SEQ ID NO: 504

SEQ ID NO: 3677 - DNA, 3765 bp, Homosapiens
tttcggggtctccccctccttgttgctaaggcccggaccgtcatcccagcaacagcctcagtcatgtgaccggcaatggcggcgctgacgagaggtaggtgagcccggcgccccccacacccaccgcgcgccccccgggccccgctcgcacccctcacgcgccccccgctcccccggcgccccctcctccacctcccctccccgcgcgcggctccgggctccccgctccgtgcccggccgatcatctttctagcaccctccagccttggcctccattcgggggttctgagggctgcgatcgggccgacatgcacccccacccggcggtggggatccgggggctttggctactgagggatgtggggagttggttccgggtcgggtcttggaggaggccgtggggggagggcgggagctgcttcagtggatgcccccagggacccttgcccatccgggctgtgcctccctctggcctctgtctggagggagagactggttccttgtccggcctgggttgccacagaggaatcacagacccaccctaaactggggccccgcctcccttttctgtgccagcaggacttggacctaggacacctaggtcctgggtcccccgtgatggggagagaagtgttgcatcgcggatagactgtatgggctgagactctagggttccattttcacttatgaatctcgaggtgcatctggccttgggggacgatgatggaggcatgaagggacagctgctccttcttggatcagtcaataaatggaggtcacactaatggcccttctttctgtttgagctgcatttggaagtgttgtggagacagccccgtagcccaatgcgaccagactcagggaaaacatcaggcccctccagctgagcccttgtgtgagccccgcccctccctaaatgccagacttgggagctgacagacagcactgcctgtgctgggtttaaaaggtgacaatgagaactttgttattgcaggggctgctgccactttgttcacatccttaacagacttcagcagaagggactgagttagctctcaaggaaggctccctggcaataggggctgaattatttggcaatgtggagcaggcgaggagttggggagcataggaaatattccggtccatgtgatctgagggaggtggcaagaagacctccacctgtgtgggcgttttctttcctgacttctcttatgtgtgccctaggctttcttgggggcctcagagctggggaagaaaggaggaaggttagcatgttgaagttccttcttgagcaacttggggagaagctgataatggaattctgcagagaagagaggagatggaaggggagtttttatttctgggttggctgaggggaatggtaacatttgccatcataactttttacccttcccccactcccagtcctggtcagctgagtggaaatagaaggatttctgctgccatcatcttccatgggctttccaggtcacacgacctacaagtagggagcagggaaagaagagtgagcctgcatgccaattctaagctcttcaggatcaaagtaagcaaaaaggaggggcaaagagtctccctcccctttaaacagcccatttttccccaagaggtgggaggggcaagttgtttctatgatctgggagaaatgacaggagaaacaagactgatacttggcttagatgataatatagctctggaaacttttttgctcttcagtgggttttgggtttggaagataaggggagacagaatatgaatttgggtgaagggttggggattaggctttgagaaaacagaggtaatagagggtttggaaggaacctgaagtaggaggcactgatacttgtcaaatggggaccccccaccctgagtccctttcaccctgggggcagtgtcgttcgtcctgtccagaatggcagcctgtggaggcacctgcaagaacaaagtgactgtgtccaagcccgtgtgggacttcctgagcaaagagaccccagcccggctggcccggcttcgggaggagcaccgtgtgtccatcctcatagatggcgagacttctgacatctatgttctccagctttccccacagggtcctcccccggcccctccaaatgggctctacctagcccggaaggctctcaaggggctgctaaaagaggcagagaaagagctgaagaaagctcagaggcagggggagctgatgggctgcctggctctggggggtggaggggagcaccctgagatgcaccgcgcaggcccaccccctctccgagcagccccacttctgcccccaggagctcgggggctcccccctcctcctccccccctgcccccacctcttcctcctcgccttcgggaggaggcagaagagcaggagagcacctgccccatctgtctgggggagatccagaatgccaagacattggagaagtgccggcattcattctgcgagggctgcatcacccgggctctgcaggtgaaaaaggcctgccccatgtgcggccgcttctatgggcagctggtgggcaaccagccccagaatgggcggatgctggtctctaaggacgccaccctcctactgcccagctatgagaagtacggcaccattgtcatccagtacgtcttcccgcccggtgtccagggggtaagaagaccatggcctgcccttaccctttggctttccccaagctctgacctaggaaaaccgggtgagggtgagtgtgcttgttagatgtgagacagtcttgctgtcttccactgtgccctcctactcagtgccctggacctaggaggtccccgtgaggcccagcctttccatccctgtgatcccaaggcacacgtgaaaatcagatatgagctaggaaaaaaaaaagcaaatcagatatgagaggaaggaattgcatattatttccttgatgaacacaaatactgtgctgacatcttggcagaggtaaattctgtggaggtggtggcttaggggaagggaggcacaataggaagggatctgaccaacccaacagagccaggagcatcactctgtaaaaacaggagtagtcaaggcctataggtgtcttcctgctggacaaagagtaatgtgcaattctggctgcagaggggtgaagaagctgcacagaagagtgatggaaaatggaacaagttagacagtggcagaaacattaggagtattttcaggtgaagggaaggctgaaagatagattattctgtcttcacatttttgctgagttgtctggagtgtagggaccagctaacttccatcacttctgagaatccatttgttgctgaatggagacttgagggattgagacagcagaaaaaatctcttaacacataaggattatgctctgaaacaggctcttgctgccgaggccgtataatctctccttctgtggaaagctgtcagcctgttgctgccccgttcgcattagctgggggtgctcagacagagactagcctggatgaccctcctctggcatctgggccttaggatgcctggctgctcactgcccactctgcttcaccttcctcccaggctgaacacccaaacccaggagttcggtatcctggcaccacacgggtggcctacctcccggactgccctgagggcaacaaggtgctgaccctgttccgcaaggcgtttgaccagcgtctcaccttcactatcggcacgtccatgaccacagggagaccgaatgtcatcacctggaacgacatccaccacaagaccagctg

SEQ ID NO: 3678 - protein, 144 aa, Homosapiens
MEGEFLFLGWLRGMVTFAIITFYPSPTPSPGQLSGNRRISAAIIFHGLSRSHDLQVGSRERRVSLHANSKLFRIKVSKKEGQRVSLPFKQPIFPQEVGGASCFYDLGEMTGETRLILGLDDNIALETFLLFSGFWVWKIRGDRI

SEQ ID NO: 3679 - DNA, 3259 bp, Homosapiens
tttcggggtctccccctccttgttgctaaggcccggaccgtcatcccagcaacagcctcagtcatgtgaccggcaatggcggcgctgacgagaggtaggtgagcccggcgccccccacacccaccgcgcgccccccgggccccgctcgcacccctcacgcgccccccgctcccccggcgccccctcctccacctcccctccccgcgcgcggctccgggctccccgctccgtgcccggccgatcatctttctagcaccctccagccttggcctccattcgggggttctgagggctgcgatcgggccgacatgcacccccacccggcggtggggatccgggggctttggctactgagggatgtggggagttggttccgggtcgggtcttggaggaggccgtggggggagggcgggagctgcttcagtggatgcccccagggacccttgcccatccgggctgtgcctccctctggcctctgtctggagggagagactggttccttgtccggcctgggttgccacagaggaatcacagacccaccctaaactggggccccgcctcccttttctgtgccagcaggacttggacctaggacacctaggtcctgggtcccccgtgatggggagagaagtgttgcatcgcggatagactgtatgggctgagactctagggttccattttcacttatgaatctcgaggtgcatctggccttgggggacgatgatggaggcatgaagggacagctgctccttcttggatcagtcaataaatggaggtcacactaatggcccttctttctgtttgagctgcatttggaagtgttgtggagacagccccgtagcccaatgcgaccagactcagggaaaacatcaggcccctccagctgagcccttgtgtgagccccgcccctccctaaatgccagacttgggagctgacagacagcactgcctgtgctgggtttaaaaggtgacaatgagaactttgttattgcaggggctgctgccactttgttcacatccttaacagacttcagcagaagggactgagttagctctcaaggaaggctccctggcaataggggctgaattatttggcaatgtggagcaggcgaggagttggggagcataggaaatattccggtccatgtgatctgagggaggtggcaagaagacctccacctgtgtgggcgttttctttcctgacttctcttatgtgtgccctaggctttcttgggggcctcagagctggggaagaaaggaggaaggttagcatgttgaagttccttcttgagcaacttggggagaagctgataatggaattctgcagagaagagaggagatggaaggggagtttttatttctgggttggctgaggggaatggtaacatttgccatcataactttttacccttcccccactcccagtcctggtcagctgagtggaaatagaaggatttctgctgccatcatcttccatgggctttccaggtcacacgacctacaagtagggagcagggaaagaagagtgagcctgcatgccaattctaagctcttcaggatcaaatgtcgttcgtcctgtccagaatggcagcctgtggaggcacctgcaagaacaaagtgactgtgtccaagcccgtgtgggacttcctgagcaaagagaccccagcccggctggcccggcttcgggaggagcaccgtgtgtccatcctcatagatggcgagacttctgacatctatgttctccagctttccccacagggtcctcccccggcccctccaaatgggctctacctagcccggaaggctctcaaggggctgctaaaagaggcagagaaagagctgaagaaagctcagaggcagggggagctgatgggctgcctggctctggggggtggaggggagcaccctgagatgcaccgcgcaggcccaccccctctccgagcagccccacttctgcccccaggagctcgggggctcccccctcctcctccccccctgcccccacctcttcctcctcgccttcgggaggaggcagaagagcaggagagcacctgccccatctgtctgggggagatccagaatgccaagacattggagaagtgccggcattcattctgcgagggctgcatcacccgggctctgcaggtgaaaaaggcctgccccatgtgcggccgcttctatgggcagctggtgggcaaccagccccagaatgggcggatgctggtctctaaggacgccaccctcctactgcccagctatgagaagtacggcaccattgtcatccagtacgtcttcccgcccggtgtccagggggctgaacacccaaacccaggagttcggtatcctggcaccacacgggtggcctacctcccggactgccctgagggcaacaaggtgctgaccctgttccgcaaggcgtttgaccagcgtctcaccttcactatcggcacgtccatgaccacagggagaccgaatgtcatcacctggaacgacatccaccacaagaccagctgcacagggggaccccagctgtttgggtacccagaccccacctacctgacccgggtgcaagaggagctgagagcgaagggtatcacagatgactgaaggacatcgcctttgccaaggcccctgctgtctgcctctactaggacccagcagaagcctctttctcctctctgccccctgccccccacaccacacctgtaggggacctgtctgactgggaagggagttccgagagggagggggcaatcccttcccccatcccccactggccaagtgtttcaatgcagtgtgagccactcccttctggcagaggccgacctccaaggctctgttctcccctccccgtgtacatatactcccggtttccctgcccctccattgcccttggctttttctggtatgtgctgtgctccacgaccaagccgagaaaggacctagggtggggaagggagggtctcttgattcctaaccgcccccacatactgctccaccgctgaacttcgggtgccggggaggagaaattgggctgatgtgagctccccgtcacccgccatggagccggctgtgtgtgttcatcagatacagttctcccttaaccttgtcctttctctcctgtgtctcagtctccgtcagtctgtctttctccgctcttctctgacccctgtgaggaacctccttaccctgttctggaatcgctgccagactgtagcttttaatttaataaaaataaagtaaaatatgcaactcttta

SEQ ID NO: 3680 - protein, 347 aa, Homosapiens; identical to SEQ ID NO: 504

SEQ ID NO: 3681 - DNA, 2308 bp, Homosapiens
aagaatgggggctcgcggtggggtcgggggtctttcggggccttcaggagggctgcacccacaactcaacttatccgaaaacgagttctgcggggcagtcgcaggaatacatgaattctattacgagggccatagccccgttctgggcgagccttttataacaatgtgggttttgacagcccccaaggagaagccctctagggttggtgggtaccgagccagagtctgaacgtacggagggagatcacagaagggatcgcgaacatgaggtcctcgccggggctctgcagcccgccacctgaagaggagactttgtcccaagcccctgagagtgaggaggaacagaagaagaaggctctggaaaggagtatgtatgtcctgagtgaactggtagaaacagagaaaatgtacgtggacgacttggggcagattgtggagggttatatggccaccatggctgctcagggggtccccgagagtcttcgaggccgtgacaggattgtgtttgggaatatccagcaaatctatgagtggcaccgagactatttcttgcaagagctacaacggtgtctgaaagatcctgattggctggctcagctattcatcaaacacgagcgccggctgcatatgtatgtggtgtactgtcagaataagcccaagtcagagcatgtggtgtcagagtttggggacagctactttgaggagctccggcagcagctggggcaccgcctgcagctgaacgacctcctcatcaaacctgtgcagcggatcatgaaataccagctgctgctcaaggattttctcaagtattacaatagagctgggatggatactgcagacctagagggcaaactgactgctcaggggaagctcttgggccaggacactttctgggtcaccgagcctgaggctggagggctgctgtcttcccgaggtcgagagaggcgcgtcttcctctttgagcaaatcatcatcttcagtgaagccctgggaggaggagtgagaggtggaacacagcctggatatgtatacaagaacacatgcgccaggtgttctgccagatgcaggaacttccacaactatggcacatcagccgagtggactttgtgagaaatgccattacccccagattgccccctctcatcttgttagcatccccagcctctgccctgaaccaaacctaattgtcctggtcttaagttctgcaacccacccactcccccagcaaacataactcctagtatgctttactcacaggcaagggaaaggatggggtttgaacccctttggcctgaatatttgtaacttcccaactggtgcgggtcattacatttgctcctccaggtcccggggctctgcatcctgagctatccaacaccactgtactttgggacccgtgggcagtttcgctgcaacctggagtggcacctggggctcggagaaggagaaaaggagacttcaaagccagatggcccaatggttgcaggagctcactgacccaaagatttgcaccgtgtgggtctgacctcatcatgtggagtgcagagggccctgatgacatgtgtgtgatgaggaccatgacccttgaacccccttacctaacgtaactaataaaatgaagctgagagctttggaatccatgaagtgagtctaggtgtttgcacagggactctggtgccccttcttttgtgcccacagcattgcagagacacaactaagaatggctttcaccaaccaccagccctcaccccagccccagagccacaagttctctctgtgggggtggggctggagcaggtacacagagtactggatctgaagatgcagatgaggggcacagtcttgggattatgtgttggggaacttccccaccccctcggtcccaagatgagaggacagtgtttccaccttaggttcttagagtccctctgggctctttggcacttggaaagtgatccccccatttcctgccccatgagaatgggcagggggaggacttggcactggctgtgggagaggttatggctccaccaggcctctgggcactggaaaaaggaggggtgtcaccaggacaacccctactgggcatcaggttctgaaaaggaagagtgaggaactagaggctcagggacagccagtagagtgctcacagggtggtggggtttgttggaaattcctggcagggacaaggaggcaggcccagcctgacagtcagaaatccccagcgggccatcactgggaggtcatgcactgcagccggtgtttgaagaagagcagccggtgtttggccatctggctctcgtccagt

SEQ ID NO: 3682 - protein, 281 aa, Homosapiens
MRSSPGLCSPPPEEETLSQAPESEEEQKKKALERSMYVLSELVETEKMYVDDLGQIVEGYMATMAAQGVPESLRGRDRIVFGNIQQIYEWHRDYFLQELQRCLKDPDWLAQLFIKHERRLHMYVVYCQNKPKSEHVVSEFGDSYFEELRQQLGHRLQLNDLLIKPVQRIMKYQLLLKDFLKYYNRAGMDTADLEGKLTAQGKLLGQDTFWVTEPEAGGLLSSRGRERRVFLFEQIIIFSEALGGGVRGGTQPGYVYKNTCARCSARCRNFHNYGTSAEWTL

SEQ ID NO: 3683 - DNA, 2562 bp, Homosapiens
ggcctgttattcagctctccgctccgctgggacccgcacagcgccagtggctcgggggtcggccctcgcctcctccccggcccgggcctagagccacccctaaccagaggccggagacagctggagcggctgccgcatcccggcccagcctcccctaccatccctcccccttccactggacatctggaccctaggcccccgcaccgacagggttccggaaaccctccccgcccagcccggcggccgggccccgcgcctctctctctctagagcccccagccctcctcaagactagacttccgcctacccctggacacctcctcccggtcccctccctccccccctcccacagcctggaccggggtaggagggagggggggtgtgcgcccggcgccgtccccgccccgccccccgtgattccccctgcatggccggcccgggtggggggcgcgggggggcccgggcgccatgcggggggggcacaaagggggtcgctgtgcctgtccccgtgtgatccgaaaagtgctggcaaaatgcggctgctgcttcgcccgggggggacgtgaatcctattccattgcgggcagtgaggggagtatatcggcttctgctgcctccggtctggctgccccctctggccccagctctggcctcagctctggcccctgttccccaggccccccagggcccgtcagtggcctgaggagatggttggatcattccaaacattgtctcagtgtggaaactgaggcagacagtggtcaggcaggaccatatgagaactggatgttggagccagctctagccacaggagaggagctgccggaactgaccttgctgaccacactgttggagggccctggagataagacgcagccacctgaagaggagactttgtcccaagcccctgagagtgaggaggaacagaagaagaaggctctggaaaggagtatgtatgtcctgagtgaactggtagaaacagagaaaatgtacgtggacgacttggggcagattgtggagggttatatggccaccatggctgctcagggggtccccgagagtcttcgaggccgtgacaggattgtgtttgggaatatccagcaaatctatgagtggcaccgagactatttcttgcaagagctacaacggtgtctgaaagatcctgattggctggctcagctattcatcaaacacgagcgccggctgcatatgtatgtggtgtactgtcagaataagcccaagtcagagcatgtggtgtcagagtttggggacagctactttgaggagctccggcagcagctggggcaccgcctgcagctgaacgacctcctcatcaaacctgtgcagcggatcatgaaataccagctgctgctcaaggattttctcaagtattacaatagagctgggatggatactgcagacctagagcaagctgtggaggtcatgtgctttgtgcccaagcgctgcaacgatatgatgacgctggggagattgcggggatttgagggcaaactgactgctcaggggaagctcttgggccaggacactttctgggtcaccgagcctgaggctggagggctgctgtcttcccgaggtcgagagaggcgcgtcttcctctttgagcaaatcatcatcttcagtgaagccctgggaggaggagtgagaggtggaacacagcctggatatgtatacaagaacagcattaaggtgagctgcctgggactggaggggaacctccaaggtgacccttgccgctttgcactgacctccagagggccagagggtgggatccagcgctatgtcctgcaggctgcagaccctgctatcagtcaggcctggatcaagcatgtggctcagatcttggagagccaacgggacttcctcaacgcattgcagtcacccattgagtaccagagacgggagagccagaccaacagcctggggcggccaagagggcctggagtggggagccctggaagaattcagcttggagatcaggcccagggcagcacacacacacccatcaatggctctctcccctctctgctgctgtcacccaaaggggaggtggccagagccctcttgccactggataaacaggcccttggtgacatcccccaggctccccatgactctcctccagtctctccaactccaaaaacccctccctgccaagccagacttgccaagctggatgaagatgagctgtaactggtgaaaaccatgggggtggtgctgactcagccgcctattccccaaggagcttcagggcagtccttctggcactgctccagaattcctccttcttggtgtgtctggagggtgggcaaggctgggagggatatcaacttggaggagaacacctagacccaaggacttttttctgcccaaggaacacagtttccttcagctcccatccctatgcatgcatcatggtccccccaaaaggaggatatgtgggtgggtgggagggctggggcaggggccagatagaaattattggttttgttttttaattttgtttttcctgttttctgagaataaaggttttgttatatcacc

SEQ ID NO: 3684 - protein, 580 aa, Homosapiens
MRGGHKGGRCACPRVIRKVLAKCGCCFARGGRESYSIAGSEGSISASAASGLAAPSGPSSGLSSGPCSPGPPGPVSGLRRWLDHSKHCLSVETEADSGQAGPYENWMLEPALATGEELPELTLLTTLLEGPGDKTQPPEEETLSQAPESEEEQKKKALERSMYVLSELVETEKMYVDDLGQIVEGYMATMAAQGVPESLRGRDRIVFGNIQQIYEWHRDYFLQELQRCLKDPDWLAQLFIKHERRLHMYVVYCQNKPKSEHVVSEFGDSYFEELRQQLGHRLQLNDLLIKPVQRIMKYQLLLKDFLKYYNRAGMDTADLEQAVEVMCFVPKRCNDMMTLGRLRGFEGKLTAQGKLLGQDTFWVTEPEAGGLLSSRGRERRVFLFEQIIIFSEALGGGVRGGTQPGYVYKNSIKVSCLGLEGNLQGDPCRFALTSRGPEGGIQRYVLQAADPAISQAWIKHVAQILESQRDFLNALQSPIEYQRRESQTNSLGRPRGPGVGSPGRIQLGDQAQGSTHTPINGSLPSLLLSPKGEVARALLPLDKQALGDIPQAPHDSPPVSPTPKTPPCQARLAKLDEDEL

SEQ ID NO: 3685 - DNA, 2106 bp, Homosapiens
gggggtcgctgtgcctgtccccgtgtgatccgaaaagtgctggcaaaatgcggctgctgcttcgcccgggggggacgtggggtgccctggtgaaattttctatcctggccaactcaaatgaggatggcaagagagtgagcccttggagagagaggctgagcatcatgaagagaagaccctgggagttccctggggaccctgagtctggagctggggcaaggccccccagggcccgtcagtggcctgaggagatggttggatcattccaaacattgtctcagtgtggaaactgaggcagacagtggtcaggcaggaccatatgagaactggatgttggagccagctctagccacaggagaggagctgccggaactgaccttgctgaccacactgttggagggccctggagataagacgcagccacctgaagaggagactttgtcccaagcccctgagagtgaggaggaacagaagaagaaggctctggaaaggagtatgtatgtcctgagtgaactggtagaaacagagaaaatgtacgtggacgacttggggcagattgtggagggttatatggccaccatggctgctcagggggtccccgagagtcttcgaggccgtgacaggattgtgtttgggaatatccagcaaatctatgagtggcaccgagactatttcttgcaagagctacaacggtgtctgaaagatcctgattggctggctcagctattcatcaaacacgagcgccggctgcatatgtatgtggtgtactgtcagaataagcccaagtcagagcatgtggtgtcagagtttggggacagctactttgaggagctccggcagcagctggggcaccgcctgcagctgaacgacctcctcatcaaacctgtgcagcggatcatgaaataccagctgctgctcaaggattttctcaagtattacaatagagctgggatggatactgcagacctagagcaagctgtggaggtcatgtgctttgtgcccaagcgctgcaacgatatgatgacgctggggagattgcggggatttgagggcaaactgactgctcaggggaagctcttgggccaggacactttctgggtcaccgagcctgaggctggagggctgctgtcttcccgaggtcgagagaggcgcgtcttcctctttgagcaaatcatcatcttcagtgaagccctgggaggaggagtgagaggtggaacacagcctggatatgtatacaagaacagcattaaggtgagctgcctgggactggaggggaacctccaaggtgacccttgccgctttgcactgacctccagagggccagagggtgggatccagcgctatgtcctgcaggctgcagaccctgctatcagtcaggcctggatcaagcatgtggctcagatcttggagagccaacgggacttcctcaacgcattgcagtcacccattgagtaccagagacgggagagccagaccaacagcctggggcggccaagagggcctggagtggggagccctggaagaattcagcttggagatcaggcccagggcagcacacacacacccatcaatggctctctcccctctctgctgctgtcacccaaaggggaggtggccagagccctcttgccactggataaacaggcccttggtgacatcccccaggctccccatgactctcctccagtctctccaactccaaaaacccctccctgccaagccagacttgccaagctggatgaagatgagctgtaactggtgaaaaccatgggggtggtgctgactcagccgcctattccccaaggagcttcagggcagtccttctggcactgctccagaattcctccttcttggtgtgtctggagggtgggcaaggctgggagggatatcaacttggaggagaacacctagacccaaggacttttttctgcccaaggaacacagtttccttcagctcccatccctatgcatgcatcatggtccccccaaaaggaggatatgtgggtgggtgggagggctggggcaggggccagatagaaattattggttttgttttttaattttgtttttcctgttttctgagaataaaggttttgttatatcacc

SEQ ID NO: 3686 - protein, 474 aa, Homosapiens
MLEPALATGEELPELTLLTTLLEGPGDKTQPPEEETLSQAPESEEEQKKKALERSMYVLSELVETEKMYVDDLGQIVEGYMATMAAQGVPESLRGRDRIVFGNIQQIYEWHRDYFLQELQRCLKDPDWLAQLFIKHERRLHMYVVYCQNKPKSEHVVSEFGDSYFEELRQQLGHRLQLNDLLIKPVQRIMKYQLLLKDFLKYYNRAGMDTADLEQAVEVMCFVPKRCNDMMTLGRLRGFEGKLTAQGKLLGQDTFWVTEPEAGGLLSSRGRERRVFLFEQIIIFSEALGGGVRGGTQPGYVYKNSIKVSCLGLEGNLQGDPCRFALTSRGPEGGIQRYVLQAADPAISQAWIKHVAQILESQRDFLNALQSPIEYQRRESQTNSLGRPRGPGVGSPGRIQLGDQAQGSTHTPINGSLPSLLLSPKGEVARALLPLDKQALGDIPQAPHDSPPVSPTPKTPPCQARLAKLDEDEL

SEQ ID NO: 3687 - DNA, 844 bp, Homosapiens
ttaaggacccaggacagggcatctggacatggctgtgtgaatgtttggctcgctctgttccagcggctctcccagaagttgggaggggtgaagatccccttgggctgtccgctcttgggtccatggcttgaagaagaatccccttctgctcactatgaacatggcttatgacctcgcagagagcaaagataaggagacccagagccaggaaaaggtctcagcccccaggatcctctccaccttcccatcctccctcagctgaacatggtagcctcagaaggaaagggcttcactgaagatgatgatttgctcaaagaggaagacgcgcctctctcgacctcgggaagacagcagccctccagcctcaggctcggtgacccagaaagtgtcctggcccaagagcttcccctgagcagtcagtttgccctgaaaccaaaaggatagtggccttggaaaaagaacaagaaaaaggacaattctctgctcctcccttcctcgcctgacatgcccaaccaaccatggggtcagccccaggagaagacaactccccataaggacctcctgaatgctagggctggggcagaagagcatcgggcctccagtttcttgccctatctccgtacctcaaatccccgcaatctccccagcgtcatcatatcgttgcagcgcttgggcacaaagcacatgacctccacagcttgctgggacacagttcactcaggacatacctaggatgaaagcaggaggaggcccccacttcagcgtcggagctcatccttggttcagcccgttcctccctcctcccctttatcatcatagccaaccttggaggaaattccatcta

SEQ ID NO: 3688 - protein, 75 aa, Homosapiens
MPNQPWGQPQEKTTPHKDLLNARAGAEEHRASSFLPYLRTSNPRNLPSVIISLQRLGTKHMTSTACWDTVHSGHT

SEQ ID NO: 3689 - DNA, 994 bp, Homosapiens
cccaacctcaactttcccacagggttatatggccaccatggctgctcagggggtccccgagagtcttcgaggccgtgacaggattgtgtttgggaatatccagcaaatctatgagtggcaccgagagtgagtggtggaactctgacagctaggtgctggagaggggccctcatctggttgtcctgtatcctaacatcagcccattgcgacttaaggaatgtttggagaagttttgtagggcacactaccagggcagacagctcgaaactgctgggagtgggcgaggtgggggttgtgaaatgtatttgacctgctgcttctctaccaacccctccagctatttcttgcaagagctacaacggtgtctgaaagatcctgattggctggctcagctattcatcaaacacgtgaggcttgagggggcagggcctggggcggggcttaggaatgggctgggattctctggagatgcgtcctccctccttgcccaccctgctctctcttaaacattacccctgttaggagcgccggctgcatatgtatgtggtgtactgtcagaataagcccaagtcagagcatgtggtgtcagagtttggggacagctactttgaggtcagtagctgagatgtcttggtgggaaggaggacagaactggggctttccaggctgcataaccaccctgtccctgtccccaggagctccggcagcagctggggcaccgcctgcagctgaacgacctcctcatcaaacctgtgcagcggatcatgaaataccagctgctgctcaaggattttctcaagtattacaatagagctgggatggatactgcagacctagagcaagctgtggaggtcatgtgctttgtgcccaagcgctgcaacgatatgatgacgctggggagattgcggggatttgagggcaaactgactgctcaggggaagctcttgggccaggacactttctgggtcaccgagcctgaggctggagggctgct

SEQ ID NO: 3690 - protein, 89 aa, Homosapiens
MWCTVRISPSQSMWCQSLGTATLRSVAEMSWWEGGQNWGFPGCITTLSLSPGAPAAAGAPPAAERPPHQTCAADHEIPAAAQGFSQVLQ

SEQ ID NO: 3691 - DNA, 444 bp, Homosapiens
cgcgtcttcctctttgagcaaatcatcatcttcagtgaagccctgggaggaggagtgagaggtggaacacagctggatgaagatgagctgtaactggtgaaaaccatgggggtggtgctgactcagccgcctattccccaaggagcttcagggcagtccttctggcactgctccagaattcctccttcttggtgtgtctggagggtgggcaaggctgggagggatatcaacttggaggagaacacctagacccaaggacttttttctgcccaaggaacacagtttccttcagctcccatccctatgcatgcatcatggtccccccaaaaggaggatatgtgggtgggtgggagggctggggcaggggccagatagaaattattggttttgttttttaattttgtttttcctgttttctgagaataaaggttttgttatatcacc

SEQ ID NO: 3692 - protein, 47 aa, Homosapiens
MGVVLTQPPIPQGASGQSFWHCSRIPPSWCVWRVGKAGRDINLEENT

SEQ ID NO: 3693 - DNA, 2450 bp, Homosapiens
agcggccagttcccacaggaccgcagggtctgcgcgggcagggggccggcgcgcacggccatcctcaccaagacgacttcccccgggatcggcgtgggtagccggtctcggaatctcacgttcaattccttgaccggcacgagcagcgccaggctgagcgcggagatggtcagttcggccggactgctccgaggcagcgcagtcagcaaggaggccagcgtctgagggcaggggcgatgagcagagggccccgtgccagggctcatgcgccccggcgcgggacccccagagcgaggccctctctacccagtgccaccagggcttacacctcctcagcgccctcgttcagccacgtggctccaacctcctttcctgctcccttgtcacatactacccctccaccctccgtccttcctcccttttcgagtttccctattcacgggacctctagaagccccttctcctttcttcttccacccccaccttgaagagagagaagcagccgatctggcgcgggagggacaaccccaagaggctcggcagctgggacaagagcacgtgcagcgcggccccgctggtcagcgccttgaccacaggctcggacaaaaaggtggacaagacgccgagctgcagcacgaacatccccagctgtgggggagaagacgcgctgtcaccatctagaggaggagcaaaccaaccccgcgcacctccgccctcccgaacccaagccgaaagctggtccctccctcttccccggcccaatttccctggcccctcagcagggatccccccgggttcctccccgggtcctccctcaccatcaacgccccgctcccgaaggccacggccgcggctaccccaacccgttgagcgtccagctgctccttctcgattccgctcagattccccacgaggggttccggcaccagccgctcgacggccgagcctgtcatgaggctgagtatggcgaaagttcctgccgccgggggacaaatgcagacatcaccagctgtgcagccctgggcagggcagcagctcagggtccatgccttgggtccgagatcctgctgccagactcggctctccaagaaggctgctgccccgtcaagactgtggggcgcgaagagctgcgctagccggcaaaaactgctccctcctgcagattctctgcctactgcgtgcccctttgggggaccatgcacctattcttccccttccaagtccctgagatgttcattttaaccaaatttcataggggaaaaaagttcagggaagaagagtcattggaagtccctggtcactcacctgtggacaggtgtctcccagtacctagcaagctgtagatgaggacggggaagaaagaagtgtagagtccaaacaccgggggcacggaggccaggagagcaaaagccatgcctgggatagaagtggatggaaaggtgtgctgtggggagggggccttgtccaacctccaggacttaaatgcacttcccagactcttaggagctgacatcaaggatgctaaatcaagcctcatcagggaactgaggggttaatgggcctcagtgagaggtcatggagcagacaaggtcagggacgctgtggccaagtcctgggggccaggcgttgtgcctctctccggttctctgagccagaacctgtctaaggcttctcgcaggattgcgcagatgaggggaggtggggatggggatctgatggagctccacagtccttacctcaaacttggcctcagatccctctctcccaccctcgacggtaggaacccaccatctgctcccggattcccagctccctaagcctcctcccggaagccctctagagcttgtgctcccgacaggctgctgttagggcctctcaccctggggcacgtgcacgatgcccacggtcactccggccaccgcatctccgagcagccaggcccgccagcggtaatggggcagccagtgcagcgcgggcagccgagccagcagcaggcgccacgcccctgtcccggaacaagcgcgagcccgcagcctccacagcccgaagagccggggaaagccgcgctcttcaggtagctccggttcctgctcttcgcccctgaagagctgatggaaccgagcctcggccaggtgaaatggcttacgcctgtaatcccagcactttgaggccgaggcaggtggatcacctgaggtcaggagtttgagaccagcctgaccaacatggaggtggaggttgcagtaagccgagatggagccactgcattcaagcctgggcgacagagcaagactccatctcaaaaagaacaaaaaacaaacaaacaaaaaacaaatgctgttcacaaagtaggcattcaaaagcacatatgtggtcaaactaagttcaaaggggtcagccaccccgctcatgtgtccctatggttcctaaagaaatataaaggttctaactcc

SEQ ID NO: 3694 - protein, 75 aa, Homosapiens
MEVEVAVSRDGATAFKPGRQSKTPSQKEQKTNKQKTNAVHKVGIQKHICGQTKFKGVSHPAHVSLWFLKKYKGSN

SEQ ID NO: 3695 - DNA, 392 bp, Homosapiens
acccaggcgcgggggacacctctgaccttaagtaccccttggcgaccaggctcagggaagctctcaccgaggctcggttccatcagctcttcaggggcgaagagcaggaaccggagctacctgaagagcgcggctttccccggctcttcgggctgtggaggctgcgggctcgcgcttgttccgggacaggggcgtggcgcctgctgctggctcggctgcccgcgctgcactggctgccccattaccgctggcgggcctggctgctcggagatgcggtggccggagtgaccgtgggcatcgtgcacgtgccccagggcatggcttttgctctcctggcctccgtgcccccggtgtttggactctacacttctttcttccccgtcctcatctac

SEQ ID NO: 3696 - protein, 88 aa, Homosapiens
RARLSPALRAVEAAGSRLFRDRGVAPAAGSAARAALAAPLPLAGLAARRCGGRSDRGHRARAPGHGFCSPGLRAPGVWTLHFFLPRPH

SEQ ID NO: 3697 - DNA, 3065 bp, Homosapiens
cacaagctctagagggcttccgggaggaggcttagggagctgggaatccgggagcagatggtgggttcctaccgtcgagggtgggagagagggatctgaggccaagtttgaggtaaggactgtggagctccatcagatccccatccccacctcccctcatctgcgcaatcctgcgagaagccttagacaggttctggctcagagaaccggagagaggcacaacgcctggcccccaggacttggccacagcgtccctgaccttgtctgctccatgacctctcactgaggcccattaacccctcagttccctgatgaggcttgatttagcatccttgatgtcagctcctaagagtctgggaagtgcatttaagtcctggaggttggacaaggccccctccccacagcacacctttccatccacttctatcccaggcatggcttttgctctcctggcctccgtgcccccggtgtttggactctacacttctttcttccccgtcctcatctacagcttgctaggtactgggagacacctgtccacaggaactttcgccatactcagcctcatgacaggctcggccgtcgagcggctggtgccggaacccctcgtggggaatctgagcggaatcgagaaggagcagctggacgctcaacgggttggggtagccgcggccgtggccttcgggagcggggcgttgatgctggggatgttcgtgctgcagctcggcgtcttgtccacctttttgtccgagcctgtggtcaaggcgctgaccagcggggccgcgctgcacgtgctcttgtcccagctgccgagcctcttggggttgtccctcccgcgccagatcggctgcttctctctcttcaagacgctggcctccttgctgactgcgctgcctcggagcagtccggccgaactgaccatctccgcgctcagcctggcgctgctcgtgccggtcaaggaattgaacgtgagattccgagaccggctacccacgccgatcccgggggaagtcgtcttggtgcttctggcctccgtgctctgcttcacctcttctgtggacacaagataccaagtccagatagtggggctgttgcctggaggatttccccaacccctcctccccaacctggctgagctgcccaggattctggctgactcgctgcccattgcactggttagttttgcggtgtctgcctccctggcctccatccatgcagacaagtatagctacactattgactccaaccaggagttcctggcacatggtgcctccaacctcatctcctccctcttctcttgctttcccaactcggctacgctggccaccaccaatctactggtggatgctggtgggaaaacacagctggcaggcctcttctcctgcacagtggtcctgtcggtgctgctgtggctggggcccttcttttactatctgcccaaggctgtcctggcttgcatcaacatctccagcatgcgccaggtgttctgccagatgcaggaacttccacaactatggcacatcagccgagtggactttctcctccaggtcccggggctctgcatcctgagctatccaacaccactgtactttgggacccgtgggcagtttcgctgcaacctggagtggcacctggggctcggagaaggagaaaaggagacttcaaagccagatggcccaatggttgcagttgctgagcctgtcagggtggtggtcctagacttcagtggtgtcacctttgcagatgctgctggggccagagaagtggtgcagctggccagccgatgtcgagatgctaggatccgcctcctcctggctcagtgtaatgccttggtgcaggggacactgacccgggtaggactcctggacagggtgactccagatcagctgtttgtgagtgtgcaggatgcagctgcttatgccctggggagcctgttaaggggcagtagcaccaggagcgggagccaggaggcactgggctgcggcaagtgaggcaggggtaagtggctggagacccagggagaggggtttgggaaagggtctgaggaagatcaagaagaaaagggtggggacggaatgaatagtagattgaagaccaaatcagggagcccgggctgagctatgggtgaggaactgaagaactcagatccctaagtaggtggggtacccctgagaggactgccacatttcattaaggaagaggggtgcctaatctattcctgacatgtctcctctcttctccaggagctcactgacccaaagatttgcaccgtgtgggtctgacctcatcatgtggagtgcagagggccctgatgacatgtgtgtgatgaggaccatgacccttgaacccccttacctaacgtaactaataaaatgaagctgagagctttggaatccatgaagtgagtctaggtgtttgcacagggactctggtgccccttcttttgtgcccacagcattgcagagacacaactaagaatggctttcaccaaccaccagccctcaccccagccccagagccacaagttctctctgtgggggtggggctggagcaggtacacagagtactggatctgaagatgcagatgaggggcacagtcttgggattatgtgttggggaacttccccaccccctcggtcccaagatgagaggacagtgtttccaccttaggttcttagagtccctctgggctctttggcacttggaaagtgatccccccatttcctgccccatgagaatgggcagggggaggacttggcactggctgtgggagaggttatggctccaccaggcctctgggcactggaaaaaggaggggtgtcaccaggacaacccctactgggcatcaggttctgaaaaggaagagtgaggaactagaggctcagggacagccagtagagtgctcacagggtggtggggtttgttggaaattcctggcagggacaaggaggcaggcccagcctgacagtcagaaatccccagcgggccatcactgggaggtcatgcactgcagccggtgtttgaagaagagcagccggtgtttggccatctggctctcgtccagt

SEQ ID NO: 3698 - protein, 559 aa, Homosapiens
MRLDLASLMSAPKSLGSAFKSWRLDKAPSPQHTFPSTSIPGMAFALLASVPPVFGLYTSFFPVLIYSLLGTGRHLSTGTFAILSLMTGSAVERLVPEPLVGNLSGIEKEQLDAQRVGVAAAVAFGSGALMLGMFVLQLGVLSTFLSEPVVKALTSGAALHVLLSQLPSLLGLSLPRQIGCFSLFKTLASLLTALPRSSPAELTISALSLALLVPVKELNVRFRDRLPTPIPGEVVLVLLASVLCFTSSVDTRYQVQIVGLLPGGFPQPLLPNLAELPRILADSLPIALVSFAVSASLASIHADKYSYTIDSNQEFLAHGASNLISSLFSCFPNSATLATTNLLVDAGGKTQLAGLFSCTVVLSVLLWLGPFFYYLPKAVLACINISSMRQVFCQMQELPQLWHISRVDFLLQVPGLCILSYPTPLYFGTRGQFRCNLEWHLGLGEGEKETSKPDGPMVAVAEPVRVVVLDFSGVTFADAAGAREVVQLASRCRDARIRLLLAQCNALVQGTLTRVGLLDRVTPDQLFVSVQDAAAYALGSLLRGSSTRSGSQEALGCGK

SEQ ID NO: 3699 - DNA, 1815 bp, Homosapiens
gctctcctggcctccgtgcccccggtgtttggactctacacttctttcttccccgtcctcatctacagcttgctaggtactgggagacacctgtccacaggaactttcgccatactcagcctcatgacaggctcggccgtcgagcggctggtgccggaacccctcgtggggaatctgagcggaatcgagaaggagcagctggacgctcaacgggttggggtagccgcggccgtggccttcgggagcggggcgttgatgctggggatgttcgtgctgcagctcggcgtcttgtccacctttttgtccgagcctgtggtcaaggcgctgaccagcggggccgcgctgcacgtgctcttgtcccagctgccgagcctcttggggttgtccctcccgcgccagatcggctgcttctctctcttcaagacgctggcctccttgctgactgcgctgcctcggagcagtccggccgaactgaccatctccgcgctcagcctggcgctgctcgtgccggtcaaggaattgaacgtgagattccgagaccggctacccacgccgatcccgggggaagtcgtcttggtgcttctggcctccgtgctctgcttcacctcttctgtggacacaagataccaagtccagatagtggggctgttgcctggaggatttccccaacccctcctccccaacctggctgagctgcccaggattctggctgactcgctgcccattgcactggttagttttgcggtgtctgcctccctggcctccatccatgcagacaagtatagctacactattgactccaaccaggagttcctggcacatggtgcctccaacctcatctcctccctcttctcttgctttcccaactcggctacgctggccaccaccaatctactggtggatgctggtgggaaaacacagctggcaggcctcttctcctgcacagtggtcctgtcggtgctgctgtggctggggcccttcttttactatctgcccaaggctgtcctggcttgcatcaacatctccagcatgcgccaggtgttctgccagatgcaggaacttccacaactatggcacatcagccgagtggactttgctgtgtggatggtcacctgggtggcagtagtgaccctgagtgtggatttgggcctggctgtgggtgtggtcttctccatgatgactgtggtctgccgcacccggagctcctccaggtcccggggctctgcatcctgagctatccaacaccactgtactttgggacccgtgggcagtttcgctgcaacctggagtggcacctggggctcggagaaggagaaaaggagacttcaaagccagatggcccaatggttgcagttgctgagcctgtcagggtggtggtcctagacttcagtggtgtcacctttgcagatgctgctggggccagagaagtggtgcagctggccagccgatgtcgagatgctaggatccgcctcctcctggctcagtgtaatgccttggtgcaggggacactgacccgggtaggactcctggacagggtgactccagatcagctgtttgtgagtgtgcaggatgcagctgcttatgccctggggagcctgttaaggggcagtagcaccaggagcgggagccaggaggcactgggctgcggcaagtgaggcaggggagctcactgacccaaagatttgcaccgtgtgggtctgacctcatcatgtggagtgcagagggccctgatgacatgtgtgtgatgaggaccatgacccttgaacccccttacctaacgtaactaataaaatgaagctgagagctttggaatcc

SEQ ID NO: 3700 - protein, 369 aa, Homosapiens
MTGSAVERLVPEPLVGNLSGIEKEQLDAQRVGVAAAVAFGSGALMLGMFVLQLGVLSTFLSEPVVKALTSGAALHVLLSQLPSLLGLSLPRQIGCFSLFKTLASLLTALPRSSPAELTISALSLALLVPVKELNVRFRDRLPTPIPGEVVLVLLASVLCFTSSVDTRYQVQIVGLLPGGFPQPLLPNLAELPRILADSLPIALVSFAVSASLASIHADKYSYTIDSNQEFLAHGASNLISSLFSCFPNSATLATTNLLVDAGGKTQLAGLFSCTVVLSVLLWLGPFFYYLPKAVLACINISSMRQVFCQMQELPQLWHISRVDFAVWMVTWVAVVTLSVDLGLAVGVVFSMMTVVCRTRSSSRSRGSAS

SEQ ID NO: 3701 - DNA, 2484 bp, Homosapiens
gctctcctggcctccgtgcccccggtgtttggactctacacttctttcttccccgtcctcatctacagcttgctaggtactgggagacacctgtccacaggaactttcgccatactcagcctcatgacaggctcggccgtcgagcggctggtgccggaacccctcgtggggaatctgagcggaatcgagaaggagcagctggacgctcaacgggttggggtagccgcggccgtggccttcgggagcggggcgttgatgctggggatgttcgtgctgcagctcggcgtcttgtccacctttttgtccgagcctgtggtcaaggcgctgaccagcggggccgcgctgcacgtgctcttgtcccagctgccgagcctcttggggttgtccctcccgcgccagatcggctgcttctctctcttcaagacgctggcctccttgctgactgcgctgcctcggagcagtccggccgaactgaccatctccgcgctcagcctggcgctgctcgtgccggtcaaggaattgaacgtgagattccgagaccggctacccacgccgatcccgggggaagtcgtcttggtgcttctggcctccgtgctctgcttcacctcttctgtggacacaagataccaagtccagatagtggggctgttgcctggaggatttccccaacccctcctccccaacctggctgagctgcccaggattctggctgactcgctgcccattgcactggttagttttgcggtgtctgcctccctggcctccatccatgcagacaagtatagctacactattgactccaaccaggagttcctggcacatggtgcctccaacctcatctcctccctcttctcttgctttcccaactcggctacgctggccaccaccaatctactggtggatgctggtgggaaaacacagctggcaggcctcttctcctgcacagtggtcctgtcggtgctgctgtggctggggcccttcttttactatctgcccaaggctgtcctggcttgcatcaacatctccagcatgcgccaggtgttctgccagatgcaggaacttccacaactatggcacatcagccgagtggactttgctgtgtggatggtcacctgggtggcagtagtgaccctgagtgtggatttgggcctggctgtgggtgtggtcttctccatgatgactgtggtctgccgcacccggagctcctccaggtcccggggctctgcatcctgagctatccaacaccactgtactttgggacccgtgggcagtttcgctgcaacctggagtggcacctggggctcggagaaggagaaaaggagacttcaaagccagatggcccaatggttgcagttgctgagcctgtcagggtggtggtcctagacttcagtggtgtcacctttgcagatgctgctggggccagagaagtggtgcagctggccagccgatgtcgagatgctaggatccgcctcctcctggctcagtgtaatgccttggtgcaggggacactgacccgggtaggactcctggacagggtgactccagatcagctgtttgtgagtgtgcaggatgcagctgcttatgccctggggagcctgttaaggggcagtagcaccaggagcgggagccaggaggcactgggctgcggcaagtgaggcaggggagctcactgacccaaagatttgcaccgtgtgggtctgacctcatcatgtggagtgcagagggccctgatgacatgtgtgtgatgaggaccatgacccttgaacccccttacctaacgtaactaataaaatgaagctgagagctttggaatccatgaagtgagtctaggtgtttgcacagggactctggtgccccttcttttgtgcccacagcattgcagagacacaactaagaatggctttcaccaaccaccagccctcaccccagccccagagccacaagttctctctgtgggggtggggctggagcaggtacacagagtactggatctgaagatgcagatgaggggcacagtcttgggattatgtgttggggaacttccccaccccctcggtcccaagatgagaggacagtgtttccaccttaggttcttagagtccctctgggctctttggcacttggaaagtgatccccccatttcctgccccatgagaatgggcagggggaggacttggcactggctgtgggagaggttatggctccaccaggcctctgggcactggaaaaaggaggggtgtcaccaggacaacccctactgggcatcaggttctgaaaaggaagagtgaggaactagaggctcagggacagccagtagagtgctcacagggtggtggggtttgttggaaattcctggcagggacaaggaggcaggcccagcctgacagtcagaaatccccagcgggccatcactgggaggtcatgcactgcagccggtgtttgaagaagagcagccggtgtttggccatctggctctcgtccagt

SEQ ID NO: 3702 - protein, 369 aa, Homosapiens; identical to SEQ ID NO: 3700

SEQ ID NO: 3703 - DNA, 3027 bp, Homosapiens
cgggttggggtagccgcggccgtggccttcgggagcggggcgttgatgctggggatgttcgtgctgcagctcggcgtcttgtccacctttttgtccgagcctgtggtcaaggcgctgaccagcggggccgcgctgcacgtgctcttgtcccagctgccgagcctcttggggttgtccctcccgcgccagatcggctgcttctctctcttcaagacgctggcctccttgctgactgcgctgcctcggagcagtccggccgaactgaccatctccgcgctcagcctggcgctgctcgtgccggtcaaggaattgaacgtgagattccgagaccggctacccacgccgatcccgggggaagtcgtcttggtgcttctggcctccgtgctctgcttcacctcttctgtggacacaagataccaagtccagatagtggggctgttgcctggagggtaagagaatgaaaagatgccagctttctcttctcccacctctcccacccaacactccctcttatctccaccccccattttctctgccttccttatctcactgaagcacctaacccctcctcaccatggatccctccctctccagatttccccaacccctcctccccaacctggctgagctgcccaggattctggctgactcgctgcccattgcactggttagttttgcggtgtctgcctccctggcctccatccatgcagacaagtatagctacactattgactccaaccaggtgggactctgactgtggaccccaaccctctcatttgacttcccaccatgcctttgtctctcccacttcatctcactgtatccctccaggagttcctggcacatggtgcctccaacctcatctcctccctcttctcttgctttcccaactcggctacgctggccaccaccaatctactggtggatgctggtgggaaaacacaggtaagagggcatccttggatgaggagaaaggatgggccatccaggcaaggtggcggtggtggagaaacaggtggaagatggctagaatcccaggtggcacctatatagagaagactggggatctgtgagaaagggtgactgaggggatggaattatagataggagagatggaagataacaatgttccagtaagacctttgtaggctctaagcgctgaaaaagtttatggtgccccaggtgtggttcaaaataaaaacacaaaactataaaataaacttaagagataaaattcttatttttttcacacaatgacattgtcttttaaaaggaatatcacatatcaaagtctccccctaatatttttggtttcccttactttgctggtgccctaaacacatataccctgcttatagggtaacccaacagtggcttttaaggtggaggtgggctacaaaactggggaacttgaacaatggacatctacaaggagactggtgaataatgggcatttaattaattggggggagcgggagggttagatgtgaatggcagaatattaagaagggggttgtgtggaaggagatttgggagaagggagacttccgaggaagattaggcagagtgggcaggaagaccagctctcatgtgggggtgggaggctctcttccttttttgctcctgttcctccttttctctagctggcaggcctcttctcctgcacagtggtcctgtcggtgctgctgtggctggggcccttcttttactatctgcccaaggtaatgagcagaggaggcatgagcatggctgggaggggtagctgtattccaggacatcgaggtagtcagcccacctcctctgcctcaaggctgtcctggcttgcatcaacatctccagcatgcgccaggtgttctgccagatgcaggaacttccacaactatggcacatcagccgagtggactttgtgagaaatgccattacccccagattgccccctctcatcttgttagcatccccagcctctgccctgaaccaaacctaattgtcctggtcttaagttctgcaacccacccactcccccagcaaacataactcctagtatgctttactcacaggcaagggaaaggatggggtttgaacccctttggcctgaatatttgtaacttcccaactggtgcgggtcattacatttggtgtgtgtcccattgaatcaaccctgttgtttccttctgtcatgctttccacttcttcctggatcatctctccccatcacttgccttggtagtcactgccctggatctctttacccagcagtgatggcctggcttttcttttgggcaatccacccctatccctatcctgcaggctgtgtggatggtcacctgggtggcagtagtgaccctgagtgtggatttgggcctggctgtgggtgtggtcttctccatgatgactgtggtctgccgcacccggagctcctccaggtcccggggctctgcatcctgagctatccaacaccactgtactttgggacccgtgggcagtttcgctgcaacctggagtggcacctggggctcggagaaggagaaaaggagacttcaaagccagatggcccaatggttgcagttgctgagcctgtcagggtggtggtcctagacttcagtggtgtcacctttgcagatgctgctggggccagagaagtggtgcagctggccagccgatgtcgagatgctaggatccgcctcctcctggctcagtgtaatgccttggtgcaggggacactgacccgggtaggactcctggacagggtgactccagatcagctgtttgtgagtgtgcaggatgcagctgcttatgccctggggagcctgttaaggggcagtagcaccaggagcgggagccaggaggcactgggctgcggcaagtgaggcaggggagctcactgacccaaagatttgcaccgtgtgggtctgacctcatcatgtggagtgcagagggccctgatgacatgtgtgtgatgaggaccatgacccttgaacccccttacctaacgtaactaataaaatgaagctgagagctttggaatcc

SEQ ID NO: 3704 - protein, 202 aa, Homosapiens
MAWLFFWAIHPYPYPAGCVDGHLGGSSDPECGFGPGCGCGLLHDDCGLPHPELLQVPGLCILSYPTPLYFGTRGQFRCNLEWHLGLGEGEKETSKPDGPMVAVAEPVRVVVLDFSGVTFADAAGAREVVQLASRCRDARIRLLLAQCNALVQGTLTRVGLLDRVTPDQLFVSVQDAAAYALGSLLRGSSTRSGSQEALGCGK

SEQ ID NO: 3705 - DNA, 1793 bp, Homosapiens
gcagaatattaagaagggggttgtgtggaaggagatttgggagaagggagacttccgaggaagattaggcagagtgggcaggaagaccagctctcatgtgggggtgggaggctctcttccttttttgctcctgttcctccttttctctagctggcaggcctcttctcctgcacagtggtcctgtcggtgctgctgtggctggggcccttcttttactatctgcccaaggtaatgagcagaggaggcatgagcatggctgggaggggtagctgtattccaggacatcgaggtagtcagcccacctcctctgcctcaaggctgtcctggcttgcatcaacatctccagcatgcgccaggtgttctgccagatgcaggaacttccacaactatggcacatcagccgagtggactttgtgagaaatgccattacccccagattgccccctctcatcttgttagcatccccagcctctgccctgaaccaaacctaattgtcctggtcttaagttctgcaacccacccactcccccagcaaacataactcctagtatgctttactcacaggcaagggaaaggatggggtttgaacccctttggcctgaatatttgtaacttcccaactggtgcgggtcattacatttggtgtgtgtcccattgaatcaaccctgttgtttccttctgtcatgctttccacttcttcctggatcatctctccccatcacttgccttggtagtcactgccctggatctctttacccagcagtgatggcctggcttttcttttgggcaatccacccctatccctatcctgcaggctgtgtggatggtcacctgggtggcagtagtgaccctgagtgtggatttgggcctggctgtgggtgtggtcttctccatgatgactgtggtctgccgcacccggaggtgggcatagagatgagtggagttgaggtcggggcaggggaagagaatgaggtgcttggggtgactctccagccaggccaggctaagctggaaatctggccccaccttcttccctagggtgtagtgcctggcacttggacaggctgaggggacagagctctacagaccactcagaggaagccccagggtgggtgggctgcagccaaagaaggaagggaagattagccccagacatttctctgatcctttgacctcttagctcctccaggtcccggggctctgcatcctgagctatccaacaccactgtactttgggacccgtgggcagtttcgctgcaacctggagtggcacctggggctcggagaaggagaaaaggagacttcaaagccagatggcccaatggttgcagttgctgagcctgtcagggtggtggtcctagacttcagtggtgtcacctttgcagatgctgctggggccagagaagtggtgcagctggccagccgatgtcgagatgctaggatccgcctcctcctggctcagtgtaatgccttggtgcaggggacactgacccgggtaggactcctggacagggtgactccagatcagctgtttgtgagtgtgcaggatgcagctgcttatgccctggggagcctgttaaggggcagtagcaccaggagcgggagccaggaggcactgggctgcggcaagtgaggcaggggagctcactgacccaaagatttgcaccgtgtgggtctgacctcatcatgtggagtgcagagggccctgatgacatgtgtgtgatgaggaccatgacccttgaacccccttacctaacgtaactaataaaatgaagctgagagctttggaatcc

SEQ ID NO: 3706 - protein, 103 aa, Homosapiens
MVAVAEPVRVVVLDFSGVTFADAAGAREVVQLASRCRDARIRLLLAQCNALVQGTLTRVGLLDRVTPDQLFVSVQDAAAYALGSLLRGSSTRSGSQEALGCGK

SEQ ID NO: 3707 - DNA, 1075 bp, Homosapiens
cagaatattaagaagggggttgtgtggaaggagatttgggagaagggagacttccgaggaagattaggcagagtgggcaggaagaccagctctcatgtgggggtgggaggctctcttccttttttgctcctgttcctccttttctctagctggcaggcctcttctcctgcacagtggtcctgtcggtgctgctgtggctggggcccttcttttactatctgcccaaggtaatgagcagaggaggcatgagcatggctgggaggggtagctgtattccaggacatcgaggtagtcagcccacctcctctgcctcaaggctgtcctggcttgcatcaacatctccagcatgcgccaggtgttctgccagatgcaggaacttccacaactatggcacatcagccgagtggactttgtgagaaatgccattacccccagattgccccctctcatcttgttagcatccccagcctctgccctgaaccaaacctaattgtcctggtcttaagttctgcaacccacccactcccccagcaaacataactcctagtatgctttactcacaggcaagggaaaggatggggtttgaacccctttggcctgaatatttgtaacttcccaactggtgcgggtcattacatttggtgtgtgtcccattgaatcaaccctgttgtttccttctgtcatgctttccacttcttcctggatcatctctccccatcacttgccttggtagtcactgccctggatctctttacccagcagtgatggcctggcttttcttttgggcaatccacccctatccctatcctgcaggctgtgtggatggtcacctgggtggcagtagtgaccctgagtgtggatttgggcctggctgtgggtgtggtcttctccatgatgactgtggtctgccgcacccggagctcctccaggtcccggggctctgcatcctgagctatccaacaccactgtactttgggacccgtgggcagtttcgctgcaacctggagtggcacctggggctcggagaaggaggtggtggtcctagacttcagtggtgtcacctttgcagatgctg

SEQ ID NO: 3708 - protein, 102 aa, Homosapiens
MAWLFFWAIHPYPYPAGCVDGHLGGSSDPECGFGPGCGCGLLHDDCGLPHPELLQVPGLCILSYPTPLYFGTRGQFRCNLEWHLGLGEGGGGPRLQWCHLCR

SEQ ID NO: 3709 - DNA, 1294 bp, Homosapiens
cagaatattaagaagggggttgtgtggaaggagatttgggagaagggagacttccgaggaagattaggcagagtgggcaggaagaccagctctcatgtgggggtgggaggctctcttccttttttgctcctgttcctccttttctctagctggcaggcctcttctcctgcacagtggtcctgtcggtgctgctgtggctggggcccttcttttactatctgcccaaggtaatgagcagaggaggcatgagcatggctgggaggggtagctgtattccaggacatcgaggtagtcagcccacctcctctgcctcaaggctgtcctggcttgcatcaacatctccagcatgcgccaggtgttctgccagatgcaggaacttccacaactatggcacatcagccgagtggactttgtgagaaatgccattacccccagattgccccctctcatcttgttagcatccccagcctctgccctgaaccaaacctaattgtcctggtcttaagttctgcaacccacccactcccccagcaaacataactcctagtatgctttactcacaggcaagggaaaggatggggtttgaacccctttggcctgaatatttgtaacttcccaactggtgcgggtcattacatttggtgtgtgtcccattgaatcaaccctgttgtttccttctgtcatgctttccacttcttcctggatcatctctccccatcacttgccttggtagtcactgccctggatctctttacccagcagtgatggcctggcttttcttttgggcaatccacccctatccctatcctgcaggctgtgtggatggtcacctgggtggcagtagtgaccctgagtgtggatttgggcctggctgtgggtgtggtcttctccatgatgactgtggtctgccgcacccggagctcctccaggtcccggggctctgcatcctgagctatccaacaccactgtactttgggacccgtgggcagtttcgctgcaacctggagtggcacctggggctcggagaaggagaaaaggagacttcaaagccagatggcccaatggttgcagttgctgagcctgtcagggtggtggtcctagacttcagtggtgtcacctttgcagatgctgctggggccagagaagtggtgcagctggccagccgatgtcgagatgctaggatccgcctcctcctggctcagtgtaatggtgagatgtgtggagaagagcggggcccagtgcctgggcaatgactggacacctgcggtagggaaaaggacccggtgtggactta

SEQ ID NO: 3710 - protein, 162 aa, Homosapiens
MAWLFFWAIHPYPYPAGCVDGHLGGSSDPECGFGPGCGCGLLHDDCGLPHPELLQVPGLCILSYPTPLYFGTRGQFRCNLEWHLGLGEGEKETSKPDGPMVAVAEPVRVVVLDFSGVTFADAAGAREVVQLASRCRDARIRLLLAQCNGEMCGEERGPVPGQ

SEQ ID NO: 3711 - DNA, 500 bp, Homosapiens
agctatccaacaccactgtactttgggacccgtgggcagtttcgctgcaacctggagtggcacctggggctcggagaaggagaaaaggagacttcaaagccagatggcccaatggttgcagctggccagccgatgtcgagatgctaggatccgcctcctcctggctcagtgtaatgccttggtgcaggggacactgacccgggtaggactcctggacagggtgactccagatcagctgtttgtgagtgtgcaggatgcagctgcttatgccctggggagcctgttaaggggcagtagcaccaggagcgggagccaggaggcactgggctgcggcaagtgaggcaggggagctcactgacccaaagatttgcaccgtgtgggtctgacctcatcatgtggagtgcagagggccctgatgacatgtgtgtgatgaggaccatgacccttgaacccccttacctaacgtaactaataaaatgaagctgagagctttggaatcc

SEQ ID NO: 3712 - protein, 78 aa, Homosapiens
MAQWLQLASRCRDARIRLLLAQCNALVQGTLTRVGLLDRVTPDQLFVSVQDAAAYALGSLLRGSSTRSGSQEALGCGK

SEQ ID NO: 3713 - DNA, 1169 bp, Homosapiens
agctatccaacaccactgtactttgggacccgtgggcagtttcgctgcaacctggagtggcacctggggctcggagaaggagaaaaggagacttcaaagccagatggcccaatggttgcagctggccagccgatgtcgagatgctaggatccgcctcctcctggctcagtgtaatgccttggtgcaggggacactgacccgggtaggactcctggacagggtgactccagatcagctgtttgtgagtgtgcaggatgcagctgcttatgccctggggagcctgttaaggggcagtagcaccaggagcgggagccaggaggcactgggctgcggcaagtgaggcaggggagctcactgacccaaagatttgcaccgtgtgggtctgacctcatcatgtggagtgcagagggccctgatgacatgtgtgtgatgaggaccatgacccttgaacccccttacctaacgtaactaataaaatgaagctgagagctttggaatccatgaagtgagtctaggtgtttgcacagggactctggtgccccttcttttgtgcccacagcattgcagagacacaactaagaatggctttcaccaaccaccagccctcaccccagccccagagccacaagttctctctgtgggggtggggctggagcaggtacacagagtactggatctgaagatgcagatgaggggcacagtcttgggattatgtgttggggaacttccccaccccctcggtcccaagatgagaggacagtgtttccaccttaggttcttagagtccctctgggctctttggcacttggaaagtgatccccccatttcctgccccatgagaatgggcagggggaggacttggcactggctgtgggagaggttatggctccaccaggcctctgggcactggaaaaaggaggggtgtcaccaggacaacccctactgggcatcaggttctgaaaaggaagagtgaggaactagaggctcagggacagccagtagagtgctcacagggtggtggggtttgttggaaattcctggcagggacaaggaggcaggcccagcctgacagtcagaaatccccagcgggccatcactgggaggtcatgcactgcagccggtgtttgaagaagagcagccggtgtttggccatctggctctcgtccagt

SEQ ID NO: 3714 - protein, 78 aa, Homosapiens; identical to SEQ ID NO: 3712

SEQ ID NO: 3715 - DNA, 3751 bp, Homosapiens
ccagaccaacacagcagacacaggtgcaaggcctgggtggagagacgggcaggctgggcaaacagagaagaaccagaaaggctggagtgggcaaatggcagagggcatgggaggcatctgggctatggccagagctgtccagccacacaatgggtgcttcaactggaccagcagggccagagggagaaagggggcctttgttcatctggggctggagcaggccagagggaaacccgagccttgggtgtgtctcccctttaggccaactgtggggggccccaggaagagacttgtctaaggagttagaagactatattcccaacccaccccttactagagggcaaaggtctttactttcctgagatcccatttctcttccagcaaaagaggcctaaaagccctctttgcttctccccaaagctggtttgttgcactaagtttgcttccaccttagggcctttgcactttctattttctcagcctggaatgctcttccccagatttttgcagactggcttcttcttgtcatttagatctcagttcaaatgcctcctcttcactatcacattacttgtttgtcttattttccactcaatacttaccagtatctgaattttttaatttacttagcctggcaccagactgactaggttgctatcagttttgttgcttaatagttgtgtaaatgtggcaagttacttttctgtgtctcagcttttttttctgttgtaggaatctacttaatagggctatcatggggataaaatgagtgcatatatttaaggtaattttttaacgggtctggcacatagtaagtgctcaataaagattagcttttacttaaaattttctttgttgttttttctcctacccattagaatgtaagttccataaaggtaagaaccttctgttcttgtccaccaaggcctagaaaggtgggacacagagtaggcacttaaatattgattggctgaaaacagaatgttatcccacccttcagggtcaaatgccatgtcctttcttcccagtccggttctccaccgagggacatgaggctgctttcactatccgcataagacacccgcccaaccctcggctgtacccacctgggtctctaccccagggaggtgaggctggtaggggcagggacatattagaaccagccttggtggggagcaagttgggagagggcagtcctgggaggggatatctacctgttcccctctcccaaccctccttgtctgcacccaaccctgtgcccccaatctcagcccagtacaacatcagcgctctagtcacgattgccaccaagaccttcctccgttatgatcggctacgggctctcatcaccagtatccgccgcttctacccaacggttaccgtggtcatcgctgacgacagcgacaagccagagcgcgttagtggcccctacgtggaacactatctcatgcccttcggcaaggtgtgcagctagcaggctgaacggcaggccagaggactcccgcagggggtgtgccctcaatctgcagcctccagggtagtgattcgaggaccacctgcctcagaatcatggggtgcctgttaagcatgaggattcctggaatgtaagcttcgtgggagcaggaaattctctctgaattcttagaatggtgcttagtgcctaatggcattcaataaaatagctgatgaatgaataaataaatgcacacggaaattaaacgcattctaagaccactgacttggaacctctgtggggatctgcatttcttttacctagctcctggcctttcgaaagcactcaaaagtctggagaagaatacaagctgagaagggtcgggggagagaaagaaaggtggcagagggccatgtcctatttctgcagcctccccaaccacacacacctttctgccagggctggttcgcaggccggaacctggccgtgtctcaagtaaccaccaagtacgtgctgtgggtggacgacgacttcgtcttcacggcgcggacgcggctggagaggcttgtggacgtgctggagcggacgccgctggacctggtagggcaggggctgcaggatgtgggggtggagaagggccttgaacaggctaaggccacagcgggggcgctgcggccaggaacggccagccctaggacaaagagagaaccacgaagtggggcctgggaactgtctgggtcctgcaggggtgaagcggaagaggatggggcaggggtacccccgaaggcaccggagcgcagaccttgaccccttcgggtcccctatcccaggcccgcctggaggcaacctccctctccctgcaggtggggggcgcggtgcgcgagatctccggctttgccaccacttatcggcagctgctgagcgtggagcccggcgccccaggcctcgggaactgcctccggcaaaggcgcggcttccaccacgagctcgtcggcttcccaggctgcgtggtcaccgacggcgtggttaacttcttcctggcgcggactgacaaggtgcgcgaggtcggtttcgacccccgcctcagccgcgtggctcatctggaattcttcttggatgggcttggttcccttcgggttggctcctgctccgacgtcgtggtggatcatgcatccaaactgaagctgccttggacatcaagggatgccggagcagagacttacgcccggtaccgttacccaggatcactggacgagagccagatggccaaacaccggctgctcttcttcaaacaccggctgcagtgcatgacctcccagtgatggcccgctggggatttctgactgtcaggctgggcctgcctccttgtccctgccaggaatttccaacaaaccccaccaccctgtgagcactctactggctgtccctgagcctctagttcctcactcttccttttcagaacctgatgcccagtaggggttgtcctggtgacacccctcctttttccagtgcccagaggcctggtggagccataacctctcccacagccagtgccaagtcctccccctgcccattctcatggggcaggaaatggggggatcactttccaagtgccaaagagcccagagggactctaagaacctaaggtggaaacactgtcctctcatcttgggaccgagggggtggggaagttccccaacacataatcccaagactgtgcccctcatctgcatcttcagatccagtactctgtgtacctgctccagccccacccccacagagagaacttgtggctctggggctggggtgagggctggtggttggtgaaagccattcttagttgtgtctctgcaatgctgtgggcacaaaagaaggggcaccagagtccctgtgcaaacacctagactcacttcatggattccaaagctctcagcttcattttattagttacgttaggtaagggggttcaagggtcatggtcctcatcacacacatgtcatcagggccctctgcactccacatgatgaggtcagacccacacggtgcaaatctttgggtcagtgagctcctggagaagagaggagacatgtcaggaatagattaggcacccctcttccttaatgaaatgtggcagtcctctcaggggtaccccacctacttagggatctgagttcttcagttcctcacccatagctcagcccgggctccctgatttggtcttcaatctactattcattccgtccccacccttttcttcttgatcttcctcagaccctttcccaaacccctctccctggg

SEQ ID NO: 3716 - protein, 155 aa, Homosapiens [sequence omitted]

SEQ ID NO: 3717 - DNA, 3017 bp, Homosapiens
gggcgctcgcattccccgcgcggagccgaagcagccgcaacgagccgggagctgagccgcgctgcgctgcggtgcgaagagccgggcggcggccagagccctccccgcgctgccagtgggacgcggagccagggatccccggctttgccccggggctggggtgcaacagactcttaacttggtcctcgcgccccgccaaccgcccccgggcaggaaacgcccagaaccaccaccgcgccgcgctccacaaaagccccgggagttccaagacgggagggatcgggcgcgctccagaggcaggagggtcccccacaccctcaggctcatgcccagctcccccatcgggcagcccccagccccatgaggaccctcaggccggggcgagagcccggcacagcccggaccgaaattttgccgctgccttagagcgttagacaggatgtggctgggccgccgggccctgtgcgctctggtccttctgctcgcctgcgcctcgctggggctcctgtacgcgagcacccgggacgcgcccggcctccggctacctcttgcgccgtgggcgcccccgcaaagcccccgcaggcccgagctgccagatcttgctcctgagccccgctacgcacacatcccggtcaggatcaaggagcaagtagtggggctgctggcttggaacaactgcagttgtgagtccagtggggggggcctccccctccccttccagaaacaagtccgagctattgacctcaccaaggcctttgaccctgcagagctgagggctgcctctgccacaagagagcaggagttccaggcctttctgtcgaggagccagtccccagctgaccagctgctcatagcccctgccaactccccgctccagtaccccctacagggtgtggaagttcagcccctcaggagcatcttggtgccagggctgagccttcaggcagcttctggtcaggaggtataccaggtgaacctgactgcctccctaggcacctgggacgtggcaggggaagtgactggagttactctcactggagagggtcaggcagatctcacccttgtcagcccagggctggaccaactcaacaggcaactacaactggtcacttacagcagccgaagctaccagaccaacacagcagacacagtccggttctccaccgagggacatgaggctgctttcactatccgcataagacacccgcccaaccctcggctgtacccacctgggtctctaccccagggagcccagtacaacatcagcgctctagtcacgattgccaccaagaccttcctccgttatgatcggctacgggctctcatcaccagtatccgccgcttctacccaacggttaccgtggtcatcgctgacgacagcgacaagccagagcgcgttagtggcccctacgtggaacactatctcatgcccttcggcaagggctggttcgcaggccggaacctggccgtgtctcaagtaaccaccaagtacgtgctgtgggtggacgacgacttcgtcttcacggcgcggacgcggctggagaggcttgtggacgtgctggagcggacgccgctggacctggtggggggcgcggtgcgcgagatctccggctttgccaccacttatcggcagctgctgagcgtggagcccggcgccccaggcctcgggaactgcctccggcaaaggcgcggcttccaccacgagctcgtcggcttcccaggctgcgtggtcaccgacggcgtggttaacttcttcctggcgcggactgacaaggtgcgcgaggtcggtttcgacccccgcctcagccgcgtggctcatctggaattcttcttggatgggcttggttcccttcgggttggctcctgctccgacgtcgtggtggatcatgcatccaaactgaagctgccttggacatcaagggatgccggagcagagacttacgcccggtaccgttacccaggatcactggacgagagccagatggccaaacaccggctgctcttcttcaaacaccggctgcagtgcatgacctcccagtgatggcccgctggggatttctgactgtcaggctgggcctgcctccttgtccctgccaggaatttccaacaaaccccaccaccctgtgagcactctactggctgtccctgagcctctagttcctcactcttccttttcagaacctgatgcccagtaggggttgtcctggtgacacccctcctttttccagtgcccagaggcctggtggagccataacctctcccacagccagtgccaagtcctccccctgcccattctcatggggcaggaaatggggggatcactttccaagtgccaaagagcccagagggactctaagaacctaaggtggaaacactgtcctctcatcttgggaccgagggggtggggaagttccccaacacataatcccaagactgtgcccctcatctgcatcttcagatccagtactctgtgtacctgctccagccccacccccacagagagaacttgtggctctggggctggggtgagggctggtggttggtgaaagccattcttagttgtgtctctgcaatgctgtgggcacaaaagaaggggcaccagagtccctgtgcaaacacctagactcacttcatggattccaaagctctcagcttcattttattagttacgttaggtaagggggttcaagggtcatggtcctcatcacacacatgtcatcagggccctctgcactccacatgatgaggtcagacccacacggtgcaaatctttgggtcagtgagctcctggagaagagaggagacatgtcaggaatagattaggcacccctcttccttaatgaaatgtggcagtcctctcaggggtaccccacctacttagggatctgagttcttcagttcctcacccatagctcagcccgggctccctgatttggtcttcaatctactattcattccgtccccacccttttcttcttgatcttcctcagaccctttcccaaacccctctccctggg

SEQ ID NO: 3718 - protein, 533 aa, Homosapiens; identical to SEQ ID NO: 514

SEQ ID NO: 3719 - DNA, 3374 bp, Homosapiens
ccagaccaacacagcagacacaggtgcaaggcctgggtggagagacgggcaggctgggcaaacagagaagaaccagaaaggctggagtgggcaaatggcagagggcatgggaggcatctgggctatggccagagctgtccagccacacaatgggtgcttcaactggaccagcagggccagagggagaaagggggcctttgttcatctggggctggagcaggccagagggaaacccgagccttgggtgtgtctcccctttaggccaactgtggggggccccaggaagagacttgtctaaggagttagaagactatattcccaacccaccccttactagagggcaaaggtctttactttcctgagatcccatttctcttccagcaaaagaggcctaaaagccctctttgcttctccccaaagctggtttgttgcactaagtttgcttccaccttagggcctttgcactttctattttctcagcctggaatgctcttccccagatttttgcagactggcttcttcttgtcatttagatctcagttcaaatgcctcctcttcactatcacattacttgtttgtcttattttccactcaatacttaccagtatctgaattttttaatttacttagcctggcaccagactgactaggttgctatcagttttgttgcttaatagttgtgtaaatgtggcaagttacttttctgtgtctcagcttttttttctgttgtaggaatctacttaatagggctatcatggggataaaatgagtgcatatatttaaggtaattttttaacgggtctggcacatagtaagtgctcaataaagattagcttttacttaaaattttctttgttgttttttctcctacccattagaatgtaagttccataaaggtaagaaccttctgttcttgtccaccaaggcctagaaaggtgggacacagagtaggcacttaaatattgattggctgaaaacagaatgttatcccacccttcagggtcaaatgccatgtcctttcttcccagtccggttctccaccgagggacatgaggctgctttcactatccgcataagacacccgcccaaccctcggctgtacccacctgggtctctaccccagggaggtgaggctggtaggggcagggacatattagaaccagccttggtggggagcaagttgggagagggcagtcctgggaggggatatctacctgttcccctctcccaaccctccttgtctgcacccaaccctgtgcccccaatctcagcccagtacaacatcagcgctctagtcacgattgccaccaagaccttcctccgttatgatcggctacgggctctcatcaccagtatccgccgcttctacccaacggttaccgtggtcatcgctgacgacagcgacaagccagagcgcgttagtggcccctacgtggaacactatctcatgcccttcggcaaggtgtgcagctagcaggctgaacggcaggccagaggactcccgcagggggtgtgccctcaatctgcagcctccagggtagtgattcgaggaccacctgcctcagaatcatggggtgcctgttaagcatgaggattcctggaatgtaagcttcgtgggagcaggaaattctctctgaattcttagaatggtgcttagtgcctaatggcattcaataaaatagctgatgaatgaataaataaatgcacacggaaattaaacgcattctaagaccactgacttggaacctctgtggggatctgcatttcttttacctagctcctggcctttcgaaagcactcaaaagtctggagaagaatacaagctgagaagggtcgggggagagaaagaaaggtggcagagggccatgtcctatttctgcagcctccccaaccacacacacctttctgccagggctggttcgcaggccggaacctggccgtgtctcaagtaaccaccaagtacgtgctgtgggtggacgacgacttcgtcttcacggcgcggacgcggctggagaggcttgtggacgtgctggagcggacgccgctggacctggtagggcaggggctgcaggatgtgggggtggagaagggccttgaacaggctaaggccacagcgggggcgctgcggccaggaacggccagccctaggacaaagagagaaccacgaagtggggcctgggaactgtctgggtcctgcaggggtgaagcggaagaggatggggcaggggtacccccgaaggcaccggagcgcagaccttgaccccttcgggtcccctatcccaggcccgcctggaggcaacctccctctccctgcaggtggggggcgcggtgcgcgagatctccggctttgccaccacttatcggcagctgctgagcgtggagcccggcgccccaggcctcgggaactgcctccggcaaaggcgcggcttccaccacgagctcgtcggcttcccaggctgcgtggtcaccgacggcgtggttaacttcttcctggcgcggactgacaaggtgcgcgaggtcggtttcgacccccgcctcagccgcgtggctcatctggaattcttcttggatgggcttggttcccttcgggttggctcctgctccgacgtcgtggtggatcatgcatccaaactgaagctgccttggacatcaagggatgccggagcagagacttacgcccggtaccgttacccaggatcactggacgagagccagatggccaaacaccggctgctcttcttcaaacaccggctgcagtgcatgacctcccagtgatggcccgctggggatttctgactgtcaggctgggcctgcctccttgtccctgccaggaatttccaacaaaccccaccaccctgtgagcactctactggctgtccctgagcctctagttcctcactcttccttttcagaacctgatgcccagtaggggttgtcctggtgacacccctcctttttccagtgcccagaggcctggtggagccataacctctcccacagccagtgccaagtcctccccctgcccattctcatggggcaggaaatggggggatcactttccaagtgccaaagagcccagagggactctaagaacctaaggtggaaacactgtcctctcatcttgggaccgagggggtggggaagttccccaacacataatcccaagactgtgcccctcatctgcatcttcagatccagtactctgtgtacctgctccagccccacccccacagagagaacttgtggctctggggctggggtgagggctggtggttggtgaaagccattcttagttgtgtctctgcaatgctgtgggcacaaaagaaggggcaccagagtccctgtgcaaacacctagactcacttcatggattc

SEQ ID NO: 3720 - protein, 155 aa, Homosapiens [sequence omitted]

SEQ ID NO: 3721 - DNA, 568 bp, Homosapiens
aatgtaagttccataaagtccggttctccaccgagggacatgaggctgctttcactatccgcataagacacccgcccaaccctcggctgtacccacctgggtctctaccccagggagcccagtacaacatcagcgctctagtcacgattgccaccaagaccttcctccgttatgatcggctacgggctctcatcaccagtatccgccgcttctacccaacggttaccgtggtcatcgctgacgacagcgacaagccagagcgcgttagtggcccctacgtggaacactatctcatgcccttcggcaaggtgtgcagctagcaggctgaacggcaggccagaggactcccgcagggggtgtgccctcaatctgcagcctccagggtagtgattcgaggaccacctgcctcagaatcatggggtgcctgttaagcatgaggattcctggaatgtaagcttcgtgggagcaggaaattctctctgaattcttagaatggtgcttagtgcctaatggcattcaataaaatagctgatgaatgaataaataaatgcacacggaaattaaacgc

SEQ ID NO: 3722 - protein, 71 aa, Homosapiens
MIGYGLSSPVSAASTQRLPWSSLTTATSQSALVAPTWNTISCPSARCAASRLNGRPEDSRRGCALNLQPPG

SEQ ID NO: 3723 - DNA, 1970 bp, Homosapiens
gggcgctcgcattccccgcgcggagccgaagcagccgcaacgagccgggagctgagccgcgctgcgctgcggtgcgaagagccgggcggcggccagagccctccccgcgctgccagtgggacgcggagccagggatccccggctttgccccggggctggggtgcaacagactcttaacttggtcctcgcgccccgccaaccgcccccgggcaggaaacgcccagaaccaccaccgcgccgcgctccacaaaagccccgggagttccaagacgggagggatcgggcgcgctccagaggcaggagggtcccccacaccctcaggctcatgcccagctcccccatcgggcagcccccagccccatgaggaccctcaggccggggcgagagcccggcacagcccggaccgaaattttgccgctgccttagagcgttagacaggatgtggctgggccgccgggccctgtgcgctctggtccttctgctcgcctgcgcctcgctggggctcctgtacgcgagcacccgggacgcgcccggcctccggctacctcttgcgccgtgggcgcccccgcaaagcccccgcaggcccgagctgccagatcttgctcctgagccccgctacgcacacatcccggtcaggatcaaggagcaagtagtggggctgctggcttggaacaactgcagttgtgagtccagtggggggggcctccccctccccttccagaaacaagtccgagctattgacctcaccaaggcctttgaccctgcagagctgagggctgcctctgccacaagagagcaggagttccaggcctttctgtcgaggagccagtccccagctgaccagctgctcatagcccctgccaactccccgctccagtaccccctacagggtgtggaagttcagcccctcaggagcatcttggtgccagggctgagccttcaggcagcttctggtcaggaggtataccaggtgaacctgactgcctccctaggcacctgggacgtggcaggggaagtgactggagttactctcactggagagggtcaggcagatctcacccttgtcagcccagggctggaccaactcaacaggcaactacaactggtcacttacagcagccgaagctaccagaccaacacagcagacacaggtgcaaggcctgggtggagagacgggcaggctgggcaaacagagaagaaccagaaaggctggagtgggcaaatggcagagggcatgggaggcatctgggctatggccagagctgtccagccacacaatgggtgcttcaactggaccagcagggccagagggagaaagggggcctttgttcatctggggctggagcaggccagagggaaacccgagccttgggtgtgtctcccctttaggccaactgtggggggccccaggaagagacttgtctaaggagttagaagactatattcccaacccaccccttactagagggcaaaggtctttactttcctgagatcccatttctcttccagcaaaagaggcctaaaagccctctttgcttctccccaaagctggtttgttgcactaagtttgcttccaccttagggcctttgcactttctattttctcagcctggaatgctcttccccagatttttgcagactggcttcttcttgtcatttagatctcagttcaaatgcctcctcttcactatcacattacttgtttgtcttattttccactcaatacttaccagtatctgaattttttaatttacttagcctggcaccagactgactaggttgctatcagttttgttgcttaatagttgtgtaaatgtggcaagttacttttctgtgtctcagcttttttttctgttgtaggaatctacttaatagggctatcatggggataaaatgagtgcatatatttaaggtaattttttaacgggtctggcacatagtaagtgctcaataaagattagcttttactt

SEQ ID NO: 3724 - protein, 328 aa, Homosapiens
MWLGRRALCALVLLLACASLGLLYASTRDAPGLRLPLAPWAPPQSPRRPELPDLAPEPRYAHIPVRIKEQVVGLLAWNNCSCESSGGGLPLPFQKQVRAIDLTKAFDPAELRAASATREQEFQAFLSRSQSPADQLLIAPANSPLQYPLQGVEVQPLRSILVPGLSLQAASGQEVYQVNLTASLGTWDVAGEVTGVTLTGEGQADLTLVSPGLDQLNRQLQLVTYSSRSYQTNTADTGARPGWRDGQAGQTEKNQKGWSGQMAEGMGGIWAMARAVQPHNGCFNWTSRARGRKGAFVHLGLEQARGKPEPWVCLPFRPTVGGPRKRLV

SEQ ID NO: 3725 - DNA, 1337 bp, Homosapiens
gcctggcttagggcggaaacagattctctgcataagaaggggaacgaaagatggcggcggaaacgctgctgtccagtttgttaggactgctgcttctgggactcctgttacccgcaagtctgaccggcggtgtcgggagcctgaacctggaggagctgagtgagatgcgttatgggatcgagatcctgccgttgcctgtcatgggagggcagagccaatcttcggacgtggtgattgtctcctctaagtacaaacagcgctatgagtgtcgcctgccagctggagctattcacttccagcgtgaaagggaggaggaaacacctgcttaccaagggcctgggatccctgagttgttgagcccaatgagagatgctccctgcttgctgaagacaaaggactggtggacatatgaattctgttatggacgccacatccagcaataccacatggaagattcagagatcaaaggtgaagtcctctatctcggctactaccaatcagccttcgactgggatgatgaaacagccaaggcctccaagcagcatcgtcttaaacgctaccacagccagacctatggcaatgggtccaagtgcgaccttaatgggaggccccgggaggccgaggttcggttcctctgtgacgagggtgcaggtatctctggggactacatcgatcgcgtggacgagcccttgtcctgctcttatgtgctgaccattcgcactcctcggctctgcccccaccctctcctccggcccccacccagtgctgcaccgcaggccatcctctgtcacccttccctacagcctgaggagtacatggcctacgttcagaggcaagccggtgagtaattagagaaggaggagaagacggggagatacgggggcagggggtggcaaaagatcaagtattgaatagctggaggaatgtgttcctggcctgcttgcatgctgtttctcagtagactcaaagcagtatggagataaaatcatagaggagctgcaagatctaggcccccaagtgtggagtgagaccaagtctggggtggcaccccaaaagatggcaggtaggaccttgtttcacctgttccgtgaaactcacttccatttcttcccttcccctgatcttactgtcctgactgactggtggggtgggggggggtggaaaagtaccatgggccctcctcccttggtgatagaggaggggaagggaccccatcctatttgctcccttctgtctcacccctcctgtcagatcagtctctccctgttctctgtaccctaggtgcgagcccgaccaaggatgacagtaaggactcagatttctggaagatgcttaat

SEQ ID NO: 3726 - protein, 265 aa, Homosapiens
MAAETLLSSLLGLLLLGLLLPASLTGGVGSLNLEELSEMRYGIEILPLPVMGGQSQSSDVVIVSSKYKQRYECRLPAGAIHFQREREEETPAYQGPGIPELLSPMRDAPCLLKTKDWWTYEFCYGRHIQQYHMEDSEIKGEVLYLGYYQSAFDWDDETAKASKQHRLKRYHSQTYGNGSKCDLNGRPREAEVRFLCDEGAGISGDYIDRVDEPLSCSYVLTIRTPRLCPHPLLRPPPSAAPQAILCHPSLQPEEYMAYVQRQAGE

SEQ ID NO: 3727 - DNA, 2702 bp, Homosapiens
gcctggcttagggcggaaacagattctctgcataagaaggggaacgaaagatggcggcggaaacgctgctgtccagtttgttaggactgctgcttctgggactcctgttacccgcaagtctgaccggcggtgtcgggagcctgaacctggaggagctgagtgagatgcgttatgggatcgagatcctgccgttgcctgtcatgggagggcagagccaatcttcggacgtggtgattgtctcctctaagtacaaacagcgctatgagtgtcgcctgccagctggagctattcacttccagcgtgaaagggaggaggaaacacctgcttaccaagggcctgggatccctgagttgttgagcccaatgagagatgctccctgcttgctgaagacaaaggactggtggacatatgaattctgttatggacgccacatccagcaataccacatggaagattcagagatcaaaggtgaagtcctctatctcggctactaccaatcagccttcgactgggatgatgaaacagccaaggcctccaagcagcatcgtcttaaacgctaccacagccagacctatggcaatgggtccaagtgcgaccttaatgggaggccccgggaggccgaggttcggttcctctgtgacgagggtgcaggtatctctggggactacatcgatcgcgtggacgagcccttgtcctgctcttatgtgctgaccattcgcactcctcggctctgcccccaccctctcctccggcccccacccagtgctgcaccgcaggccatcctctgtcacccttccctacagcctgaggagtacatggcctacgttcagaggcaagccgactcaaagcagtatggagataaaatcatagaggagctgcaagatctaggcccccaagtgtggagtgagaccaagtctggggtggcaccccaaaagatggcaggtgcgagcccgaccaaggatgacagtaaggactcagatttctggaagatgcttaatgagccagaggaccaggccccaggaggggaggaggtgccggctgaggagcaggacccaagccctgaggcagcagattcagcttctggtgctcccaatgattttcagaacaacgtgcaggtcaaagtcattcgaagccctgcggatttgattcgattcatagaggagctgaaaggtggaacaaaaaaggggaagccaaatataggccaagagcagcctgtggatgatgctgcagaagtccctcagagggaaccagagaaggaaaggggtgatccagaacggcagagagagatggaagaagaggaggatgaggatgaggatgaggatgaagatgaggatgaacggcagttactgggagaatttgagaaggaactggaagggatcctgcttccgtcagaccgagaccggctccgttcggaggtgaaggctggcatggagcgggaactggaaaacatcatccaggagacagagaaagagctggacccagatgggctgaagaaggagtcagagcgggatcgggcaatgctggctctcacatccactctcaacaaactcatcaaaagactggaggaaaaacagagtccagagctggtgaagaagcacaagaaaaagagggttgtccccaaaaagcctcccccatcaccccaacctacagaggaggatcctgagcacagagtccgggtccgggtcaccaagctccgtctcggaggccctaatcaggatctgactgtcctcgagatgaaacgggaaaacccacagctgaaacaaatcgaggggctggtgaaggagctgctggagagggagggactcacagctgcagggaaaattgagatcaaaattgtccgcccatgggctgaagggactgaagagggtgcacgttggctgactgatgaggacacgagaaacctcaaggagatcttcttcaatatcttggtgccgggagctgaagaggcccagaaggaacgccagcggcagaaagagctggagagcaattaccgccgggtgtggggctctccaggtggggagggcacaggggacctggacgaatttgacttctgagaccaacactacacttgacccttcacggaatccagactcttcctggactggcttgcctcctccccacctccccaccctggaacccctgagggccaaacagcagagtggagctgagctgtggacctctcgggcaactctgtgggtgtgggggccctgggtgaatgctgctgcccctgctggcagccaccttgagacctcaccgggcctgtgatatttgctctcctgaactctcactcaatcctcttcctctcctctgtggcttttcctgttattgtcccctaatgataggatattccctgctgcctacctggagattcagtaggatcttttgagtggaggtgggtagagagagcaaggagggcaggacacttagcaggcactgagcaagcaggcccccacctgcccttagtgatgtttggagtcgttttaccctcttctattgaattgccttgggatttccttctccctttccctgcccaccctgtcccctacaatttgtgcttctgagttgaggagccttcacctctgttgctgaggaaatggtagaatgctgcctatcacctccagcacaatcccagtgaaaaaggtgtgaagcacccaccatgttcttgaacaatcaggtttctaaataaacaactggaccatcaa

SEQ ID NO: 3728 - protein, 667 aa, Homosapiens; identical to SEQ ID NO: 522

SEQ ID NO: 3729 - DNA, 2537 bp, Homosapiens
gcctggcttagggcggaaacagattctctgcataagaaggggaacgaaagatggcggcggaaacgctgctgtccagtttgttaggactgctgcttctgggactcctgttacccgcaagtctgaccggcggtgtcgggagcctgaacctggaggagctgagtgagatgcgttatgggatcgagatcctgccgttgcctgtcatgggagggcagagccaatcttcggacgtggtgattgtctcctctaagtacaaacagcgctatgagtgtcgcctgccagctggagctattcacttccagcgtgaaagggaggaggaaacacctgcttaccaagggcctgggatccctgagttgttgagcccaatgagagatgctccctgcttgctgaagacaaaggactggtggacatatgaattctgttatggacgccacatccagcaataccacatggaagattcagagatcaaaggtgaagtcctctatctcggctactaccaatcagccttcgactgggatgatgaaacagccaaggcctccaagcagcatcgtcttaaacgctaccacagccagacctatggcaatgggtccaagtgcgaccttaatgggaggccccgggaggccgaggttcggttcctctgtgacgagggtgcaggtatctctggggactacatcgatcgcgtggacgagcccttgtcctgctcttatgtgctgaccattcgcactcctcggctctgcccccaccctctcctccggcccccacccagtgctgcaccgcaggccatcctctgtcacccttccctacagcctgaggagtacatggcctacgttcagaggcaagccgactcaaagcagtatggagataaaatcatagaggagctgcaagatctaggcccccaagtgtggagtgagaccaagtctggggtggcaccccaaaagatggcaggtgcgagcccgaccaaggatgacagtaaggactcagatttctggaagatgcttaatgagccagaggaccaggccccaggaggggaggaggtgccggctgaggagcaggacccaagccctgaggcagcagattcagcttctggtgctcccaatgattttcagaacaacgtgcaggtcaaagtcattcgaagccctgcggatttgattcgattcatagaggagctgaaaggtggaacaaaaaaggggaagccaaatataggccaagagcagcctgtggatgatgctgcagaagtccctcagagggaaccagagaaggaaaggggtgatccagaacggcagagagagatggaagaagaggaggatgaggatgaggatgaggatgaagatgaggatgaacggcagttactgggagaatttgagaaggaactggaagggatcctgcttccgtcagaccgagaccggctccgttcggaggtgaaggctggcatggagcgggaactggaaaacatcatccaggagacagagaaagagctggacccagatgggctgaagaaggagtcagagcgggatcgggcaatgctggctctcacatccactctcaacaaactcatcaaaagactggaggaaaaacagagtccagagctggtgaagaagcacaagaaaaagagggttgtccccaaaaagcctcccccatcaccccaacctacagggaaaattgagatcaaaattgtccgcccatgggctgaagggactgaagagggtgcacgttggctgactgatgaggacacgagaaacctcaaggagatcttcttcaatatcttggtgccgggagctgaagaggcccagaaggaacgccagcggcagaaagagctggagagcaattaccgccgggtgtggggctctccaggtggggagggcacaggggacctggacgaatttgacttctgagaccaacactacacttgacccttcacggaatccagactcttcctggactggcttgcctcctccccacctccccaccctggaacccctgagggccaaacagcagagtggagctgagctgtggacctctcgggcaactctgtgggtgtgggggccctgggtgaatgctgctgcccctgctggcagccaccttgagacctcaccgggcctgtgatatttgctctcctgaactctcactcaatcctcttcctctcctctgtggcttttcctgttattgtcccctaatgataggatattccctgctgcctacctggagattcagtaggatcttttgagtggaggtgggtagagagagcaaggagggcaggacacttagcaggcactgagcaagcaggcccccacctgcccttagtgatgtttggagtcgttttaccctcttctattgaattgccttgggatttccttctccctttccctgcccaccctgtcccctacaatttgtgcttctgagttgaggagccttcacctctgttgctgaggaaatggtagaatgctgcctatcacctccagcacaatcccagtgaaaaaggtgtgaagcacccaccatgttcttgaacaatcaggtttctaaataaacaactggaccatcaa

SEQ ID NO: 3730 - protein, 612 aa, Homosapiens; identical to SEQ ID NO: 516

SEQ ID NO: 3731 - DNA, 1813 bp, Homosapiens
gcctggcttagggcggaaacagattctctgcataagaaggggaacgaaagatggcggcggaaacgctgctgtccagtttgttaggactgctgcttctgggactcctgttacccgcaagtctgaccggcggtgtcgggagcctgaacctggaggagctgagtgagatgcgttatgggatcgagatcctgccgttgcctgtcatgggagggcagagccaatcttcggacgtggtgattgtctcctctaagtacaaacagcgctatgagtgtcgcctgccagctggagctattcacttccagcgtgaaagggaggaggaaacacctgcttaccaagggcctgggatccctgagttgttgagcccaatgagagatgctccctgcttgctgaagacaaaggactggtggacatatgaattctgttatggacgccacatccagcaataccacatggaagattcagagatcaaaggtgaagtcctctatctcggctactaccaatcagccttcgactgggatgatgaaacagccaaggcctccaagcagcatcgtcttaaacgctaccacagccagacctatggcaatgggtccaagtgcgaccttaatgggaggccccgggaggccgaggttcggttcctctgtgacgagggtgcaggtatctctggggactacatcgatcgcgtggacgagcccttgtcctgctcttatgtgctgaccattcgcactcctcggctctgcccccaccctctcctccggcccccacccagtgctgcaccgcaggccatcctctgtcacccttccctacagcctgaggagtacatggcctacgttcagaggcaagccgactcaaagcagtatggagataaaatcatagaggagctgcaagatctaggcccccaagtgtggagtgagaccaagtctggggtggcaccccaaaagatggcaggtgcgagcccgaccaaggatgacagtaaggactcagatttctggaagatgcttaatgagccagaggaccaggccccaggaggggaggaggtgccggctgaggagcaggacccaagccctgaggcagcagattcagcttctggtgctcccaatgattttcagaacaacgtgcaggtcaaagtcattcgaagccctgcggatttgattcgattcatagaggagctgaaaggtggaacaaaaaaggggaagccaaatataggccaagagcagcctgtggatgatgctgcagaagtccctcagagggaaccagagaaggaaaggggtgatccagaacggcagagagagatggaagaagaggaggatgaggatgaggatgaggatgaagatgaggatgaacggcagttactgggagaatttgagaaggaactggaagggatcctgcttccgtcagaccgagaccggctccgttcggaggtgaaggctggcatggagcgggaactggaaaacatcatccaggagacagagaaagagctggagattcagtaggatcttttgagtggaggtgggtagagagagcaaggagggcaggacacttagcaggcactgagcaagcaggcccccacctgcccttagtgatgtttggagtcgttttaccctcttctattgaattgccttgggatttccttctccctttccctgcccaccctgtcccctacaatttgtgcttctgagttgaggagccttcacctctgttgctgaggaaatggtagaatgctgcctatcacctccagcacaatcccagtgaaaaaggtgtgaagcacccaccatgttcttgaacaatcaggtttctaaataaacaactggaccatcaa

SEQ ID NO: 3732 - protein, 478 aa, Homosapiens
MAAETLLSSLLGLLLLGLLLPASLTGGVGSLNLEELSEMRYGIEILPLPVMGGQSQSSDVVIVSSKYKQRYECRLPAGAIHFQREREEETPAYQGPGIPELLSPMRDAPCLLKTKDWWTYEFCYGRHIQQYHMEDSEIKGEVLYLGYYQSAFDWDDETAKASKQHRLKRYHSQTYGNGSKCDLNGRPREAEVRFLCDEGAGISGDYIDRVDEPLSCSYVLTIRTPRLCPHPLLRPPPSAAPQAILCHPSLQPEEYMAYVQRQADSKQYGDKIIEELQDLGPQVWSETKSGVAPQKMAGASPTKDDSKDSDFWKMLNEPEDQAPGGEEVPAEEQDPSPEAADSASGAPNDFQNNVQVKVIRSPADLIRFIEELKGGTKKGKPNIGQEQPVDDAAEVPQREPEKERGDPERQREMEEEEDEDEDEDEDEDERQLLGEFEKELEGILLPSDRDRLRSEVKAGMERELENIIQETEKELEIQ

SEQ ID NO: 3733 - DNA, 746 bp, Homosapiens
agattctctgcataagaaggggaacgaaagatggcggcggaaacgctgctgtccagtttgttaggactgctgcttctgggactcctgttacccgcaagtctgaccggcggtgtcgggagcctgaacctggaggagctgagtgagatgcgttatgggatcgagatcctccccaccctggaacccctgagggccaaacagcagagtggagctgagctgtggacctctcgggcaactctgtgggtgtgggggccctgggtgaatgctgctgcccctgctggcagccaccttgagacctcaccgggcctgtgatatttgctctcctgaactctcactcaatcctcttcctctcctctgtggcttttcctgttattgtcccctaatgataggatattccctgctgcctacctggagattcagtaggatcttttgagtggaggtgggtagagagagcaaggagggcaggacacttagcaggcactgagcaagcaggcccccacctgcccttagtgatgtttggagtcgttttaccctcttctattgaattgccttgggatttccttctccctttccctgcccaccctgtcccctacaatttgtgcttctgagttgaggagccttcacctctgttgctgaggaaatggtagaatgctgcctatcacctccagcacaatcccagtgaaaaaggtgtgaagcacccaccatgttcttgaacaatcaggtttctaaataaacaactggaccatcaa

SEQ ID NO: 3734 - protein, 92 aa, Homosapiens
MAAETLLSSLLGLLLLGLLLPASLTGGVGSLNLEELSEMRYGIEILPTLEPLRAKQQSGAELWTSRATLWVWGPWVNAAAPAGSHLETSPGL

SEQ ID NO: 3735 - DNA, 439 bp, Homosapiens
ctgcataagaaggggaacgaaagatggcggcggaaacgctgctgtccagtttgttaggactgctgcttctgggactcctgttacccgcaagtctgaccggcggtgtcgggagcctgaacctggaggagctgagtgagatgcgttatgggatcgagatcctgccgttgcctgtcatgggagggcagagccaatcttcggacgtggtgattgtctcctctaagtacaaacagcgctatgagtgtcgcctgccagctggagctattcacttccagcgtgaaagggaggaggaaacacctgcttaccaagggcctgggatccctgagttgttgagcccaatgagagatgctccctgcttgctgaagggaggaatggaaagaccacaagtggaaaacagactttagagatatctctccaagtcacagaaggaaagcagccctcc

SEQ ID NO: 3736 - protein, 125 aa, Homosapiens
MAAETLLSSLLGLLLLGLLLPASLTGGVGSLNLEELSEMRYGIEILPLPVMGGQSQSSDVVIVSSKYKQRYECRLPAGAIHFQREREEETPAYQGPGIPELLSPMRDAPCLLKGGMERPQVENRL

SEQ ID NO: 3737 - DNA, 529 bp, Homosapiens
ctgcataagaaggggaacgaaagatggcggcggaaacgctgctgtccagtttgttaggactgctgcttctgggactcctgttacccgcaagtctgaccggcggtgtcgggagcctgaacctggaggagctgagtgagatgcgttatgggatcgagatcctgccgttgcctgtcatgggagggcagagccaatcttcggacgtggtgattgtctcctctaagtacaaacagcgctatgagtgtcgcctgccagctggagctattcacttccagcgtgaaagggaggaggaaacacctgcttaccaagggcctgggatccctgagttgttgagcccaatgagagatgctccctgcttgctgaagacaaaggactggtggacatatgaattctgttatggacgccacatccagcaataccacatggaagattcagagatcaaaggtgaagtcctctatctcggctactaccaatcagccttcgactgggatgatgaaacagccaagttcctctgtgacgagggtgcaggtat

SEQ ID NO: 3738 - protein, 167 aa, Homosapiens
MAAETLLSSLLGLLLLGLLLPASLTGGVGSLNLEELSEMRYGIEILPLPVMGGQSQSSDVVIVSSKYKQRYECRLPAGAIHFQREREEETPAYQGPGIPELLSPMRDAPCLLKTKDWWTYEFCYGRHIQQYHMEDSEIKGEVLYLGYYQSAFDWDDETAKFLCDEGA

SEQ ID NO: 3739 - DNA, 985 bp, Homosapiens
ctgcataagaaggggaacgaaagatggcggcggaaacgctgctgtccagtttgttaggactgctgcttctgggactcctgttacccgcaagtctgaccggcggtgtcgggagcctgaacctggaggagctgagtgagatgcgttatgggatcgagatcctgccgttgcctgtcatgggagggcagagccaatcttcggacgtggtgattgtctcctctaagtacaaacagcgctatgagtgtcgcctgccagctggagctattcacttccagcgtgaaagggaggaggaaacacctgcttaccaagggcctgggatccctgagttgttgagcccaatgagagatgctccctgcttgctgaagacaaaggactggtggacatatgaattctgttatggacgccacatccagcaataccacatggaagattcagagatcaaaggtgaagtcctctatctcggctactaccaatcagccttcgactgggatgatgaaacagccaaggtggcaagagtgtgggattcaggaagaaagggttctggccaccggctgagagccctgacaagaaggggagggtcaagattagctgatctgtttcttggggcttggtggccattaggacaaagtttcctggggcctgggggcacaggccattcttttgtctctttggggacgcagtgccatccttcctctttgctatctttctcatgtcccccattcctgcctcatgtcttctccaggcctccaagcagcatcgtcttaaacgctaccacagccagacctatggcaatgggtccaagtgcgaccttaatgggaggccccgggaggccgaggttcggttcctctgtgacgagggtgcaggtatctctggggactacatcgatcgcgtggacgagcccttgtcctgctcttatgtgctgaccattcgcactcctcggctctgcccccaccctctcctccggcccccacccagtgctgcaccgcag

SEQ ID NO: 3740 - protein, 298 aa, Homosapiens
MAAETLLSSLLGLLLLGLLLPASLTGGVGSLNLEELSEMRYGIEILPLPVMGGQSQSSDVVIVSSKYKQRYECRLPAGAIHFQREREEETPAYQGPGIPELLSPMRDAPCLLKTKDWWTYEFCYGRHIQQYHMEDSEIKGEVLYLGYYQSAFDWDDETAKVARVWDSGRKGSGHRLRALTRRGGSRLADLFLGAWWPLGQSFLGPGGTGHSFVSLGTQCHPSSLLSFSCPPFLPHVFSRPPSSIVLNATTARPMAMGPSATLMGGPGRPRFGSSVTRVQVSLGTTSIAWTSPCPALMC

SEQ ID NO: 3741 - DNA, 1179 bp, Homosapiens
aagaaggggaacgaaagatggcggcggaaacgctgctgtccagtttgttaggactgctgcttctgggactcctgttacccgcaagtctgaccggcggtgtcgggagcctgaacctggaggagctgagtgagatgcgttatgggatcgagatcctgccgttgcctgtcatgggagggcagagccaatcttcggacgtggtgattgtctcctctaagtacaaacagcgctatgagtgtcgcctgccagctggagctattcacttccagcgtgaaagggaggaggaaacacctgcggaaaattgagatcaaaattgtccgcccatgggctgaagggactgaagagggtgcacgttggctgactgatgaggacacgagaaacctcaaggagatcttcttcaatatcttggtgccgggagctgaagaggcccagaaggaacgccagcggcagaaagagctggagagcaattaccgccgggtgtggggctctccaggtggggagggcacaggggacctggacgaatttgacttctgagaccaacactacacttgacccttcacggaatccagactcttcctggactggcttgcctcctccccacctccccaccctggaacccctgagggccaaacagcagagtggagctgagctgtggacctctcgggcaactctgtgggtgtgggggccctgggtgaatgctgctgcccctgctggcagccaccttgagacctcaccgggcctgtgatatttgctctcctgaactctcactcaatcctcttcctctcctctgtggcttttcctgttattgtcccctaatgataggatattccctgctgcctacctggagattcagtaggatcttttgagtggaggtgggtagagagagcaaggagggcaggacacttagcaggcactgagcaagcaggcccccacctgcccttagtgatgtttggagtcgttttaccctcttctattgaattgccttgggatttccttctccctttccctgcccaccctgtcccctacaatttgtgcttctgagttgaggagccttcacctctgttgctgaggaaatggtagaatgctgcctatcacctccagcacaatcccagtgaaaaaggtgtgaagcacccaccatgttcttgaacaatcaggtttctaaataaacaactggaccatcaa

SEQ ID NO: 3742 - protein, 126 aa, Homosapiens
MRTRETSRRSSSISWCRELKRPRRNASGRKSWRAITAGCGALQVGRAQGTWTNLTSETNTTLDPSRNPDSSWTGLPPPHLPTLEPLRAKQQSGAELWTSRATLWVWGPWVNAAAPAGSHLETSPGL

SEQ ID NO: 3743 - DNA, 1181 bp, Homosapiens
aagaaggggaacgaaagatggcggcggaaacgctgctgtccagtttgttaggactgctgcttctgggactcctgttacccgcaagtctgaccggcggtgtcgggagcctgaacctggaggagctgagtgagatgcgttatgggatcgagatcctgccgttgcctgtcatgggagggcagagccaatcttcggacgtggtgattgtctcctctaagtacaaacagcgctatgagtgtcgcctgccagctggagctattcacttccagcgtgaaagggagggactcacagctgcagggaaaattgagatcaaaattgtccgcccatgggctgaagggactgaagagggtgcacgttggctgactgatgaggacacgagaaacctcaaggagatcttcttcaatatcttggtgccgggagctgaagaggcccagaaggaacgccagcggcagaaagagctggagagcaattaccgccgggtgtggggctctccaggtggggagggcacaggggacctggacgaatttgacttctgagaccaacactacacttgacccttcacggaatccagactcttcctggactggcttgcctcctccccacctccccaccctggaacccctgagggccaaacagcagagtggagctgagctgtggacctctcgggcaactctgtgggtgtgggggccctgggtgaatgctgctgcccctgctggcagccaccttgagacctcaccgggcctgtgatatttgctctcctgaactctcactcaatcctcttcctctcctctgtggcttttcctgttattgtcccctaatgataggatattccctgctgcctacctggagattcagtaggatcttttgagtggaggtgggtagagagagcaaggagggcaggacacttagcaggcactgagcaagcaggcccccacctgcccttagtgatgtttggagtcgttttaccctcttctattgaattgccttgggatttccttctccctttccctgcccaccctgtcccctacaatttgtgcttctgagttgaggagccttcacctctgttgctgaggaaatggtagaatgctgcctatcacctccagcacaatcccagtgaaaaaggtgtgaagcacccaccatgttcttgaacaatcaggtttctaaataaacaactggaccatcaa

SEQ ID NO: 3744 - protein, 171 aa, Homosapiens
MAAETLLSSLLGLLLLGLLLPASLTGGVGSLNLEELSEMRYGIEILPLPVMGGQSQSSDVVIVSSKYKQRYECRLPAGAIHFQREREGLTAAGKIEIKIVRPWAEGTEEGARWLTDEDTRNLKEIFFNILVPGAEEAQKERQRQKELESNYRRVWGSPGGEGTGDLDEFDF

SEQ ID NO: 3745 - DNA, 658 bp, Homosapiens
gaaggggaacgaaagatggcggcggaaacgctgctgtccagtttgttaggactgctgcttctgggactcctgttacccgcaagtctgaccggcggtgtcgggagcctgaacctggaggagctgagctgtggacctctcgggcaactctgtgggtgtgggggccctgggtgaatgctgctgcccctgctggcagccaccttgagacctcaccgggcctgtgatatttgctctcctgaactctcactcaatcctcttcctctcctctgtggcttttcctgttattgtcccctaatgataggatattccctgctgcctacctggagattcagtaggatcttttgagtggaggtgggtagagagagcaaggagggcaggacacttagcaggcactgagcaagcaggcccccacctgcccttagtgatgtttggagtcgttttaccctcttctattgaattgccttgggatttccttctccctttccctgcccaccctgtcccctacaatttgtgcttctgagttgaggagccttcacctctgttgctgaggaaatggtagaatgctgcctatcacctccagcacaatcccagtgaaaaaggtgtgaagcacccaccatgttcttgaacaatcaggtttctaaataaacaactggaccatcaa

SEQ ID NO: 3746 - protein, 51 aa, Homosapiens
MAAETLLSSLLGLLLLGLLLPASLTGGVGSLNLEELSCGPLGQLCGCGGPG

SEQ ID NO: 3747 - DNA, 378 bp, Homosapiens
cggcggtgtcgggagcctgaacctggaggagctgagtgagatgcgttatggggatcttttgagtggaggtgggtagagagagcaaggagggcaggacacttagcaggcactgagcaagcaggcccccacctgcccttagtgatgtttggagtcgttttaccctcttctattgaattgccttgggatttccttctccctttccctgcccaccctgtcccctacaatttgtgcttctgagttgaggagccttcacctctgttgctgaggaaatggtagaatgctgcctatcacctccagcacaatcccagtgaaaaaggtgtgaagcacccaccatgttcttgaacaatcaggtttctaaataaacaactggaccatcaa

SEQ ID NO: 3748 - protein, 31 aa, Homosapiens
MFGVVLPSSIELPWDFLLPFPAHPVPYNLCF

SEQ ID NO: 3749 - DNA, 806 bp, Homosapiens
cctgggggtcgcagactgagaccaattctctgggggccaggaattgggagaggtggggcttcccgctgtcaaccttcaggtctcagtttatgatcgaaacacccggactccgcccccgtggagaaatgggagcgccctctcctctcacccactaaatacagctggagggcttatggcttattctgtcttcgactgatctcttccccagggtttgaagagggatttcgttgttctccctgatcccagcctttctttgcttccttgccccccgaccctcccttctttcccagagccaatcttcggacgtggtgattgtctcctctaagtacaaacagcgctatgagtgtcgcctgccagctggagctattcacttccagcgtgaaagggaggaggaaacacctgcttaccaagggcctgggatccctgagtttgtcccctaatgataggatattccctgctgcctacctggagattcagtaggatcttttgagtggaggtgggtagagagagcaaggagggcaggacacttagcaggcactgagcaagcaggcccccacctgcccttagtgatgtttggagtcgttttaccctcttctattgaattgccttgggatttccttctccctttccctgcccaccctgtcccctacaatttgtgcttctgagttgaggagccttcacctctgttgctgaggaaatggtagaatgctgcctatcacctccagcacaatcccagtgaaaaaggtgtgaagcacccaccatgttcttgaacaatcaggtttctaaataaacaactggaccatcaa

SEQ ID NO: 3750 - protein, 46 aa, Homosapiens
MSVACQLELFTSSVKGRRKHLLTKGLGSLSLSPNDRIFPAAYLEIQ

SEQ ID NO: 3751 - DNA, 3870 bp, Homosapiens
cttatctttatggagggcaaataaggatttaaaaaatcttttaaaagggaggaatggaaagaccacaagtggaaaacagactttagagatatctctccaagtcacagaaggaaagcagccctccctccttactgaaagtctggagaattgagagtggaagtgaagggaagagaattgagtgtgtaagtagatgagaggttatgtgtcttggagccaggagactctggttccaagaaaagatgtctgcactccatccccctgattgtttattttttaattgtcagacaaaggactggtggacatatgaattctgttatggacgccacatccagcaataccacatggaagattcagagatcaaaggtgaagtcctctatctcggctactaccaatcagccttcgactgggatgatgaaacagccaaggtggcaagagtgtgggattcaggaagaaagggttctggccaccggctgagagccctgacaagaaggggagggtcaagattagctgatctgtttcttggggcttggtggccattaggacaaagtttcctggggcctgggggcacaggccattcttttgtctctttggggacgcagtgccatccttcctctttgctatctttctcatgtcccccattcctgcctcatgtcttctccaggcctccaagcagcatcgtcttaaacgctaccacagccagacctatggcaatgggtccaagtgcgaccttaatgggaggccccgggaggccgaggttcggttcctctgtgacgagggtgcaggtatctctggggactacatcgatcgcgtggacgagcccttgtcctgctcttatgtgctgaccattcgcactcctcggctctgcccccaccctctcctccggcccccacccagtgctgcaccgcaggccatcctctgtcacccttccctacagcctgaggagtacatggcctacgttcagaggcaagccggtgagtaattagagaaggaggagaagacggggagatacgggggcagggggtggcaaaagatcaagtattgaatagctggaggaatgtgttcctggcctgcttgcatgctgtttctcagtagactcaaagcagtatggagataaaatcatagaggagctgcaagatctaggcccccaagtgtggagtgagaccaagtctggggtggcaccccaaaagatggcaggtgcgagcccgaccaaggatgacagtaaggactcagatttctggaagatgcttaatgagccagaggaccaggccccaggaggggaggaggtgccggctgaggagcaggacccaagccctgaggcagcagattcagcttctggtgctcccaatgattttcagaacaacgtgcaggtcaaagtcattcgaagccctgcggatttgattcgattcatagaggagctgaaaggtggaacaaaaaaggggaagccaaatataggccaagagcagcctgtggatgatgctgcagaagtccctcagagggaaccagagaaggaaaggggtgatccagaacggcagagagagatggaagaagaggaggatgaggatgaggatgaggatgaagatgaggatgaacggcagttactgggagaatttgagaaggaactggaagggatcctgcttccgtcagaccgagaccggctccgttcggaggtgaaggctggcatggagcgggaactggaaaacatcatccaggagacagagaaagagctggacccagatgggctgaagaaggagtcagagcgggatcgggcaatgctggctctcacatccactctcaacaaactcatcaaaagactggaggaaaaacagagtccagagctggtgaagaagcacaagaaaaagagggttgtccccaaaaagcctcccccatcaccccaacctacaggtgagagcagtcagacaagaaagagtagcccagtctgttgttttcatccctcagctggttctgttcccagaggggaccctgttccttcccttctgagggtgctcattctctccccactttctggaacactgtcctcacttgcgcctgcttcccaacaccatcatccctttgcgtgtttacctcctattcatccctctgggaagcagcttttagagcatatctgctggttttctggtttgctcctgtacacccagtgcctagcactctgcctggcacacaatggatgatcagtagctagtaattgaatgcttgtgagtctatatgctgaaaaccactttaggactttgcaccaagagaggccccagctgtcagggcatgaataggagagcccagctgcacatgagccaatagcttggatagactttaaattatttcttcttcttgtatccccttgtgtccatttcatagtgtcctatgggtgtggacatcagatattctaaatggaatgttccagtttcaaaccttccattcccactctctctataaacattgaaatgtctttaaagtcccaacatatggaggaggagaccacacttttccaacctgcttcttcaaacagaactttgttggtgcaggtggcctgattttggctttagaaaacatttgttttcctataggtgacgggcagaattattgggtagggcgggaagatggaaggctgcaattggtggagggagctctacaggctgaactgggaggggcggggcacacatttttttgagccctggctcatatacatgttgagatggaagagctgccaaagccaactgatgttttagggggagatgacccccacacccctaaccctggagtcacgcctctgctttgtgtttccctgtgtgtctccccctctaagaggaggatcctgagcacagagtccgggtccgggtcaccaagctccgtctcggaggccctaatcaggatctgactgtcctcgagatgaaacgggaaaacccacagctgaaacaaatcgaggggctggtgaaggagctgctggagagggagggactcacagctgcagggaaaattgagatcaaaattgtccgcccatgggctgaagggactgaagagggtgcacgttggctgactgatgaggacacgagaaacctcaaggagatcttcttcaatatcttggtgccgggagctgaagaggcccagaaggaacgccagcggcagaaagagctggagagcaattaccgccgggtgtggggctctccaggtggggagggcacaggggacctggacgaatttgacttctgagaccaacactacacttgacccttcacggaatccagactcttcctggactggcttgcctcctccccacctccccaccctggaacccctgagggccaaacagcagagtggagctgagctgtggacctctcgggcaactctgtgggtgtgggggccctgggtgaatgctgctgcccctgctggcagccaccttgagacctcaccgggcctgtgatatttgctctcctgaactctcactcaatcctcttcctctcctctgtggcttttcctgttattgtcccctaatgataggatattccctgctgcctacctggagattcagtaggatcttttgagtggaggtgggtagagagagcaaggagggcaggacacttagcaggcactgagcaagcaggcccccacctgcccttagtgatgtttggagtcgttttaccctcttctattgaattgccttgggatttccttctccctttccctgcccaccctgtcccctacaatttgtgcttctgagttgaggagccttcacctctgttgctgaggaaatggtagaatgctgcctatcacctccagcacaatcccagtgaaaaaggtgtgaagcacccaccatgttcttgaacaatcaggtttctaaataaacaactggaccatcaa

SEQ ID NO: 3752 - protein, 333 aa, Homosapiens
MAGASPTKDDSKDSDFWKMLNEPEDQAPGGEEVPAEEQDPSPEAADSASGAPNDFQNNVQVKVIRSPADLIRFIEELKGGTKKGKPNIGQEQPVDDAAEVPQREPEKERGDPERQREMEEEEDEDEDEDEDEDERQLLGEFEKELEGILLPSDRDRLRSEVKAGMERELENIIQETEKELDPDGLKKESERDRAMLALTSTLNKLIKRLEEKQSPELVKKHKKKRVVPKKPPPSPQPTGESSQTRKSSPVCCFHPSAGSVPRGDPVPSLLRVLILSPLSGTLSSLAPASQHHHPFACLPPIHPSGKQLLEHICWFSGLLLYTQCLALCLAHNG

SEQ ID NO: 3753 - DNA, 700 bp, Homosapiens
attcaaagttttctgtttctacttgggacagtttaagttttcttttcaggagttcatttcatctaacttttaagatttattggcataaagttcattgtattcttctatctttttaatctctgtggcatctgtaattaggttcctcttttcattcctcatgggttatttttgcatcactaatttgttactggtcagtcacatcagaggttagtcagttttactagttttttcaaagaaacaatttttggctctgttgagcttctctgttgtatttgttttctattaatttctactctaatctttattttccttccttctacttttctgggtttattttactgtttgttcaacttcttgaaatgaatgcctagctcattcattttcagcttttcctcttttatatctcataaatttgtctccaaccatctatatatctctgacaagtttttaatggctattttaaattccttatctaattattaaatagataatactttcccatgatacaaaacccagaaagtattatttaaaaggtatgtaatgaaatatttcccaccatgcctggcccttttttgtttttatagctgcataaaattccattgtgtgttccatcattttgtcaccattattctactggttgaaatagttccacccccaattcttttgttgtcacaaatgattattacattgtacatatatg

SEQ ID NO: 3754 - protein, 52 aa, Homosapiens
MKYFPPCLALFCFYSCIKFHCVFHHFVTIILLVEIVPPPILLLSQMIITLYI

SEQ ID NO: 3755 - DNA, 420 bp, Homosapiens
gatgaacggcagttactgggagaatttgagaaggaactggaagggatcctgcttccgtcagaccgagaccggtgcctacctggagattcagtaggatcttttgagtggaggtgggtagagagagcaaggagggcaggacacttagcaggcactgagcaagcaggcccccacctgcccttagtgatgtttggagtcgttttaccctcttctattgaattgccttgggatttccttctccctttccctgcccaccctgtcccctacaatttgtgcttctgagttgaggagccttcacctctgttgctgaggaaatggtagaatgctgcctatcacctccagcacaatcccagtgaaaaaggtgtgaagcacccaccatgttcttgaacaatcaggtttctaaataaacaactggaccatcaa

SEQ ID NO: 3756 - protein, 30 aa, Homosapiens
MNGSYWENLRRNWKGSCFRQTETGAYLEIQ

SEQ ID NO: 3757 - DNA, 1077 bp, Homosapiens
acagagaaagagctggacccagatgggctgaagaaggagtcagagcgggatcgggcaatgctggctctcacatccactctcaacaaactcatcaaaagactggaggaaaaacagagtccagagctggtgaagaagcacaagaaaaagagggttgtccccaaaaagcctcccccatcaccccaacctacagggaaaattgagatcaaaattgtccgcccatgggctgaagggactgaagagggtgcacgttggctgactgatgaggacacgagaaacctcaaggagatcttcttcaatatcttggtgccgggagctgaagaggcccagaaggaacgccagcggcagaaagagctggagagcaattaccgccgggtgtggggctctccaggtggggagggcacaggggacctggacgaatttgacttctgagaccaacactacacttgacccttcacggaatccagactcttcctggactggcttgcctcctccccacctccccaccctggaacccctgagggccaaacagcagagtggagctgagctgtggacctctcgggcaactctgtgggtgtgggggccctgggtgaatgctgctgcccctgctggcagccaccttgagacctcaccgggcctgtgatatttgctctcctgaactctcactcaatcctcttcctctcctctgtggcttttcctgttattgtcccctaatgataggatattccctgctgcctacctggagattcagtaggatcttttgagtggaggtgggtagagagagcaaggagggcaggacacttagcaggcactgagcaagcaggcccccacctgcccttagtgatgtttggagtcgttttaccctcttctattgaattgccttgggatttccttctccctttccctgcccaccctgtcccctacaatttgtgcttctgagttgaggagccttcacctctgttgctgaggaaatggtagaatgctgcctatcacctccagcacaatcccagtgaaaaaggtgtgaagcacccaccatgttcttgaacaatcaggtttctaaataaacaactggaccatcaa

SEQ ID NO: 3758 - protein, 126 aa, Homosapiens; identical to SEQ ID NO: 3742

SEQ ID NO: 3759 - DNA, 1196 bp, Homosapiens
agaggaggatcctgagcacagagtccgggtccgggtcaccaagctccgtctcggaggccctaatcaggatctgactgtcctcgagatgaaacgggaaaacccacagctgaaacaaatcgaggggctggtgaaggagctgctggagagggagggactcacagctgcaggtgggccctggagggcggctggacccagtgctgtcggaagggcaagctgccggaagtggaggggctgggaccagtggggcagggggcctgccctgaggctcccaaccatcctctcctctcactgcatactgctcctttccagggaaaattgagatcaaaattgtccgcccatgggctgaagggactgaagagggtgcacgttggctgactgatgaggacacgagaaacctcaaggagatcttcttcaatatcttggtgccgggagctgaagaggcccagaaggaacgccagcggcagaaagagctggagagcaattaccgccgggtgtggggctctccaggtggggagggcacaggggacctggacgaatttgacttctgagaccaacactacacttgacccttcacggaatccagactcttcctggactggcttgcctcctccccacctccccaccctggaacccctgagggccaaacagcagagtggagctgagctgtggacctctcgggcaactctgtgggtgtgggggccctgggtgaatgctgctgcccctgctggcagccaccttgagacctcaccgggcctgtgatatttgctctcctgaactctcactcaatcctcttcctctcctctgtggcttttcctgttattgtcccctaatgataggatattccctgctgcctacctggagattcagtaggatcttttgagtggaggtgggtagagagagcaaggagggcaggacacttagcaggcactgagcaagcaggcccccacctgcccttagtgatgtttggagtcgttttaccctcttctattgaattgccttgggatttccttctccctttccctgcccaccctgtcccctacaatttgtgcttctgagttgaggagccttcacctctgttgctgaggaaatggtagaatgctgcctatcacctccagcacaatcccagtgaaaaaggtgtgaagcacccaccatgttcttgaacaatcaggtttctaaataaacaactggaccatcaa

SEQ ID NO: 3760 - protein, 126 aa, Homosapiens; identical to SEQ ID NO: 3742

SEQ ID NO: 3761 - DNA, 581 bp, Homosapiens
cactaggctcagcacatagccaatcctaccatttctcgagggcagctgaaagtgtttactcaggtagaggggctggacagggtagggttgggtcagcagccagtgcaggttgggcacagccatatgttgttatctaccttgaggagttagttggtagcaccagcatctttgggtagaattgcttctgacccttggtgcccaccagccccaagaggttcagctgcaagtgtgccactgaactgaggacacagcaccagacctgaatccagttcacatggaggctgcggctctacagggtcctaggctgtgaccacccagcacagcggcgtgacccaggaaaggtggattcaacagtgcaggtgcagtgacaagtacagaggcagctccactccttcctcgtggccaaagtttgctcccttcttcagaagtttgggagtgtgagagaatatgggaaggaaataaggaccctggagagaatgaaattgccttcaaagagcaagtgggaagttcctttcatttccagccagtgaaaaatggtcaaggtgtcagcaaacctcacaacaaatcccaacaccaagtaa

SEQ ID NO: 3762 - protein, 82 aa, Homosapiens
PRKGGFNSAGAVTSTEAAPLLPRGQSLLPSSEVWECERIWEGNKDPGENEIAFKEQVGSSFHFQPVKNGQGVSKPHNKSQHQ

SEQ ID NO: 3763 - DNA, 361 bp, Homosapiens
tcctgggagagttgggatatggtacttagaggagaggacaggcccatggagaggggtgggaagatgggacagctttgtttaagagcaggaactttggagacagatctgattttgaaacctgcccctccactgcacatgcaggtgcagtgacaagtacagaggcagctccactccttcctcgtggccaaagtttgctcccttcttcagaagtttgggagtgtgagagaatatgggaaggaaataaggaccctggagagaatgaaattgccttcaaagagcaagtgggaagttcctttcatttccagccagtgaaaaatggtcaaggtgtcagcaaacctcacaacaaatcccaacaccaagt

SEQ ID NO: 3764 - protein, 43 aa, Homosapiens
MVLRGEDRPMERGGKMGQLCLRAGTLETDLILKPAPPLHMQVQ

SEQ ID NO: 3765 - DNA, 5388 bp, Homosapiens
aaggggccttctgaggtttgggggctgtagggccatgggcctcagggccagaggtggttgttagcctggcaagacaggtctgggcaacatgcatgcccagaggcagttcgttgtagctgcagtgagagcagaagtcagacgacatgaggtggccaagcaggctctaaaccgcctcaggaagctggcagagagggtggacgaccccgaactccaggacagcatccaggcctcattggacagcattcgagaggctgtgatcaatagccaggaatggactttgagccgctccattcctgaactgcgcctgggtgtgctgggcgatgccaggagtgggaagtcatcgctcatccaccgattcctgactggctcataccaggtgctggagaagacagagagtgagcagtacaagaaagaaatgttggtggatggacagacacatctggtgctaatccgagaggaagctggggcacctgatgccaagttctcaggctgggcagatgctgtgatcttcgtcttcagcctggaggatgagaacagtttccaggctgtgagccgtctccatgggcagctgagttcccttcgcggggagggacgaggaggcctggccttggcactggtggggacacaagacaggatcagtgcttcctcccctcgggtggtgggagatgctcgtgccagagctctgtgcgcggacatgaaacgctgcagctactatgagacttgtgcaacctatgggctcaatgtggatcgggtcttccaggaggtggcccagaaggtggtgaccttgcgcaagcagcaacagcttctggctgcctgcaagtccctgcccagctccccaagccactcagctgcatccactccggtagctggccaggctagtaacgggggccacactagcgactactcttcttccctcccgtcctcaccgaatgttggtcaccgggagctccgagccgaggcagctgcagtggctggattgagcaccccagggtccctgcaccgggcagccaagcgcaggaccagcctttttgcgaatcgtcggggtagtgactccgagaaacgaagcttggatagtcggggagagacaacagggagtgggcgagccatccccatcaaacagagcttcctactaaaacgaagtggcaattccttgaacaaagaatggaagaagaaatatgtaaccctgtccagtaatggctttctactctaccaccccagtattaacgattacatccacagtacccacggcaaggagatggacttgctgcgaacaacagtcaaagtcccgggcaagcggcccccgagggccatctctgcctttggcccctcagccagcattaacgggctcgtcaaggacatgagcactgtccagatgggtgaaggcctggaagccactactcccatgccaagccctagccccagccccagttccctgcagccaccaccagatcagacatccaaacacctgctgaagccagaccggaatttggcccgagccctcagcacggactgtaccccatctggagacctgagccccctgagtcgggaaccccctccttctcccatggtgaagaagcagaggaggaaaaaattgacaacaccatccaagactgaaggctcggctgggcaggctgaagaggaaaactttgagttcctgatcgtgtccagcacgggtcagacgtggcactttgaggcagccagttttgaggagcgggatgcctgggtccaggccatcgagagtcagatcctagccagtctgcaatgctgtgagagcagcaaggtcaagctgcgcacagacagccaaagcgaggccgtggccatccaggcgatccggaacgccaaggggaattcaatctgcgtggactgcggggcccccaaccccacgtgggccagcttgaacctgggcgccctcatctgcatcgagtgttctggcatccaccgcaacctgggcacacacctgtcccgcgttcgctcgctggacttggacgactggccacgggagctgaccctggtgctgacggctattggcaacgacacggccaaccgcgtgtgggaaagcgacacgcgaggccgtgccaagccctcgcgggactcttcgcgggaggagcgcgagtcgtggattcgcgccaagtacgagcagctactgttcctggcgccgctgagcacctcggaggagccgctgggccgccagctgtgggccgccgtgcaggcccaggacgtggctaccgttctcctgcttttggcccatgcgcgacacgggccgctcgacaccagcgtagaggacccacagctgcgctccccactccacctggcggccgagctcgcccacgtcgtcatcacgcaactgctgctgtggtacggcgcggacgtggcggcccgtgacgcccagggccgcacggcgctgttctacgcccgccaggctggaagccagctgtgcgccgacatccttctccagcacggctgcccgggtgagggcggcagcgcggccaccacgcccagcgcggccaccacgcccagcatcaccgccacgcccagcccccgccgccggagcagcgccgctagcgtgggccgcgccgacgccccggttgcgctggtatagttgcccagcgggagagacacccccatccccacgcgggccgggcacgaccacaccgggcggaccgctggacagacgcacccactcacctctccgatccgcaccccgccccacgggagcacttcctacccccacgagggcacagcccccacgccttccagaagacacaaactcacctccctctccccaacgaggcatggagaccccagctcaacacgccccctctccattgtttccacactcggattgctctgggtctacccgctcggggttcgcggaaggggaggtccccagcggtacgggctcctaggcgcttggacatgcccgcttgtgccccctaggggcggaaagaagacccggtcctgcccgagctcaacaatcccagggcgggagcccatacccaggctggctcctggggcgacgccacgccagagggagggtttagtacatgggagggctagccccgggacttggggccaatacggaaaccctaccccttccatgctcatctcactgcccagtgaagggggcaagggcagcgaggggcaggacccctgctgctcatgggggtgggggttcccaaccctttccgtgaaagggaccgtgagtagtggaaaccaggacgtcccctacacctacccatgggtggaagctaaagagtccggggggaaccaagagcctgggtccctcccactactatcttgggagggagaagggatggagcaggagcgggctaagagggctgcgggggccttgtaatttattgctttgttccccaacatggggatgggggcgggcaggggcgtggggagggcgttttggggtaggggaagcccagggtgggcagggggtgggttggggtgggggtgctctcgggttgtgtctgtgaccgtgactgcgtacctgtgactgtgcagcgcccgtggtgatctggggtagggggcacccctacagtgggacccctcccccattattctttctgtccagcccctccctcccactggagcagctccagagccattcctcacccccgtgacctctcccagccagggctgagaggattcgaggtggctgggagggtttccaggccccctgccccttccccacaaactgggtgatagggcggacttacctggcccagccctgcctccctcagccaacccagcccttgggctgtctgtgtcagtggtttccggtctttttttttttttttttttctggctaaaatagtttgcaaaggaccaggtaattggggaggggagagaggtgggggcaagggggaaatgcccccccatctccttggaggcagtggtgtgaatcttcttcaacagcaattaaagaggaagtgattttgtctagggggtgagctgctggtctgttcttggaggcaggtcagggcatggccttggtcaagatggggtactggggttggacagggacaggcagaggtgcctcccactggggctggtggcaggacagtacccatgggcatggaggtggttccatcatgtacaacagttctgggttcatgtagtggaggacgtgggcaggttggagtcagtggggaccctgggaacagagaaggcactgactcttaagatgatgccagtcctgggagagttgggatatggtacttagaggagaggacaggcccatggagaggggtgggaagatgggacagctttgtttaagagcaggaactttggagacagatctgattttgaaacctgcccctccactgcacagctaggggaccttggtggcatctgtttatctgtattctgaacagtatctgttcagagggcacctgaaaggcgctccagctctgaggagggctgccccgagccagcctgctcaccgtgagcactaggtaccagagtagaacatagagtaggggttcctcccctggcctcgtcagggggtgttccagagggaaggggtgggagacctcctgggaaagatttcccagctagctgcagaggtccctggtgtccacaaactcagtgtcagctgatgcaggcatttatccacctccgtgccatcaaagggaccaccaaggccacagcggcctgaagccggtgctgcctccatgagctgcagtgccactaggctcagcacatagccaatcctaccatttctcgagggcagctgaaagtgtttactcaggtagaggggctggacagggtagggttgggtcagcagccagtgcaggttgggcacagccatatgttgttatctaccttgaggagttagttggtagcaccagcatctttgggtagaattgcttctgacccttggtgcccaccagccccaagaggttcagctgcaagtgtgccactgaactgaggacacagcaccagacctgaatccagttcacatggaggctgcggctctacagggtcctaggctgtgaccacccagcacagcggcgtgacccaggaaaggtggattcaacagtgcaggtgcagtgacaagtacagaggcaggtgtgtggtctgggcaaagcgacaagaggggggaggtagcaaagaagattggactagaggacctggccgttcccccttcacctccaagaccctggactctcttatttcagctccactccttcctcgtggccaaagtttgctcccttcttcagaagtttgggagtgtgagagaatatgggaaggaaataaggaccctggagagaatgaaattgccttcaaagagcaagtgggaagttcctttcatttccagccagtgaaaaatggtcaaggtgtcagcaaacctcacaacaaatcccaacaccaagt

SEQ ID NO: 3766 - protein, 836 aa, Homosapiens; identical to SEQ ID NO: 524

SEQ ID NO: 3767 - DNA, 589 bp, Homosapiens
ctgttcctggcgccgctgagcacctcggaggagccgctgggccgccagggccaccacgcccagcatcaccgccacgcccagcccccgccgccggagcagcgccgctagcgtgggccgcgccgacgccccggttgcgctggtatagttgcccagcgggagagacacccccatccccacgcgggccgggcacgaccacaccgggcggaccgctggacagacgcacccactcacctctccgatccgcaccccgccccacgggagcacttcctacccccacgagggcacagcccccacgccttccagaagacacaaactcacctccctctccccaacgaggcatggagaccccagctcaacacgccccctctccattgtttccacactcggattgctctgggtctacccgctcggggttcgcggaaggggaggtccccagcggtacgggctcctaggcgcttggacatgcccgcttgtgccccctaggggcggaaagaagacccggtcctgcccgagctcaacaatcccagggcgggagcccatacccaggctggctcctggggcgacgccacgccagagggagggtttagta

SEQ ID NO: 3768 - protein, 37 aa, Homosapiens
METPAQHAPSPLFPHSDCSGSTRSGFAEGEVPSGTGS

SEQ ID NO: 3769 - DNA, 1662 bp, Homosapiens
tactaaaccctccctctggcgtggcgtcgccccaggagccagcctgggtatgggctcccgccctgggattgttgagctcgggcaggaccgggtcttctttccgcccctagggggcacaagcgggcatgtccaagcgcctaggagcccgtaccgctggggacctccccttccgcgaaccccgagcgggtagacccagagcaatccgagtgtggaaacaatggagagggggcgtgttgagctggggtctccatgcctcgttggggagagggagctcacgtacccacagcagcagttgcgtgatgacgacgtgggcgagctcggccgccaggtggagtggggagcgcagctgtgggtcctctacgctggtgtcgagcggcccgtgtcgcgcatgggccaaaagcaggagaacggtagccacgtcctgggcctgcacggcggcccacagctggcggcccagcggctcctccgaggtgctcagcggcgccaggaacagtagctgctcgtacttggcgcgaatccacgactcgcgctcctccctgcaagaccagggatcaacggaaaaggctctagggacccccagccaggacttctgcccctacccacgggaccgtctcaggttcgcacaccctcagcaaccctccccccgctctgttccctcacgcttaccgcgaagagtcccgcgagggcttggcacggcctcgcgtgtcgctttcccacacgcggttggccgtgtcgttgccaatagccgtcagcaccagggtcagctcccgtggccagtcgtccaagtccagcgagcgaacgcgggacaggtgtgtgcccaggttgcggtggatgccagaacactcgatgcagatgagggcgcccaggttcaagctggcccacgtggggtctgcggaaggagcgtagaggtcggctcccagccgggcagcacaggcaccccggcattcactacactccctagcccctccgctgcctcctggcactcactgggggccccgcagtccacgcagattgaattccccttggcgttccggatcgcctggatggccacggcctcgctttggctgtctgtgcgcagctgcagagagggtttgggttggcactgactctgcctccaagccccacctccttctcagacacctctgctctcctctcacacgacttcggccgtgtcgttgccaatggccgtcagcaccagggtcagttcctgcggccagtcctccactccacctcaaactcttaccttgaccttgctgctctcacagcattgcagactggctaggatctgactctcgatggcctggacccaggcatcccgctcctcaaaactggctgcctcaaagtgccacgtctgacccgtgctggacacgatcaggaactcaaagttttcctctgagtgggggatgggatggggtcattaagggacagagttcaagcaggggctgcctttcccaagaccgtcctccctgatgtccatcccgagcccctgggagtggggcagtgggggtagggaaagcagagggtggggggcagcaggaagcccgagcacatgcaggggaaggcgggggcacccccacccttctgcaccccagctgagcgcccctcccggctccccacttgttacctgctttataaatatttcttaaactaccaaaggatttt

SEQ ID NO: 3770 - protein, 326 aa, Homosapiens [sequence omitted]

SEQ ID NO: 3771 - DNA, 2832 bp, Homosapiens
gggccttctgaggtttgggggctgtagggccatgggcctcagggccagaggtggttgttagcctggcaagacaggtctgggcaacatgcatgcccagaggcagttcgttgtagctgcagtgagagcagaagtcagacgacatgaggtggccaagcaggctctaaaccgcctcaggaagctggcagagagggtggacgaccccgaactccaggacagcatccaggcctcattggacagcattcgagaggctgtgatcaatagccaggaatggactttgagccgctccattcctgaactgcgcctgggtgtgctgggcgatgccaggagtgggaagtcatcgctcatccaccgattcctgactggctcataccaggtgctggagaagacagagagtgagcagtacaagaaagaaatgttggtggatggacagacacatctggtgctaatccgagaggaagctggggcacctgatgccaagttctcaggctgggcagatgctgtgatcttcgtcttcagcctggaggatgagaacagtttccaggctgtgagccgtctccatgggcagctgagttcccttcgcggggagggacgaggaggcctggccttggcactggtggggacacaagacaggatcagtgcttcctcccctcgggtggtgggagatgctcgtgccagagctctgtgcgcggacatgaaacgctgcagctactatgagacttgtgcaacctatgggctcaatgtggatcgggtcttccaggaggtggcccagaaggtggtgaccttgcgcaagcagcaacagcttctggctgcctgcaagtccctgcccagctccccaagccactcagctgcatccactccggtagctggccaggctagtaacgggggccacactagcgactactcttcttccctcccgtcctcaccgaatgttggtcaccgggagctccgagccgaggcagctgcagtggctggattgagcaccccagggtccctgcaccgggcagccaagcgcaggaccagcctttttgcgaatcgtcggggtagtgactccgagaaacgaagcttggatagtcggggagagacaacagggagtgggcgagccatccccatcaaacagagcttcctactaaaacgaagtggcaattccttgaacaaagaatggaagaagaaatatgtaaccctgtccagtaatggctttctactctaccaccccagtattaacgattacatccacagtacccacggcaaggagatggacttgctgcgaacaacagtcaaagtcccgggcaagcggcccccgagggccatctctgcctttggcccctcagccagcattaacgggctcgtcaaggacatgagcactgtccagatgggtgaaggcctggaagccactactcccatgccaagccctagccccagccccagttccctgcagccaccaccagatcagacatccaaacacctgctgaagccagaccggaatttggcccgagccctcagcacggactgtaccccatctggagacctgagccccctgagtcgggaaccccctccttctcccatggtgaagaagcagaggaggaaaaaattgacaacaccatccaagactgaaggctcggctgggcaggctgaagaggaaaactttgagttcctgatcgtgtccagcacgggtcagacgtggcactttgaggcagccagttttgaggagcgggatgcctgggtccaggccatcgagagtcagatcctagccagtctgcaatgctgtgagagcagcaaggtcaagctgcgcacagacagccaaagcgaggccgtggccatccaggcgatccggaacgccaaggggaattcaatctgcgtggactgcggggcccccaaccccacgtgggccagcttgaacctgggcgccctcatctgcatcgagtgttctggcatccaccgcaacctgggcacacacctgtcccgcgttcgctcgctggacttggacgactggccacgggagctgaccctggtgctgacggctattggcaacgacacggccaaccgcgtgtgggaaagcgacacgcgaggccgtgccaagccctcgcgggactcttcgcgggaggagcgcgagtcgtggattcgcgccaagtacgagcagctactgttcctggcgccgctgagcacctcggaggagccgctgggccgccagctgtgggccgccgtgcaggcccaggacgtggctaccgttctcctgcttttggcccatgcgcgacacgggccgctcgacaccagcgtagaggacccacagctgcgctccccactccacctggcggccgagctcgcccacgtcgtcatcacgcaactgctgctgtggtacggcgcggacgtggcggcccgtgacgcccagggccgcacggcgctgttctacgcccgccaggctggaagccagctgtgcgccgacatccttctccagcacggctgcccgggtgagggcggcagcgcggccaccacgcccagcgcggccaccacgcccagcatcaccgccacgcccagcccccgccgccggagcagcgccgctagcgtgggccgcgccgacgccccggttgcgctggtatagttgcccagcgggagagacacccccatccccacgcgggccgggcacgaccacaccgggcggaccgctggacagacgcacccactcacctctccgatccgcaccccgccccacgggagcacttcctacccccacgagggcacagcccccacgccttccagaagacacaaactcacctccctctccccaacgaggcatggagaccccagctcaacacgccccctctccattgtttccac

SEQ ID NO: 3772 - protein, 836 aa, Homosapiens; identical to SEQ ID NO: 524

SEQ ID NO: 3773 - DNA, 3952 bp, Homosapiens
ggcggcgacagcggagccgggccgggggctcagcggggtccgggggctgggggcagcgagcagggcggccccatggccgggcccccctgaggcagtccgggggagtcccctcccctccccagctcgggggtctccgggccccatgagccggggcgcgggcgcgcttcagcgccggacaacgacctacctcatctcgctgaccctggttaagctcgagtcggtgcctccgccgccgccttctccgtctgcggccgcggccggcgccgccggtgccagaggctccgagactggggatcctggcagcccccgaggcgcggaggagccgggcaagaagcggcacgaacgtctcttccaccggcaggatgcgctgtggatcagcacgagcagcgcgggcaccgggggcgcggagcccccagccctgtccccggctccggccagtccggcccgcccagtctcccccgctcccggccgccgcctctccctctgggccgtccctccgggacccccgctctccgggggactgagccccgaccccaagcctgggggcgcccccacctcctcccggcgccccctgctcagcagcccgagctggggcggcccggagcccgaaggccgggcgggcggcggcatccctggctcatcctctccgcaccctggcaccggcagccggaggctcaaggtggcgcctcctccgccggctcccaagccttgcaagaccgtgaccacgagtggagccaaagccggcgggggcaagggcgcgggtagccgcctgtcatggcccgaaagcgagggcaagcccagggtcaaggggtcaaagagcagcgccgggactggagcttcggtctctgccgccgccaccgccgccgccgccgggggagggggctctacagcttcgacctctggtggggtcggggctggggctggagcccgagggaagttgtcccctcggaaaggcaagagtaagaccttggacaacagtgacttgcatccgggaccgcctgccggctctcctcctccgctaaccctcccaccaactccgagtccagccactgctgtcaccgctgcttccgcgcagccccccgggcctgcacctccaatcactctggagcctccagctccggggctgaaacggggccgggaggggggccgagcatccactcgtgaccgcaagatgctcaagtttatcagcggcatcttcaccaagagcacaggagggcctcctggctccgggccccttcccggaccccccagcctgtcttctggcagcgggtccagggagctgctgggcgccgagctccgcgcttcccctaaggctgtgatcaatagccaggaatggactttgagccgctccattcctgaactgcgcctgggtgtgctgggcgatgccaggagtgggaagtcatcgctcatccaccgattcctgactggctcataccaggtgctggagaagacagagagtgagcagtacaagaaagaaatgttggtggatggacagacacatctggtgctaatccgagaggaagctggggcacctgatgccaagttctcaggctgggcagatgctgtgatcttcgtcttcagcctggaggatgagaacagtttccaggctgtgagccgtctccatgggcagctgagttcccttcgcggggagggacgaggaggcctggccttggcactggtggggacacaagacaggatcagtgcttcctcccctcgggtggtgggagatgctcgtgccagagctctgtgcgcggacatgaaacgctgcagctactatgagacttgtgcaacctatgggctcaatgtggatcgggtcttccaggaggtggcccagaaggtggtgaccttgcgcaagcagcaacagcttctggctgcctgcaagtccctgcccagctccccaagccactcagctgcatccactccggtagctggccaggctagtaacgggggccacactagcgactactcttcttccctcccgtcctcaccgaatgttggtcaccgggagctccgagccgaggcagctgcagtggctggattgagcaccccagggtccctgcaccgggcagccaagcgcaggaccagcctttttgcgaatcgtcggggtagtgactccgagaaacgaagcttggatagtcggggagagacaacagggagtgggcgagccatccccatcaaacagagcttcctactaaaacgaagtggcaattccttgaacaaagaatggaagaagaaatatgtaaccctgtccagtaatggctttctactctaccaccccagtattaacgattacatccacagtacccacggcaaggagatggacttgctgcgaacaacagtcaaagtcccgggcaagcggcccccgagggccatctctgcctttggcccctcagccagcattaacgggctcgtcaaggacatgagcactgtccagatgggtgaaggcctggaagccactactcccatgccaagccctagccccagccccagttccctgcagccaccaccagatcagacatccaaacacctgctgaagccagaccggaatttggcccgagccctcagcacggactgtaccccatctggagacctgagccccctgagtcgggaaccccctccttctcccatggtgaagaagcagaggaggaaaaaattgacaacaccatccaagactgaaggctcggctgggcaggctgaagccaagcgcaaaatgtggaaactaaaatcctttggtagtttaagaaatatttataaagcagaggaaaactttgagttcctgatcgtgtccagcacgggtcagacgtggcactttgaggcagccagttttgaggagcgggatgcctgggtccaggccatcgagagtcagatcctagccagtctgcaatgctgtgagagcagcaaggtcaagctgcgcacagacagccaaagcgaggccgtggccatccaggcgatccggaacgccaaggggaattcaatctgcgtggactgcggggcccccaaccccacgtgggccagcttgaacctgggcgccctcatctgcatcgagtgttctggcatccaccgcaacctgggcacacacctgtcccgcgttcgctcgctggacttggacgactggccacgggagctgaccctggtgctgacggctattggcaacgacacggccaaccgcgtgtgggaaagcgacacgcgaggccgtgccaagccctcgcgggactcttcgcgggaggagcgcgagtcgtggattcgcgccaagtacgagcagctactgttcctggcgccgctgagcacctcggaggagccgctgggccgccagctgtgggccgccgtgcaggcccaggacgtggctaccgttctcctgcttttggcccatgcgcgacacgggccgctcgacaccagcgtagaggacccacagctgcgctccccactccacctggcggccgagctcgcccacgtcgtcatcacgcaactgctgctgtggtacggcgcggacgtggcggcccgtgacgcccagggccgcacggcgctgttctacgcccgccaggctggaagccagctgtgcgccgacatccttctccagcacggctgcccgggtgagggcggcagcgcggccaccacgcccagcgcggccaccacgcccagcatcaccgccacgcccagcccccgccgccggagcagcgccgctagcgtgggccgcgccgacgccccggttgcgctggtatagttgcccagcgggagagacacccccatccccacgcgggccgggcacgaccacaccgggcggaccgctggacagacgcacccactcacctctccgatccgcaccccgccccacgggagcacttcctacccccacgagggcacagcccccacgccttccagaagacacaaactcacctccctctccccaacgaggcatggagaccccagctcaacacgccccctctccattgtt

SEQ ID NO: 3774 - protein, 1192 aa, Homosapiens
MSRGAGALQRRTTTYLISLTLVKLESVPPPPPSPSAAAAGAAGARGSETGDPGSPRGAEEPGKKRHERLFHRQDALWISTSSAGTGGAEPPALSPAPASPARPVSPAPGRRLSLWAVPPGPPLSGGLSPDPKPGGAPTSSRRPLLSSPSWGGPEPEGRAGGGIPGSSSPHPGTGSRRLKVAPPPPAPKPCKTVTTSGAKAGGGKGAGSRLSWPESEGKPRVKGSKSSAGTGASVSAAATAAAAGGGGSTASTSGGVGAGAGARGKLSPRKGKSKTLDNSDLHPGPPAGSPPPLTLPPTPSPATAVTAASAQPPGPAPPITLEPPAPGLKRGREGGRASTRDRKMLKFISGIFTKSTGGPPGSGPLPGPPSLSSGSGSRELLGAELRASPKAVINSQEWTLSRSIPELRLGVLGDARSGKSSLIHRFLTGSYQVLEKTESEQYKKEMLVDGQTHLVLIREEAGAPDAKFSGWADAVIFVFSLEDENSFQAVSRLHGQLSSLRGEGRGGLALALVGTQDRISASSPRVVGDARARALCADMKRCSYYETCATYGLNVDRVFQEVAQKVVTLRKQQQLLAACKSLPSSPSHSAASTPVAGQASNGGHTSDYSSSLPSSPNVGHRELRAEAAAVAGLSTPGSLHRAAKRRTSLFANRRGSDSEKRSLDSRGETTGSGRAIPIKQSFLLKRSGNSLNKEWKKKYVTLSSNGFLLYHPSINDYIHSTHGKEMDLLRTTVKVPGKRPPRAISAFGPSASINGLVKDMSTVQMGEGLEATTPMPSPSPSPSSLQPPPDQTSKHLLKPDRNLARALSTDCTPSGDLSPLSREPPPSPMVKKQRRKKLTTPSKTEGSAGQAEAKRKMWKLKSFGSLRNIYKAEENFEFLIVSSTGQTWHFEAASFEERDAWVQAIESQILASLQCCESSKVKLRTDSQSEAVAIQAIRNAKGNSICVDCGAPNPTWASLNLGALICIECSGIHRNLGTHLSRVRSLDLDDWPRELTLVLTAIGNDTANRVWESDTRGRAKPSRDSSREERESWIRAKYEQLLFLAPLSTSEEPLGRQLWAAVQAQDVATVLLLLAHARHGPLDTSVEDPQLRSPLHLAAELAHVVITQLLLWYGADVAARDAQGRTALFYARQAGSQLCADILLQHGCPGEGGSAATTPSAATTPSITATPSPRRRSSAASVGRADAPVALV

SEQ ID NO: 3775 - DNA, 1012 bp, Homosapiens
aatccagaggcaggggagggacggtgcaggcgcagagtattgggtttggctggcctcgatttaaagagacagaagctgtcggggtcctggaagacggtccccaataccctccccccaagtccttgggaccacttgggtccccagagctggggagatggtttgtggcggctttgcctgctccaagaatgcgctttgcgctctcaacgtggtctacatgctggtgagcttgttgctcattggagtggctgcttggggcaagggcctgggtctggtgtccagcatccacatcatcggcggagtcattgctgtgggagtcttccttctccttattgcagtggctggactggtgggtgctgtcaaccaccaccaagtcctgctgttcttttacatgatcatccttggtttggtcttcatcttccaatttgtaatctcttgctcatgtctggctattaaccgaagcaaacagacagatgtcatcaatgcttcttggtgggtcatgagcaacaagactcgggatgaactggaaagaagttttgattgttgtggcttattcaacctcacaaccctgtatcaacaagattatgatttctgcactgcaatctgcaagagccagagccccacatgccagatgtgtggagaaaagtttcttaagcattcagacgaagccctgaaaatcctagggggtgttggactcttctttagctttacagagatccttggtgtttggctagcaatgagatttcggaatcagaaggatcctagagccaaccccagtgcctttctatgagactttggatccttctgacttttcttctgctctctctaagctttctcttcctcccttagggaatatctagggtctgtaaccgttttggtttgagaaaaaggaaaggccccttgtcacatcctctaaaattgatggaatagcaagactttatgccttgacatattttagtgggagccagactataaggaataaaaggaaaaactttcttcctctctctccaagagg

SEQ ID NO: 3776 - protein, 210 aa, Homosapiens; identical to SEQ ID NO: 526

SEQ ID NO: 3777 - DNA, 763 bp, Homosapiens
aatccagaggcaggggagggacggtgcaggcgcagagtattgggtttggctggcctcgatttaaagagacagaagctgtcggggtcctggaagacggtccccaataccctccccccaagtccttgggaccacttgggtccccagagctggggagatggtttgtggcggctttgcctgctccaagaatgcgctttgcgctctcaacgtggtctacatgacagatgtcatcaatgcttcttggtgggtcatgagcaacaagactcgggatgaactggaaagaagttttgattgttgtggcttattcaacctcacaaccctgtatcaacaagattatgatttctgcactgcaatctgcaagagccagagccccacatgccagatgtgtggagaaaagtttcttaagcattcagacgaagccctgaaaatcctagggggtgttggactcttctttagctttacagagatccttggtgtttggctagcaatgagatttcggaatcagaaggatcctagagccaaccccagtgcctttctatgagactttggatccttctgacttttcttctgctctctctaagctttctcttcctcccttagggaatatctagggtctgtaaccgttttggtttgagaaaaaggaaaggccccttgtcacatcctctaaaattgatggaatagcaagactttatgccttgacatattttagtgggagccagactataaggaataaaaggaaaaactttcttcctctctctccaagagg

SEQ ID NO: 3778 - protein, 127 aa, Homosapiens
MVCGGFACSKNALCALNVVYMTDVINASWWVMSNKTRDELERSFDCCGLFNLTTLYQQDYDFCTAICKSQSPTCQMCGEKFLKHSDEALKILGGVGLFFSFTEILGVWLAMRFRNQKDPRANPSAFL

SEQ ID NO: 3779 - DNA, 1739 bp, Homosapiens
aatccagaggcaggggagggacggtgcaggcgcagagtattgggtttggctggcctcgatttaaagagacagaagctgtcggggtcctggaagacggtccccaataccctccccccaagtccttgggaccacttgggtccccagagctggggagatggtttgtggcggctttgcctgctccaagaatgcgctttgcgctctcaacgtggtctacatgctggtgagcttgttgctcattggagtggctgcttggggcaagggcctgggtctggtgtccagcatccacatcatcggcggagtcattgctgtgggagtcttccttctccttattgcagtggctggactggtgggtgctgtcaaccaccaccaagtcctgctgttcttttacatgatcatccttggtttggtcttcatcttccaatttgtaatctcttgctcatgtctggctattaaccgaagcaaacagacagatgtcatcaatgcttcttggtgggtcatgagcaacaagactcgggatgaactggaaagaagttttgattgttgtggcttattcaacctcacaaccctgtatcaacaagattatgatttctgcactgcaatctgcaagagccagagccccacatgccagatgtgtggagaaaagtttcttaagcattcagacgaagccctgaaaatcctagggggtgttggactcttctttagctttacagagatccttggtgtttggctagcaatgagatttcggaatcagaaggatcctagagccaaccccagtgcctttctatgagactttggatccttctgacttttcttctgctctctctaagctttctcttcctcccttagggaatatctagggtctgtaaccgttttggtttgagaaaaaggaaaggccccttgtcacatcctctaaaattgatggaatagcaagactttatgccttgacatattttagtgggagccagactataaggaataaaaggaaaaactttcttcctctctctccaagaggatatgggaagcttctgtgagtgcataggatgggggctggagtcattcttagctgtttcccttcctctgtccatatactggatcacctcaacataccctggtgtggctctaagggtaaatcagggatagggccaaggagaaaacaaccaagaactctttcctgtaataagcaggatccagtttgagaaagtttagcgaatataaaagtaaaagccatttaaaaatctatattctttttttttttttgacacagagtcttgctctgttgcccaggctggagtgcaatggcatgatctcggctcaccgcaacctctgcctcccgggttcaagcgatcctcctgcctcagtctcccaagtagctgggattacaggtgtgcaccaccacgcctgactaattttgtatttttagtagagacagggtttcaccatgttagtcaggctggtctcgaactcctgacctcaggtgatccacccgcgttggcctcccaacgtgctgggattataggcgtgagccaccacgccccgcctaaaatccatattcaaagaagcaatttcagttcctttctaagctttgtcagtcaaggggctccactgacttcctaggccctgtaatttaaccagtctttaaggttttgcaggaaagtcccttcttccaagtggtttttccaaatcgcacaatggcaaagccaaacagaggaagaaacattaaaaaaaaaaaaaagaccatt

SEQ ID NO: 3780 - protein, 210 aa, Homosapiens; identical to SEQ ID NO: 526

SEQ ID NO: 3781 - DNA, 1490 bp, Homosapiens
aatccagaggcaggggagggacggtgcaggcgcagagtattgggtttggctggcctcgatttaaagagacagaagctgtcggggtcctggaagacggtccccaataccctccccccaagtccttgggaccacttgggtccccagagctggggagatggtttgtggcggctttgcctgctccaagaatgcgctttgcgctctcaacgtggtctacatgacagatgtcatcaatgcttcttggtgggtcatgagcaacaagactcgggatgaactggaaagaagttttgattgttgtggcttattcaacctcacaaccctgtatcaacaagattatgatttctgcactgcaatctgcaagagccagagccccacatgccagatgtgtggagaaaagtttcttaagcattcagacgaagccctgaaaatcctagggggtgttggactcttctttagctttacagagatccttggtgtttggctagcaatgagatttcggaatcagaaggatcctagagccaaccccagtgcctttctatgagactttggatccttctgacttttcttctgctctctctaagctttctcttcctcccttagggaatatctagggtctgtaaccgttttggtttgagaaaaaggaaaggccccttgtcacatcctctaaaattgatggaatagcaagactttatgccttgacatattttagtgggagccagactataaggaataaaaggaaaaactttcttcctctctctccaagaggatatgggaagcttctgtgagtgcataggatgggggctggagtcattcttagctgtttcccttcctctgtccatatactggatcacctcaacataccctggtgtggctctaagggtaaatcagggatagggccaaggagaaaacaaccaagaactctttcctgtaataagcaggatccagtttgagaaagtttagcgaatataaaagtaaaagccatttaaaaatctatattctttttttttttttgacacagagtcttgctctgttgcccaggctggagtgcaatggcatgatctcggctcaccgcaacctctgcctcccgggttcaagcgatcctcctgcctcagtctcccaagtagctgggattacaggtgtgcaccaccacgcctgactaattttgtatttttagtagagacagggtttcaccatgttagtcaggctggtctcgaactcctgacctcaggtgatccacccgcgttggcctcccaacgtgctgggattataggcgtgagccaccacgccccgcctaaaatccatattcaaagaagcaatttcagttcctttctaagctttgtcagtcaaggggctccactgacttcctaggccctgtaatttaaccagtctttaaggttttgcaggaaagtcccttcttccaagtggtttttccaaatcgcacaatggcaaagccaaacagaggaagaaacattaaaaaaaaaaaaaagaccatt

SEQ ID NO: 3782 - protein, 127 aa, Homosapiens; identical to SEQ ID NO: 3778

SEQ ID NO: 3783 - DNA, 2358 bp, Homosapiens
aatccagaggcaggggagggacggtgcaggcgcagagtattgggtttggctggcctcgatttaaagagacagaagctgtcggggtcctggaagacggtccccaataccctccccccaagtccttgggaccacttgggtccccagagctggggagatggtttgtggcggctttgcctgctccaagaatgcgctttgcgctctcaacgtggtctacatgctggtgagcttgttgctcattggagtggctgcttggggcaagggcctgggtctggtgtccagcatccacatcatcggcggagtcattgctgtgggagtcttccttctccttattgcagtggctggactggtgggtgctgtcaaccaccaccaagtcctgctgttcttttacatgatcatccttggtttggtcttcatcttccaatttgtaatctcttgctcatgtctggctattaaccgaagcaaacagacagatgtcatcaatgcttcttggtgggtcatgagcaacaagactcgggatgaactggaaagaagttttgattgttgtggcttattcaacctcacaaccctgtatcaacaagattatgatttctgcactgcaatctgcaagagccagagccccacatgccagatgtgtggagaaaagtttcttaagcattcagacgaagccctgaaaatcctagggggtgttggactcttctttagctttacagagatccttggtgtttggctagcaatgagatttcggaatcagaaggatcctagagccaaccccagtgcctttctatgagactttggatccttctgacttttcttctgctctctctaagctttctcttcctcccttagggaatatctagggtctgtaaccgttttggtttgagaaaaaggaaaggccccttgtcacatcctctaaaattgatggaatagcaagactttatgccttgacatattttagtgggagccagactataaggaataaaaggaaaaactttcttcctctctctccaagaggatatgggaagcttctgtgagtgcataggatgggggctggagtcattcttagctgtttcccttcctctgtccatatactggatcacctcaacataccctggtgtggctctaagggtaaatcagggatagggccaaggagaaaacaaccaagaactctttcctgtaataagcaggatccagtttgagaaagtttagcgaatataaaagtaaaagccatttaaaaatctatattctttttttttttttgacacagagtcttgctctgttgcccaggctggagtgcaatggcatgatctcggctcaccgcaacctctgcctcccgggttcaagcgatcctcctgcctcagtctcccaagtagctgggattacaggtgtgcaccaccacgcctgactaattttgtatttttagtagagacagggtttcaccatgttagtcaggctggtctcgaactcctgacctcaggtgatccacccgcgttggcctcccaacgtgctgggattataggcgtgagccaccacgccccgcctaaaatccatattcaaagaagcaatttcagttcctttctaagctttgtcagtcaaggggctccactgacttcctaggccctgtaatttaaccagtctttaaggttttgcaggaaagtcccttcttccaagtggtttttccaaatcgcacaatggcaaagccaaacagaggaagaaacattaaaaaaaaaaaaaagaccattatttctttgttttgtttttcctgtataaaaaaggaccccaaatataaaggtagggaaagggacaagagggaacataccccttagtgtagagaaatgggaaggagaaggagaagcctcaaaaggagaggtgggaggggaatgtcattaaggcagcaaagtaatctctgtagaaagatggaggaggaccctccatagcctcagagataaaggcaaagattgccctctcagtgtccagaagggaaatggcagcttttcttccttccatggcagccactccattgctcactccggattaccttcatccttatgtagataagagtgctgcagagctcgaaaggcagagattcgcttgtgtgggttaaaagtcagcatttcctgaggggagaggcaaaggtcagaaaaccatgaagaaaacagacttctgcccacccacaacaatacctgggatgagctttcttcttttttctttttttttttttttgagacggagtctcgctctatcacccaggctggagtgcaatggtatgatctcagctcactgcaacctccgcctcctgagttgaagtgattctcctatctcagcctcccaagtagctgagattacaggcgtgtgccacca

SEQ ID NO: 3784 - protein, 210 aa, Homosapiens; identical to SEQ ID NO: 526

SEQ ID NO: 3785 - DNA, 2109 bp, Homosapiens
aatccagaggcaggggagggacggtgcaggcgcagagtattgggtttggctggcctcgatttaaagagacagaagctgtcggggtcctggaagacggtccccaataccctccccccaagtccttgggaccacttgggtccccagagctggggagatggtttgtggcggctttgcctgctccaagaatgcgctttgcgctctcaacgtggtctacatgacagatgtcatcaatgcttcttggtgggtcatgagcaacaagactcgggatgaactggaaagaagttttgattgttgtggcttattcaacctcacaaccctgtatcaacaagattatgatttctgcactgcaatctgcaagagccagagccccacatgccagatgtgtggagaaaagtttcttaagcattcagacgaagccctgaaaatcctagggggtgttggactcttctttagctttacagagatccttggtgtttggctagcaatgagatttcggaatcagaaggatcctagagccaaccccagtgcctttctatgagactttggatccttctgacttttcttctgctctctctaagctttctcttcctcccttagggaatatctagggtctgtaaccgttttggtttgagaaaaaggaaaggccccttgtcacatcctctaaaattgatggaatagcaagactttatgccttgacatattttagtgggagccagactataaggaataaaaggaaaaactttcttcctctctctccaagaggatatgggaagcttctgtgagtgcataggatgggggctggagtcattcttagctgtttcccttcctctgtccatatactggatcacctcaacataccctggtgtggctctaagggtaaatcagggatagggccaaggagaaaacaaccaagaactctttcctgtaataagcaggatccagtttgagaaagtttagcgaatataaaagtaaaagccatttaaaaatctatattctttttttttttttgacacagagtcttgctctgttgcccaggctggagtgcaatggcatgatctcggctcaccgcaacctctgcctcccgggttcaagcgatcctcctgcctcagtctcccaagtagctgggattacaggtgtgcaccaccacgcctgactaattttgtatttttagtagagacagggtttcaccatgttagtcaggctggtctcgaactcctgacctcaggtgatccacccgcgttggcctcccaacgtgctgggattataggcgtgagccaccacgccccgcctaaaatccatattcaaagaagcaatttcagttcctttctaagctttgtcagtcaaggggctccactgacttcctaggccctgtaatttaaccagtctttaaggttttgcaggaaagtcccttcttccaagtggtttttccaaatcgcacaatggcaaagccaaacagaggaagaaacattaaaaaaaaaaaaaagaccattatttctttgttttgtttttcctgtataaaaaaggaccccaaatataaaggtagggaaagggacaagagggaacataccccttagtgtagagaaatgggaaggagaaggagaagcctcaaaaggagaggtgggaggggaatgtcattaaggcagcaaagtaatctctgtagaaagatggaggaggaccctccatagcctcagagataaaggcaaagattgccctctcagtgtccagaagggaaatggcagcttttcttccttccatggcagccactccattgctcactccggattaccttcatccttatgtagataagagtgctgcagagctcgaaaggcagagattcgcttgtgtgggttaaaagtcagcatttcctgaggggagaggcaaaggtcagaaaaccatgaagaaaacagacttctgcccacccacaacaatacctgggatgagctttcttcttttttctttttttttttttttgagacggagtctcgctctatcacccaggctggagtgcaatggtatgatctcagctcactgcaacctccgcctcctgagttgaagtgattctcctatctcagcctcccaagtagctgagattacaggcgtgtgccacca

SEQ ID NO: 3786 - protein, 127 aa, Homosapiens; identical to SEQ ID NO: 3778

SEQ ID NO: 3787 - DNA, 3429 bp, Homosapiens
aatccagaggcaggggagggacggtgcaggcgcagagtattgggtttggctggcctcgatttaaagagacagaagctgtcggggtcctggaagacggtccccaataccctccccccaagtccttgggaccacttgggtccccagagctggggagatggtttgtggcggctttgcctgctccaagaatgcgctttgcgctctcaacgtggtctacatgctggtgagcttgttgctcattggagtggctgcttggggcaagggcctgggtctggtgtccagcatccacatcatcggcggagtcattgctgtgggagtcttccttctccttattgcagtggctggactgatctgcaagagccagagccccacatgccagatgtgtggagaaaagtttcttaagcattcagacgaagccctgaaaatcctagggggtgttggactcttctttagctttacagagatccttggtgtttggctagcaatgagatttcggaatcagaaggatcctagagccaaccccagtgcctttctatgagactttggatccttctgacttttcttctgctctctctaagctttctcttcctcccttagggaatatctagggtctgtaaccgttttggtttgagaaaaaggaaaggccccttgtcacatcctctaaaattgatggaatagcaagactttatgccttgacatattttagtgggagccagactataaggaataaaaggaaaaactttcttcctctctctccaagaggatatgggaagcttctgtgagtgcataggatgggggctggagtcattcttagctgtttcccttcctctgtccatatactggatcacctcaacataccctggtgtggctctaagggtaaatcagggatagggccaaggagaaaacaaccaagaactctttcctgtaataagcaggatccagtttgagaaagtttagcgaatataaaagtaaaagccatttaaaaatctatattctttttttttttttgacacagagtcttgctctgttgcccaggctggagtgcaatggcatgatctcggctcaccgcaacctctgcctcccgggttcaagcgatcctcctgcctcagtctcccaagtagctgggattacaggtgtgcaccaccacgcctgactaattttgtatttttagtagagacagggtttcaccatgttagtcaggctggtctcgaactcctgacctcaggtgatccacccgcgttggcctcccaacgtgctgggattataggcgtgagccaccacgccccgcctaaaatccatattcaaagaagcaatttcagttcctttctaagctttgtcagtcaaggggctccactgacttcctaggccctgtaatttaaccagtctttaaggttttgcaggaaagtcccttcttccaagtggtttttccaaatcgcacaatggcaaagccaaacagaggaagaaacattaaaaaaaaaaaaaagaccattatttctttgttttgtttttcctgtataaaaaaggaccccaaatataaaggtagggaaagggacaagagggaacataccccttagtgtagagaaatgggaaggagaaggagaagcctcaaaaggagaggtgggaggggaatgtcattaaggcagcaaagtaatctctgtagaaagatggaggaggaccctccatagcctcagagataaaggcaaagattgccctctcagtgtccagaagggaaatggcagcttttcttccttccatggcagccactccattgctcactccggattaccttcatccttatgtagataagagtgctgcagagctcgaaaggcagagattcgcttgtgtgggttaaaagtcagcatttcctgaggggagaggcaaaggtcagaaaaccatgaagaaaacagacttctgcccacccacaacaatacctgggatgagctttcttcttttttctttttttttttttttgagacggagtctcgctctatcacccaggctggagtgcaatggtatgatctcagctcactgcaacctccgcctcctgagttgaagtgattctcctatctcagcctcccaagtagctgagattacaggcgtgtgccaccacccccggcttatttttgtacttttagtagagacgaggtttcaccatgttggccaggctggtctcgaactcctgacctcaggtgatacgcccaccttggcctcccaaagtgctgggattacaggcgtgagccaccgtgcccagccaggatgggttctcttctatatccttctctgtgggtggctatttgcagctgtaataaaaactacagcccatctaccaaccaagtttcattaaccacagtggccagggccctgcatactgctctatttctttccccagtctctatttctttccctgtgcccacagccatctccagtaccagcagcagctgtgctcccgactcctccatctcaggtaccaccgactgcactgggcggggccctctggggggaaaggctccacggggcagggatacatctcgaggccagtcatcctctggaggcagcccaatcaggctgtgggggacaggagaactctggtcaggagggtcctccagttcccatccccatgggcagagccagttgccatcctgggttcagcagaaagaggactcagaatagaaaatctttttctcccatgttggtcacttactcaaagattttgcccaactggtcggcttcagagtttccacagaagagaggcctaaggtgagaagggatataaggtagcagtcattttcaaagatatcttagttgaatggttactgcttagtggctcaaaataggaagtatagggaataaaggccaacaattccagcactttgggatgctgaggtgagaggactgcttgagcccaggagttctagatcagcctgggcaagcaagaccttgtctctttttttaaaaaaaaagaaatgccaggtgcagcggctcacgcctgtaatcctagcactttgggagtctgatgtgggtggatcatgaggtcaagagatcgagaccatcctggccaacatggtgaaaccctgtcattactaaaagtacaaaaattagctgagcatggtggcgtgcacctgtggtcccagctacttgggaggctgagtcaagagaattgcttgaatctgggaggtggaggttgcagtgagcagagatcgcactactgcactccagcctggcgacagagcaagactccatctaaaaaaaaaaaaagccagtcatggtggcgtgcacctgtagtctcagctactcaagaggctgagatgggaggattgctttagcccaggaggtagaggctacagtgagctgtaattgggccactgcactccagcctgggtgacagagtgaaaccttatctcaataaataaataaataaataaataaataaat

SEQ ID NO: 3788 - protein, 126 aa, Homosapiens
MVCGGFACSKNALCALNVVYMLVSLLLIGVAAWGKGLGLVSSIHIIGGVIAVGVFLLLIAVAGLICKSQSPTCQMCGEKFLKHSDEALKILGGVGLFFSFTEILGVWLAMRFRNQKDPRANPSAFL

SEQ ID NO: 3789 - DNA, 2142 bp, Homosapiens
ttcctgtgaacctcagtttcttccaaactggaagtgataggatgatcctgagggttcatcttttgcattcatactaccatccctgccaccccctccccgccatcctagccattctaacctttgggagtgcctagggatgctcccggtgcggatagcaccatccccagctcccattcacacactattccattattccttccccctgccccgctcccaagtcctcttgtatggccttgggctgtgccgcatgctagaattgttgagatgtatcctgctctttcttcgtagctggtgagcttgttgctcattggagtggctgcttggggcaagggcctgggtctggtgtccagcatccacatcatcggcggagtcattgctgtgggagtcttccttctccttattgcagtggctggactggtgggtgctgtcaaccaccaccaagtcctgctgttcttttacatgatcatccttggtttggtcttcatcttccaatttgtaatctcttgctcatgtctggctattaaccgaagcaaacaggtaagacagtaccctttcaagtacttacttgctttttaaaattttcctcttaacctcgaactccttccttagtctggccccaactacccaaagatcatccttaggtgcactgcttctggcctcttgggctatttgcttcctctgggatgtctggttaattttccatgaggatgatctagagaacctcaaaaggtagatatttatcgtgtctataattgttgcacaccgttatgcttctgtttgacttcctttgctgggctagggaaattgaggcacttgaactgataacaggatgtagggagacttaatttccctctacccatatctttcagacagatgtcatcaatgcttcttggtgggtcatgagcaacaagactcgggatgaactggaaagaagttttgattgttgtggcttattcaacctcacaaccctgtatcaacaagattatgatttctgcactgcaatctgcaagagccagagccccacatgccagatgtgtggagaaaagtttcttaagcattcagacgaagccctgaaaatcctagggggtgttggactcttctttagctttacagagatccttggtgtttggctagcaatgagatttcggaatcagaaggatcctagagccaaccccagtgcctttctatgagactttggatccttctgacttttcttctgctctctctaagctttctcttcctcccttagggaatatctagggtctgtaaccgttttggtttgagaaaaaggaaaggccccttgtcacatcctctaaaattgatggaatagcaagactttatgccttgacatattttagtgggagccagactataaggaataaaaggaaaaactttcttcctctctctccaagaggatatgggaagcttctgtgagtgcataggatgggggctggagtcattcttagctgtttcccttcctctgtccatatactggatcacctcaacataccctggtgtggctctaagggtaaatcagggatagggccaaggagaaaacaaccaagaactctttcctgtaataagcaggatccagtttgagaaagtttagcgaatataaaagtaaaagccatttaaaaatctatattctttttttttttttgacacagagtcttgctctgttgcccaggctggagtgcaatggcatgatctcggctcaccgcaacctctgcctcccgggttcaagcgatcctcctgcctcagtctcccaagtagctgggattacaggtgtgcaccaccacgcctgactaattttgtatttttagtagagacagggtttcaccatgttagtcaggctggtctcgaactcctgacctcaggtgatccacccgcgttggcctcccaacgtgctgggattataggcgtgagccaccacgccccgcctaaaatccatattcaaagaagcaatttcagttcctttctaagctttgtcagtcaaggggctccactgacttcctaggccctgtaatttaaccagtctttaaggttttgcaggaaagtcccttcttccaagtggtttttccaaatcgcacaatggcaaagccaaacagaggaagaaacattaaaaaaaaaaaaaagaccatt

SEQ ID NO: 3790 - protein, 96 aa, Homosapiens [sequence omitted]

SEQ ID NO: 3791 - DNA, 2761 bp, Homosapiens
ttcctgtgaacctcagtttcttccaaactggaagtgataggatgatcctgagggttcatcttttgcattcatactaccatccctgccaccccctccccgccatcctagccattctaacctttgggagtgcctagggatgctcccggtgcggatagcaccatccccagctcccattcacacactattccattattccttccccctgccccgctcccaagtcctcttgtatggccttgggctgtgccgcatgctagaattgttgagatgtatcctgctctttcttcgtagctggtgagcttgttgctcattggagtggctgcttggggcaagggcctgggtctggtgtccagcatccacatcatcggcggagtcattgctgtgggagtcttccttctccttattgcagtggctggactggtgggtgctgtcaaccaccaccaagtcctgctgttcttttacatgatcatccttggtttggtcttcatcttccaatttgtaatctcttgctcatgtctggctattaaccgaagcaaacaggtaagacagtaccctttcaagtacttacttgctttttaaaattttcctcttaacctcgaactccttccttagtctggccccaactacccaaagatcatccttaggtgcactgcttctggcctcttgggctatttgcttcctctgggatgtctggttaattttccatgaggatgatctagagaacctcaaaaggtagatatttatcgtgtctataattgttgcacaccgttatgcttctgtttgacttcctttgctgggctagggaaattgaggcacttgaactgataacaggatgtagggagacttaatttccctctacccatatctttcagacagatgtcatcaatgcttcttggtgggtcatgagcaacaagactcgggatgaactggaaagaagttttgattgttgtggcttattcaacctcacaaccctgtatcaacaagattatgatttctgcactgcaatctgcaagagccagagccccacatgccagatgtgtggagaaaagtttcttaagcattcagacgaagccctgaaaatcctagggggtgttggactcttctttagctttacagagatccttggtgtttggctagcaatgagatttcggaatcagaaggatcctagagccaaccccagtgcctttctatgagactttggatccttctgacttttcttctgctctctctaagctttctcttcctcccttagggaatatctagggtctgtaaccgttttggtttgagaaaaaggaaaggccccttgtcacatcctctaaaattgatggaatagcaagactttatgccttgacatattttagtgggagccagactataaggaataaaaggaaaaactttcttcctctctctccaagaggatatgggaagcttctgtgagtgcataggatgggggctggagtcattcttagctgtttcccttcctctgtccatatactggatcacctcaacataccctggtgtggctctaagggtaaatcagggatagggccaaggagaaaacaaccaagaactctttcctgtaataagcaggatccagtttgagaaagtttagcgaatataaaagtaaaagccatttaaaaatctatattctttttttttttttgacacagagtcttgctctgttgcccaggctggagtgcaatggcatgatctcggctcaccgcaacctctgcctcccgggttcaagcgatcctcctgcctcagtctcccaagtagctgggattacaggtgtgcaccaccacgcctgactaattttgtatttttagtagagacagggtttcaccatgttagtcaggctggtctcgaactcctgacctcaggtgatccacccgcgttggcctcccaacgtgctgggattataggcgtgagccaccacgccccgcctaaaatccatattcaaagaagcaatttcagttcctttctaagctttgtcagtcaaggggctccactgacttcctaggccctgtaatttaaccagtctttaaggttttgcaggaaagtcccttcttccaagtggtttttccaaatcgcacaatggcaaagccaaacagaggaagaaacattaaaaaaaaaaaaaagaccattatttctttgttttgtttttcctgtataaaaaaggaccccaaatataaaggtagggaaagggacaagagggaacataccccttagtgtagagaaatgggaaggagaaggagaagcctcaaaaggagaggtgggaggggaatgtcattaaggcagcaaagtaatctctgtagaaagatggaggaggaccctccatagcctcagagataaaggcaaagattgccctctcagtgtccagaagggaaatggcagcttttcttccttccatggcagccactccattgctcactccggattaccttcatccttatgtagataagagtgctgcagagctcgaaaggcagagattcgcttgtgtgggttaaaagtcagcatttcctgaggggagaggcaaaggtcagaaaaccatgaagaaaacagacttctgcccacccacaacaatacctgggatgagctttcttcttttttctttttttttttttttgagacggagtctcgctctatcacccaggctggagtgcaatggtatgatctcagctcactgcaacctccgcctcctgagttgaagtgattctcctatctcagcctcccaagtagctgagattacaggcgtgtgccacca

SEQ ID NO: 3792 - protein, 96 aa, Homosapiens [sequence omitted]

SEQ ID NO: 3793 - DNA, 527 bp, Homosapiens
tggaaagaagttttgattgttgtggcttattcaacctcacaaccctgtatcaacaagattatgatttctgcactgcagtgagtgtgttgggggtggtgcagcagccaggggagatctgcaagagccagagccccacatgccagatgtgtggagaaaagtttcttaagcattcagacgaagccctgaaaatcctagggggtgttggactcttctttagctttacagagatccttggtgtttggctagcaatgagatttcggaatcagaaggatcctagagccaaccccagtgcctttctatgagactttggatccttctgacttttcttctgctctctctaagctttctcttcctcccttagggaatatctagggtctgtaaccgttttggtttgagaaaaaggaaaggccccttgtcacatcctctaaaattgatggaatagcaagactttatgccttgacatattttagtgggagccagactataaggaataaaaggaaaaactttcttcctctctctccaagagg

SEQ ID NO: 3794 - protein, 52 aa, Homosapiens
MCGEKFLKHSDEALKILGGVGLFFSFTEILGVWLAMRFRNQKDPRANPSAFL

SEQ ID NO: 3795 - DNA, 1254 bp, Homosapiens
tggaaagaagttttgattgttgtggcttattcaacctcacaaccctgtatcaacaagattatgatttctgcactgcagtgagtgtgttgggggtggtgcagcagccaggggagatctgcaagagccagagccccacatgccagatgtgtggagaaaagtttcttaagcattcagacgaagccctgaaaatcctagggggtgttggactcttctttagctttacagagatccttggtgtttggctagcaatgagatttcggaatcagaaggatcctagagccaaccccagtgcctttctatgagactttggatccttctgacttttcttctgctctctctaagctttctcttcctcccttagggaatatctagggtctgtaaccgttttggtttgagaaaaaggaaaggccccttgtcacatcctctaaaattgatggaatagcaagactttatgccttgacatattttagtgggagccagactataaggaataaaaggaaaaactttcttcctctctctccaagaggatatgggaagcttctgtgagtgcataggatgggggctggagtcattcttagctgtttcccttcctctgtccatatactggatcacctcaacataccctggtgtggctctaagggtaaatcagggatagggccaaggagaaaacaaccaagaactctttcctgtaataagcaggatccagtttgagaaagtttagcgaatataaaagtaaaagccatttaaaaatctatattctttttttttttttgacacagagtcttgctctgttgcccaggctggagtgcaatggcatgatctcggctcaccgcaacctctgcctcccgggttcaagcgatcctcctgcctcagtctcccaagtagctgggattacaggtgtgcaccaccacgcctgactaattttgtatttttagtagagacagggtttcaccatgttagtcaggctggtctcgaactcctgacctcaggtgatccacccgcgttggcctcccaacgtgctgggattataggcgtgagccaccacgccccgcctaaaatccatattcaaagaagcaatttcagttcctttctaagctttgtcagtcaaggggctccactgacttcctaggccctgtaatttaaccagtctttaaggttttgcaggaaagtcccttcttccaagtggtttttccaaatcgcacaatggcaaagccaaacagaggaagaaacattaaaaaaaaaaaaaagaccatt

SEQ ID NO: 3796 - protein, 52 aa, Homosapiens; identical to SEQ ID NO: 3794

SEQ ID NO: 3797 - DNA, 1873 bp, Homosapiens
tggaaagaagttttgattgttgtggcttattcaacctcacaaccctgtatcaacaagattatgatttctgcactgcagtgagtgtgttgggggtggtgcagcagccaggggagatctgcaagagccagagccccacatgccagatgtgtggagaaaagtttcttaagcattcagacgaagccctgaaaatcctagggggtgttggactcttctttagctttacagagatccttggtgtttggctagcaatgagatttcggaatcagaaggatcctagagccaaccccagtgcctttctatgagactttggatccttctgacttttcttctgctctctctaagctttctcttcctcccttagggaatatctagggtctgtaaccgttttggtttgagaaaaaggaaaggccccttgtcacatcctctaaaattgatggaatagcaagactttatgccttgacatattttagtgggagccagactataaggaataaaaggaaaaactttcttcctctctctccaagaggatatgggaagcttctgtgagtgcataggatgggggctggagtcattcttagctgtttcccttcctctgtccatatactggatcacctcaacataccctggtgtggctctaagggtaaatcagggatagggccaaggagaaaacaaccaagaactctttcctgtaataagcaggatccagtttgagaaagtttagcgaatataaaagtaaaagccatttaaaaatctatattctttttttttttttgacacagagtcttgctctgttgcccaggctggagtgcaatggcatgatctcggctcaccgcaacctctgcctcccgggttcaagcgatcctcctgcctcagtctcccaagtagctgggattacaggtgtgcaccaccacgcctgactaattttgtatttttagtagagacagggtttcaccatgttagtcaggctggtctcgaactcctgacctcaggtgatccacccgcgttggcctcccaacgtgctgggattataggcgtgagccaccacgccccgcctaaaatccatattcaaagaagcaatttcagttcctttctaagctttgtcagtcaaggggctccactgacttcctaggccctgtaatttaaccagtctttaaggttttgcaggaaagtcccttcttccaagtggtttttccaaatcgcacaatggcaaagccaaacagaggaagaaacattaaaaaaaaaaaaaagaccattatttctttgttttgtttttcctgtataaaaaaggaccccaaatataaaggtagggaaagggacaagagggaacataccccttagtgtagagaaatgggaaggagaaggagaagcctcaaaaggagaggtgggaggggaatgtcattaaggcagcaaagtaatctctgtagaaagatggaggaggaccctccatagcctcagagataaaggcaaagattgccctctcagtgtccagaagggaaatggcagcttttcttccttccatggcagccactccattgctcactccggattaccttcatccttatgtagataagagtgctgcagagctcgaaaggcagagattcgcttgtgtgggttaaaagtcagcatttcctgaggggagaggcaaaggtcagaaaaccatgaagaaaacagacttctgcccacccacaacaatacctgggatgagctttcttcttttttctttttttttttttttgagacggagtctcgctctatcacccaggctggagtgcaatggtatgatctcagctcactgcaacctccgcctcctgagttgaagtgattctcctatctcagcctcccaagtagctgagattacaggcgtgtgccacca

SEQ ID NO: 3798 - protein, 52 aa, Homosapiens; identical to SEQ ID NO: 3794

SEQ ID NO: 3799 - DNA, 1826 bp, Homosapiens
cgatctcttgacctcatgatccacccacatcagactcccaaagtgctaggattacaggcgtgagccgctgcacctggcatttctttttttttaaaaaaagagacaaggtcttgcttgcccaggctgatctagaactcctgggctcaagcagtcctctcacctcagcatcccaaagtgctggaattgttggcctttattccctatacttcctattttgagccactaagcagtaaccattcaactaagatatctttgaaaatgactgctaccttatatcccttctcaccttaggcctctcttctgtggaaactctgaagccgaccagttgggcaaaatctttgacctgattgggctgcctccagaggatgactggcctcgagatgtatccctgccccgtggagcctttccccccagagggccccgcccagtgcagtcggtggtacctgagatggaggagtcgggagcacagctgctgctggaaatgctgacttttaacccacacaagcgaatctctgcctttcgagctctgcagcactcttatctacataaggatgaaggtaatccggagtgagcaatggagtggctgccatggaaggaagaaaagctgccatttcccttctggacactgagagggcaatctttgcctttatctctgaggctatggagggtcctcctccatctttctacagagattactttgctgccttaatgacattcccctcccacctctccttttgaggcttctccttctccttcccatttctctacactaaggggtatgttccctcttgtccctttccctacctttatatttggggtccttttttatacaggaaaaacaaaacaaagaaataatggtcttttttttttttttaatgtttcttcctctgtttggctttgccattgtgcgatttggaaaaaccacttggaagaagggactttcctgcaaaaccttaaagactggttaaattacagggcctaggaagtcagtggagccccttgactgacaaagcttagaaaggaactgaaattgcttctttgaatatggattttaggcggggcgtggtggctcacgcctataatcccagcacgttgggaggccaacgcgggtggatcacctgaggtcaggagttcgagaccagcctgactaacatggtgaaaccctgtctctactaaaaatacaaaattagtcaggcgtggtggtgcacacctgtaatcccagctacttgggagactgaggcaggaggatcgcttgaacccgggaggcagaggttgcggtgagccgagatcatgccattgcactccagcctgggcaacagagcaagactctgtgtcaaaaaaaaaaaaagaatatagatttttaaatggcttttacttttatattcgctaaactttctcaaactggatcctgcttattacaggaaagagttcttggttgttttctccttggccctatccctgatttacccttagagccacaccagggtatgttgaggtgatccagtatatggacagaggaagggaaacagctaagaatgactccagcccccatcctatgcactcacagaagcttcccatatcctcttggagagagaggaagaaagtttttccttttattccttatagtctggctcccactaaaatatgtcaaggcataaagtcttgctattccatcaattttagaggatgtgacaaggggcctttcctttttctcaaaccaaaacggttacagaccctagatattccctaagggaggaagagaaagcttagagagagcagaagaaaagtcagaaggatccaaagtctcatagaaaggcactggggtt

SEQ ID NO: 3800 - protein, 40 aa, Homosapiens
MEESGAQLLLEMLTFNPHKRISAFRALQHSYLHKDEGNPE

SEQ ID NO: 3801 - DNA, 1893 bp, Homosapiens
cactttgtggccctcaagagtgtgagagtccccaatggaggaggaggtggaggaggccttcccatcagcacagttcgtgaggtggctttactgaggcgactggaggcttttgagcatcccaatgttgtccggctgatggacgtctgtgccacatcccgaactgaccgggagatcaaggtaaccctggtgtttgagcatgtagaccaggacctaaggacatatctggacaaggcacccccaccaggcttgccagccgaaacgatcaaggatctgatgcgccagtttctaagaggcctagatttccttcatgccaattgcatcgttcaccgagatctgaagccagagaacattctggtgacaagtggtggaacagtcaagctggctgactttggcctggccagaatctacagctaccagatggcacttacacccgtggttgttacactctggtaccgagctcccgaagttcttctgcagtccacatatgcaacacctgtggacatgtggagtgttggctgtatctttgcagagatgtttcgtcgaaagaaatgctgacttttaacccacacaagcgaatctctgcctttcgagctctgcagcactcttatctacataaggatgaaggtaatccggagtgagcaatggagtggctgccatggaaggaagaaaagctgccatttcccttctggacactgagagggcaatctttgcctttatctctgaggctatggagggtcctcctccatctttctacagagattactttgctgccttaatgacattcccctcccacctctccttttgaggcttctccttctccttcccatttctctacactaaggggtatgttccctcttgtccctttccctacctttatatttggggtccttttttatacaggaaaaacaaaacaaagaaataatggtcttttttttttttttaatgtttcttcctctgtttggctttgccattgtgcgatttggaaaaaccacttggaagaagggactttcctgcaaaaccttaaagactggttaaattacagggcctaggaagtcagtggagccccttgactgacaaagcttagaaaggaactgaaattgcttctttgaatatggattttaggcggggcgtggtggctcacgcctataatcccagcacgttgggaggccaacgcgggtggatcacctgaggtcaggagttcgagaccagcctgactaacatggtgaaaccctgtctctactaaaaatacaaaattagtcaggcgtggtggtgcacacctgtaatcccagctacttgggagactgaggcaggaggatcgcttgaacccgggaggcagaggttgcggtgagccgagatcatgccattgcactccagcctgggcaacagagcaagactctgtgtcaaaaaaaaaaaaagaatatagatttttaaatggcttttacttttatattcgctaaactttctcaaactggatcctgcttattacaggaaagagttcttggttgttttctccttggccctatccctgatttacccttagagccacaccagggtatgttgaggtgatccagtatatggacagaggaagggaaacagctaagaatgactccagcccccatcctatgcactcacagaagcttcccatatcctcttggagagagaggaagaaagtttttccttttattccttatagtctggctcccactaaaatatgtcaaggcataaagtcttgctattccatcaattttagaggatgtgacaaggggcctttcctttttctcaaaccaaaacggttacagaccctagatattccctaagggaggaagagaaagcttagagagagcagaagaaaagtcagaaggatccaaagtctcatagaaaggcactggggtt

SEQ ID NO: 3802 - protein, 139 aa, Homosapiens
MDVCATSRTDREIKVTLVFEHVDQDLRTYLDKAPPPGLPAETIKDLMRQFLRGLDFLHANCIVHRDLKPENILVTSGGTVKLADFGLARIYSYQMALTPVVVTLWYRAPEVLLQSTYATPVDMWSVGCIFAEMFRRKKC

SEQ ID NO: 3803 - DNA, 1887 bp, Homosapiens
gggggtgagggggcctctctagcttgcggcctgtgtctatggtcgggccctctgcgtccagctgctccggaccgagctcgggtgtatggggccgtaggaaccggctccggggccccgataacgggccgcccccacagcaccccgggctggcgtgaggtaagtgcagtcccttcccaggaatgagaaccagtgcccgcccccctcacagctttccacgcgttcgtttcgcgagctggttatggaagggtcgctcaagggcgggaagtggggcctttgtggtcatgggaaagtataattttagggactgaggtgtaggatcttcgatgcaaggcatgtgtcatgtgtgatctttgtgcggggcgcgattgtcccaaaggaaaaagcgttttctattgcagggcctcacgtggctggaggggttggtattgagtcattgtgttatctctggggccggccccaaggaagactgggagcgggggatgggatgctggtggtgttctttgcgctttttttttgggagtccctttgttgctgcaggctcataccatcctaactctgtaagcgacttttggtgataggagtctgtgattgtagggtctcccttgatctgagaatggctacctctcgatatgagccagtggctgaaattggtgtcggtgcctatgggacagtgtacaaggcccgtgatccccacagtggccactttgtggccctcaagagtgtgagaggtcctcctccatctttctacagagattactttgctgccttaatgacattcccctcccacctctccttttgaggcttctccttctccttcccatttctctacactaaggggtatgttccctcttgtccctttccctacctttatatttggggtccttttttatacaggaaaaacaaaacaaagaaataatggtcttttttttttttttaatgtttcttcctctgtttggctttgccattgtgcgatttggaaaaaccacttggaagaagggactttcctgcaaaaccttaaagactggttaaattacagggcctaggaagtcagtggagccccttgactgacaaagcttagaaaggaactgaaattgcttctttgaatatggattttaggcggggcgtggtggctcacgcctataatcccagcacgttgggaggccaacgcgggtggatcacctgaggtcaggagttcgagaccagcctgactaacatggtgaaaccctgtctctactaaaaatacaaaattagtcaggcgtggtggtgcacacctgtaatcccagctacttgggagactgaggcaggaggatcgcttgaacccgggaggcagaggttgcggtgagccgagatcatgccattgcactccagcctgggcaacagagcaagactctgtgtcaaaaaaaaaaaaagaatatagatttttaaatggcttttacttttatattcgctaaactttctcaaactggatcctgcttattacaggaaagagttcttggttgttttctccttggccctatccctgatttacccttagagccacaccagggtatgttgaggtgatccagtatatggacagaggaagggaaacagctaagaatgactccagcccccatcctatgcactcacagaagcttcccatatcctcttggagagagaggaagaaagtttttccttttattccttatagtctggctcccactaaaatatgtcaaggcataaagtcttgctattccatcaattttagaggatgtgacaaggggcctttcctttttctcaaaccaaaacggttacagaccctagatattccctaagggaggaagagaaagcttagagagagcagaagaaaagtcagaaggatccaaagtctcatagaaaggcactggggtt

SEQ ID NO: 3804 - protein, 61 aa, Homosapiens
MATSRYEPVAEIGVGAYGTVYKARDPHSGHFVALKSVRGPPPSFYRDYFAALMTFPSHLSF

SEQ ID NO: 3805 - DNA, 1714 bp, Homosapiens
gcagctggtcacatggtgagggtgggggtgagggggcctctctagcttgcggcctgtgtctatggtcgggccctctgcgtccagctgctccggaccgagctcgggtgtatggggccgtaggaaccggctccggggccccgataacgggccgcccccacagcaccccgggctggcgtgaggcctctcttctgtggaaactctgaagccgaccagttgggcaaaatctttgacctgattgggctgcctccagaggatgactggcctcgagatgtatccctgccccgtggagcctttccccccagagggccccgcccagtgcagtcggtggtacctgagatggaggagtcgggagcacagctgctgctggaaatgctgacttttaacccacacaagcgaatctctgcctttcgagctctgcagcactcttatctacataaggatgaaggtaatccggagtgagcaatggagtggctgccatggaaggaagaaaagctgccatttcccttctggacactgagagggcaatctttgcctttatctctgaggctatggagggtcctcctccatctttctacagagattactttgctgccttaatgacattcccctcccacctctccttttgaggcttctccttctccttcccatttctctacactaaggggtatgttccctcttgtccctttccctacctttatatttggggtccttttttatacaggaaaaacaaaacaaagaaataatggtcttttttttttttttaatgtttcttcctctgtttggctttgccattgtgcgatttggaaaaaccacttggaagaagggactttcctgcaaaaccttaaagactggttaaattacagggcctaggaagtcagtggagccccttgactgacaaagcttagaaaggaactgaaattgcttctttgaatatggattttaggcggggcgtggtggctcacgcctataatcccagcacgttgggaggccaacgcgggtggatcacctgaggtcaggagttcgagaccagcctgactaacatggtgaaaccctgtctctactaaaaatacaaaattagtcaggcgtggtggtgcacacctgtaatcccagctacttgggagactgaggcaggaggatcgcttgaacccgggaggcagaggttgcggtgagccgagatcatgccattgcactccagcctgggcaacagagcaagactctgtgtcaaaaaaaaaaaaagaatatagatttttaaatggcttttacttttatattcgctaaactttctcaaactggatcctgcttattacaggaaagagttcttggttgttttctccttggccctatccctgatttacccttagagccacaccagggtatgttgaggtgatccagtatatggacagaggaagggaaacagctaagaatgactccagcccccatcctatgcactcacagaagcttcccatatcctcttggagagagaggaagaaagtttttccttttattccttatagtctggctcccactaaaatatgtcaaggcataaagtcttgctattccatcaattttagaggatgtgacaaggggcctttcctttttctcaaaccaaaacggttacagaccctagatattccctaagggaggaagagaaagcttagagagagcagaagaaaagtcagaaggatccaaagtctcatagaaaggcactggggtt

SEQ ID NO: 3806 - protein, 40 aa, Homosapiens; identical to SEQ ID NO: 3800

SEQ ID NO: 3807 - DNA, 1419 bp, Homosapiens
gcagctggtcacatggtgagggtgggggtgagggggcctctctagcttgcggcctgtgtctatggtcgggccctctgcgtccagctgctccggaccgagctcgggtgtatggggccgtaggaaccggctccggggccccgataacgggccgcccccacagcaccccgggctggcgtgagggtctcccttgatctgagaatggctacctctcgatatgagccagtggctgaaattggtgtcggtgcctatgggacagtgtacaaggcccgtgatccccacagtggccactttgtggccctcaagagtgtgagagtccccactctccttttgaggcttctccttctccttcccatttctctacactaaggggtatgttccctcttgtccctttccctacctttatatttggggtccttttttatacaggaaaaacaaaacaaagaaataatggtcttttttttttttttaatgtttcttcctctgtttggctttgccattgtgcgatttggaaaaaccacttggaagaagggactttcctgcaaaaccttaaagactggttaaattacagggcctaggaagtcagtggagccccttgactgacaaagcttagaaaggaactgaaattgcttctttgaatatggattttaggcggggcgtggtggctcacgcctataatcccagcacgttgggaggccaacgcgggtggatcacctgaggtcaggagttcgagaccagcctgactaacatggtgaaaccctgtctctactaaaaatacaaaattagtcaggcgtggtggtgcacacctgtaatcccagctacttgggagactgaggcaggaggatcgcttgaacccgggaggcagaggttgcggtgagccgagatcatgccattgcactccagcctgggcaacagagcaagactctgtgtcaaaaaaaaaaaaagaatatagatttttaaatggcttttacttttatattcgctaaactttctcaaactggatcctgcttattacaggaaagagttcttggttgttttctccttggccctatccctgatttacccttagagccacaccagggtatgttgaggtgatccagtatatggacagaggaagggaaacagctaagaatgactccagcccccatcctatgcactcacagaagcttcccatatcctcttggagagagaggaagaaagtttttccttttattccttatagtctggctcccactaaaatatgtcaaggcataaagtcttgctattccatcaattttagaggatgtgacaaggggcctttcctttttctcaaaccaaaacggttacagaccctagatattccctaagggaggaagagaaagcttagagagagcagaagaaaagtcagaaggatccaaagtctcatagaaaggcactggggtt

SEQ ID NO: 3808 - protein, 55 aa, Homosapiens [sequence omitted]

SEQ ID NO: 3809 - DNA, 2128 bp, Homosapiens
gcagctggtcacatggtgagggtgggggtgagggggcctctctagcttgcggcctgtgtctatggtcgggccctctgcgtccagctgctccggaccgagctcgggtgtatggggccgtaggaaccggctccggggccccgataacgggccgcccccacagcaccccgggctggcgtgaggctgatggacgtctgtgccacatcccgaactgaccgggagatcaaggtaaccctggtgtttgagcatgtagaccaggacctaaggacatatctggacaaggcacccccaccaggcttgccagccgaaacgatcaaggatctgatgcgccagtttctaagaggcctagatttccttcatgccaattgcatcgttcaccgagatctgaagccagagaacattctggtgacaagtggtggaacagtcaagctggctgactttggcctggccagaatctacagctaccagatggcacttacacccgtggttgttacactctggtaccgagctcccgaagttcttctgcagtccacatatgcaacacctgtggacatgtggagtgttggctgtatctttgcagagatgtttcgtcgaaagcctctcttctgtggaaactctgaagccgaccagttgggcaaaatctttgacctgattgggctgcctccagaggatgactggcctcgagatgtatccctgccccgtggagcctttccccccagagggccccgcccagtgcagtcggtggtacctgagatggaggagtcgggagcacagctgctgctggaaatgctgacttttaacccacacaagcgaatctctgcctttcgagctctgcagcactcttatctacataaggatgaaggtaatccggagtgagcaatggagtggctgccatggaaggaagaaaagctgccatttcccttctggacactgagagggcaatctttgcctttatctctgaggctatggagggtcctcctccatctttctacagagattactttgctgccttaatgacattcccctcccacctctccttttgaggcttctccttctccttcccatttctctacactaaggggtatgttccctcttgtccctttccctacctttatatttggggtccttttttatacaggaaaaacaaaacaaagaaataatggtcttttttttttttttaatgtttcttcctctgtttggctttgccattgtgcgatttggaaaaaccacttggaagaagggactttcctgcaaaaccttaaagactggttaaattacagggcctaggaagtcagtggagccccttgactgacaaagcttagaaaggaactgaaattgcttctttgaatatggattttaggcggggcgtggtggctcacgcctataatcccagcacgttgggaggccaacgcgggtggatcacctgaggtcaggagttcgagaccagcctgactaacatggtgaaaccctgtctctactaaaaatacaaaattagtcaggcgtggtggtgcacacctgtaatcccagctacttgggagactgaggcaggaggatcgcttgaacccgggaggcagaggttgcggtgagccgagatcatgccattgcactccagcctgggcaacagagcaagactctgtgtcaaaaaaaaaaaaagaatatagatttttaaatggcttttacttttatattcgctaaactttctcaaactggatcctgcttattacaggaaagagttcttggttgttttctccttggccctatccctgatttacccttagagccacaccagggtatgttgaggtgatccagtatatggacagaggaagggaaacagctaagaatgactccagcccccatcctatgcactcacagaagcttcccatatcctcttggagagagaggaagaaagtttttccttttattccttatagtctggctcccactaaaatatgtcaaggcataaagtcttgctattccatcaattttagaggatgtgacaaggggcctttcctttttctcaaaccaaaacggttacagaccctagatattccctaagggaggaagagaaagcttagagagagcagaagaaaagtcagaaggatccaaagtctcatagaaaggcactggggtt

SEQ ID NO: 3810 - protein, 229 aa, Homosapiens
MDVCATSRTDREIKVTLVFEHVDQDLRTYLDKAPPPGLPAETIKDLMRQFLRGLDFLHANCIVHRDLKPENILVTSGGTVKLADFGLARIYSYQMALTPVVVTLWYRAPEVLLQSTYATPVDMWSVGCIFAEMFRRKPLFCGNSEADQLGKIFDLIGLPPEDDWPRDVSLPRGAFPPRGPRPVQSVVPEMEESGAQLLLEMLTFNPHKRISAFRALQHSYLHKDEGNPE

SEQ ID NO: 3811 - DNA, 1493 bp, Homosapiens
cagtttccgcgcgcctctttggcagctggtcacatggtgagggtgggggtgagggggcctctctagcttgcggcctgtgtctatggtcgggccctctgcgtccagctgctccggaccgagctcgggtgtatggggccgtaggaaccggctccggggccccgataacgggccgcccccacagcaccccgggctggcgtgagggtctcccttgatctgagaatggctacctctcgatatgagccagtggctgaaattggtgtcggtgcctatgggacagtgtacaaggcccgtgatccccacagtggccactttgtggccctcaagagtgtgagaggtcctcctccatctttctacagagattactttgctgccttaatgacattcccctcccacctctccttttgaggcttctccttctccttcccatttctctacactaaggggtatgttccctcttgtccctttccctacctttatatttggggtccttttttatacaggaaaaacaaaacaaagaaataatggtcttttttttttttttaatgtttcttcctctgtttggctttgccattgtgcgatttggaaaaaccacttggaagaagggactttcctgcaaaaccttaaagactggttaaattacagggcctaggaagtcagtggagccccttgactgacaaagcttagaaaggaactgaaattgcttctttgaatatggattttaggcggggcgtggtggctcacgcctataatcccagcacgttgggaggccaacgcgggtggatcacctgaggtcaggagttcgagaccagcctgactaacatggtgaaaccctgtctctactaaaaatacaaaattagtcaggcgtggtggtgcacacctgtaatcccagctacttgggagactgaggcaggaggatcgcttgaacccgggaggcagaggttgcggtgagccgagatcatgccattgcactccagcctgggcaacagagcaagactctgtgtcaaaaaaaaaaaaagaatatagatttttaaatggcttttacttttatattcgctaaactttctcaaactggatcctgcttattacaggaaagagttcttggttgttttctccttggccctatccctgatttacccttagagccacaccagggtatgttgaggtgatccagtatatggacagaggaagggaaacagctaagaatgactccagcccccatcctatgcactcacagaagcttcccatatcctcttggagagagaggaagaaagtttttccttttattccttatagtctggctcccactaaaatatgtcaaggcataaagtcttgctattccatcaattttagaggatgtgacaaggggcctttcctttttctcaaaccaaaacggttacagaccctagatattccctaagggaggaagagaaagcttagagagagcagaagaaaagtcagaaggatccaaagtctcatagaaaggcactggggtt

SEQ ID NO: 3812 - protein, 61 aa, Homosapiens; identical to SEQ ID NO: 3804

SEQ ID NO: 3813 - DNA, 2470 bp, Homosapiens
cccagtcgaagcacctcctgtccgcccctcagcgcatgggtggcggtcacgtgcccagaacgtccggcgttcgccccgccctcccagtttccgcgcgcctctttggcagctggtcacatggtgagggtgggggtgagggggcctctctagcttgcggcctgtgtctatggtcgggccctctgcgtccagctgctccggaccgagctcgggtgtatggggccgtaggaaccggctccggggccccgataacgggccgcccccacagcaccccgggctggcgtgagggtctcccttgatctgagaatggctacctctcgatatgagccagtggctgaaattggtgtcggtgcctatgggacagtgtacaaggcccgtgatccccacagtggccactttgtggccctcaagagtgtgagagtccccaatggaggaggaggtggaggaggccttcccatcagcacagttcgtgaggtggctttactgaggcgactggaggcttttgagcatcccaatgttgtccggctgatggacgtctgtgccacatcccgaactgaccgggagatcaaggtaaccctggtgtttgagcatgtagaccaggacctaaggacatatctggacaaggcacccccaccaggcttgccagccgaaacgatcaaggatctgatgcgccagtttctaagaggcctagatttccttcatgccaattgcatcgttcaccgagatctgaagccagagaacattctggtgacaagtggtggaacagtcaagctggctgactttggcctggccagaatctacagctaccagatggcacttacacccgtggttgttacactctggtaccgagctcccgaagttcttctgcagtccacatatgcaacacctgtggacatgtggagtgttggctgtatctttgcagagatgtttcgtcgaaagcctctcttctgtggaaactctgaagccgaccagttgggcaaaatctttgacctgattgggctgcctccagaggatgactggcctcgagatgtatccctgccccgtggagcctttccccccagagggccccgcccagtgcagtcggtggtacctgagatggaggagtcgggagcacagctgctgctggaaatgctgacttttaacccacacaagcgaatctctgcctttcgagctctgcagcactcttatctacataaggatgaaggtaatccggagtgagcaatggagtggctgccatggaaggaagaaaagctgccatttcccttctggacactgagagggcaatctttgcctttatctctgaggctatggagggtcctcctccatctttctacagagattactttgctgccttaatgacattcccctcccacctctccttttgaggcttctccttctccttcccatttctctacactaaggggtatgttccctcttgtccctttccctacctttatatttggggtccttttttatacaggaaaaacaaaacaaagaaataatggtcttttttttttttttaatgtttcttcctctgtttggctttgccattgtgcgatttggaaaaaccacttggaagaagggactttcctgcaaaaccttaaagactggttaaattacagggcctaggaagtcagtggagccccttgactgacaaagcttagaaaggaactgaaattgcttctttgaatatggattttaggcggggcgtggtggctcacgcctataatcccagcacgttgggaggccaacgcgggtggatcacctgaggtcaggagttcgagaccagcctgactaacatggtgaaaccctgtctctactaaaaatacaaaattagtcaggcgtggtggtgcacacctgtaatcccagctacttgggagactgaggcaggaggatcgcttgaacccgggaggcagaggttgcggtgagccgagatcatgccattgcactccagcctgggcaacagagcaagactctgtgtcaaaaaaaaaaaaagaatatagatttttaaatggcttttacttttatattcgctaaactttctcaaactggatcctgcttattacaggaaagagttcttggttgttttctccttggccctatccctgatttacccttagagccacaccagggtatgttgaggtgatccagtatatggacagaggaagggaaacagctaagaatgactccagcccccatcctatgcactcacagaagcttcccatatcctcttggagagagaggaagaaagtttttccttttattccttatagtctggctcccactaaaatatgtcaaggcataaagtcttgctattccatcaattttagaggatgtgacaaggggcctttcctttttctcaaaccaaaacggttacagaccctagatattccctaagggaggaagagaaagcttagagagagcagaagaaaagtcagaaggatccaaagtctcatagaaaggcactggggtt

SEQ ID NO: 3814 - protein, 303 aa, Homosapiens; identical to SEQ ID NO: 528

SEQ ID NO: 3815 - DNA, 874 bp, Homosapiens
cgatctcttgacctcatgatccacccacatcagactcccaaagtgctaggattacaggcgtgagccgctgcacctggcatttctttttttttaaaaaaagagacaaggtcttgcttgcccaggctgatctagaactcctgggctcaagcagtcctctcacctcagcatcccaaagtgctggaattgttggcctttattccctatacttcctattttgagccactaagcagtaaccattcaactaagatatctttgaaaatgactgctaccttatatcccttctcaccttaggcctctcttctgtggaaactctgaagccgaccagttgggcaaaatctttgacctgattgggctgcctccagaggatgactggcctcgagatgtatccctgccccgtggagcctttccccccagagggccccgcccagtgcagtcggtggtacctgagatggaggagtcgggagcacagctgctgctggaaatgctgacttttaacccacacaagcgaatctctgcctttcgagctctgcagcactcttatctacataaggatgaaggtaatccggagtgagcaatggagtggctgccatggaaggaagaaaagctgccatttcccttctggacactgagagggcaatctttgcctttatctctgaggctatggagggtcctcctccatctttctacagagattactttgctgccttaatgacattcccctcccacctctccttttgaggcttctccttctccttcccatttctctacactaaggggtatgttccctcttgtccctttccctacctttatatttggggtccttttttatacaggaaaaacaaaacaaagaaataatggtctttttttttttttt

SEQ ID NO: 3816 - protein, 40 aa, Homosapiens; identical to SEQ ID NO: 3800

SEQ ID NO: 3817 - DNA, 941 bp, Homosapiens
cactttgtggccctcaagagtgtgagagtccccaatggaggaggaggtggaggaggccttcccatcagcacagttcgtgaggtggctttactgaggcgactggaggcttttgagcatcccaatgttgtccggctgatggacgtctgtgccacatcccgaactgaccgggagatcaaggtaaccctggtgtttgagcatgtagaccaggacctaaggacatatctggacaaggcacccccaccaggcttgccagccgaaacgatcaaggatctgatgcgccagtttctaagaggcctagatttccttcatgccaattgcatcgttcaccgagatctgaagccagagaacattctggtgacaagtggtggaacagtcaagctggctgactttggcctggccagaatctacagctaccagatggcacttacacccgtggttgttacactctggtaccgagctcccgaagttcttctgcagtccacatatgcaacacctgtggacatgtggagtgttggctgtatctttgcagagatgtttcgtcgaaagaaatgctgacttttaacccacacaagcgaatctctgcctttcgagctctgcagcactcttatctacataaggatgaaggtaatccggagtgagcaatggagtggctgccatggaaggaagaaaagctgccatttcccttctggacactgagagggcaatctttgcctttatctctgaggctatggagggtcctcctccatctttctacagagattactttgctgccttaatgacattcccctcccacctctccttttgaggcttctccttctccttcccatttctctacactaaggggtatgttccctcttgtccctttccctacctttatatttggggtccttttttatacaggaaaaacaaaacaaagaaataatggtctttttttttttttt

SEQ ID NO: 3818 - protein, 139 aa, Homosapiens; identical to SEQ ID NO: 3802

SEQ ID NO: 3819 - DNA, 762 bp, Homosapiens
gcagctggtcacatggtgagggtgggggtgagggggcctctctagcttgcggcctgtgtctatggtcgggccctctgcgtccagctgctccggaccgagctcgggtgtatggggccgtaggaaccggctccggggccccgataacgggccgcccccacagcaccccgggctggcgtgaggcctctcttctgtggaaactctgaagccgaccagttgggcaaaatctttgacctgattgggctgcctccagaggatgactggcctcgagatgtatccctgccccgtggagcctttccccccagagggccccgcccagtgcagtcggtggtacctgagatggaggagtcgggagcacagctgctgctggaaatgctgacttttaacccacacaagcgaatctctgcctttcgagctctgcagcactcttatctacataaggatgaaggtaatccggagtgagcaatggagtggctgccatggaaggaagaaaagctgccatttcccttctggacactgagagggcaatctttgcctttatctctgaggctatggagggtcctcctccatctttctacagagattactttgctgccttaatgacattcccctcccacctctccttttgaggcttctccttctccttcccatttctctacactaaggggtatgttccctcttgtccctttccctacctttatatttggggtccttttttatacaggaaaaacaaaacaaagaaataatggtctttttttttttttt

SEQ ID NO: 3820 - protein, 40 aa, Homosapiens; identical to SEQ ID NO: 3800

SEQ ID NO: 3821 - DNA, 1176 bp, Homosapiens
gcagctggtcacatggtgagggtgggggtgagggggcctctctagcttgcggcctgtgtctatggtcgggccctctgcgtccagctgctccggaccgagctcgggtgtatggggccgtaggaaccggctccggggccccgataacgggccgcccccacagcaccccgggctggcgtgaggctgatggacgtctgtgccacatcccgaactgaccgggagatcaaggtaaccctggtgtttgagcatgtagaccaggacctaaggacatatctggacaaggcacccccaccaggcttgccagccgaaacgatcaaggatctgatgcgccagtttctaagaggcctagatttccttcatgccaattgcatcgttcaccgagatctgaagccagagaacattctggtgacaagtggtggaacagtcaagctggctgactttggcctggccagaatctacagctaccagatggcacttacacccgtggttgttacactctggtaccgagctcccgaagttcttctgcagtccacatatgcaacacctgtggacatgtggagtgttggctgtatctttgcagagatgtttcgtcgaaagcctctcttctgtggaaactctgaagccgaccagttgggcaaaatctttgacctgattgggctgcctccagaggatgactggcctcgagatgtatccctgccccgtggagcctttccccccagagggccccgcccagtgcagtcggtggtacctgagatggaggagtcgggagcacagctgctgctggaaatgctgacttttaacccacacaagcgaatctctgcctttcgagctctgcagcactcttatctacataaggatgaaggtaatccggagtgagcaatggagtggctgccatggaaggaagaaaagctgccatttcccttctggacactgagagggcaatctttgcctttatctctgaggctatggagggtcctcctccatctttctacagagattactttgctgccttaatgacattcccctcccacctctccttttgaggcttctccttctccttcccatttctctacactaaggggtatgttccctcttgtccctttccctacctttatatttggggtccttttttatacaggaaaaacaaaacaaagaaataatggtctttttttttttttt

SEQ ID NO: 3822 - protein, 229 aa, Homosapiens; identical to SEQ ID NO: 3810

SEQ ID NO: 3823 - DNA, 1518 bp, Homosapiens
cccagtcgaagcacctcctgtccgcccctcagcgcatgggtggcggtcacgtgcccagaacgtccggcgttcgccccgccctcccagtttccgcgcgcctctttggcagctggtcacatggtgagggtgggggtgagggggcctctctagcttgcggcctgtgtctatggtcgggccctctgcgtccagctgctccggaccgagctcgggtgtatggggccgtaggaaccggctccggggccccgataacgggccgcccccacagcaccccgggctggcgtgagggtctcccttgatctgagaatggctacctctcgatatgagccagtggctgaaattggtgtcggtgcctatgggacagtgtacaaggcccgtgatccccacagtggccactttgtggccctcaagagtgtgagagtccccaatggaggaggaggtggaggaggccttcccatcagcacagttcgtgaggtggctttactgaggcgactggaggcttttgagcatcccaatgttgtccggctgatggacgtctgtgccacatcccgaactgaccgggagatcaaggtaaccctggtgtttgagcatgtagaccaggacctaaggacatatctggacaaggcacccccaccaggcttgccagccgaaacgatcaaggatctgatgcgccagtttctaagaggcctagatttccttcatgccaattgcatcgttcaccgagatctgaagccagagaacattctggtgacaagtggtggaacagtcaagctggctgactttggcctggccagaatctacagctaccagatggcacttacacccgtggttgttacactctggtaccgagctcccgaagttcttctgcagtccacatatgcaacacctgtggacatgtggagtgttggctgtatctttgcagagatgtttcgtcgaaagcctctcttctgtggaaactctgaagccgaccagttgggcaaaatctttgacctgattgggctgcctccagaggatgactggcctcgagatgtatccctgccccgtggagcctttccccccagagggccccgcccagtgcagtcggtggtacctgagatggaggagtcgggagcacagctgctgctggaaatgctgacttttaacccacacaagcgaatctctgcctttcgagctctgcagcactcttatctacataaggatgaaggtaatccggagtgagcaatggagtggctgccatggaaggaagaaaagctgccatttcccttctggacactgagagggcaatctttgcctttatctctgaggctatggagggtcctcctccatctttctacagagattactttgctgccttaatgacattcccctcccacctctccttttgaggcttctccttctccttcccatttctctacactaaggggtatgttccctcttgtccctttccctacctttatatttggggtccttttttatacaggaaaaacaaaacaaagaaataatggtctttttttttttttt

SEQ ID NO: 3824 - protein, 303 aa, Homosapiens; identical to SEQ ID NO: 528

SEQ ID NO: 3825 - DNA, 834 bp, Homosapiens
cgatctcttgacctcatgatccacccacatcagactcccaaagtgctaggattacaggcgtgagccgctgcacctggcatttctttttttttaaaaaaagagacaaggtcttgcttgcccaggctgatctagaactcctgggctcaagcagtcctctcacctcagcatcccaaagtgctggaattgttggcctttattccctatacttcctattttgagccactaagcagtaaccattcaactaagatatctttgaaaatgactgctaccttatatcccttctcaccttaggcctctcttctgtggaaactctgaagccgaccagttgggcaaaatctttgacctgattgggctgcctccagaggatgactggcctcgagatgtatccctgccccgtggagcctttccccccagagggccccgcccagtgcagtcggtggtacctgagatggaggagtcgggagcacagctgctgctggaaatgctgacttttaacccacacaagcgaatctctgcctttcgagctctgcagcactcttatctacataaggatgaaggtaatccggagtgagcaatggagtggctgccatggaaggaagaaaagctgccatttcccttctggacactgagagggcaatctttgcctttatctctgaggctatggagggtcctcctccatctttctacagagattactttgctgccttaatgacattcccctcccacctctccttttgaggcttctccttctccttcccatttctctacactaaggggtatgttccctcttgtccctttccctacctttatatttggggtccttttttatacagg

SEQ ID NO: 3826 - protein, 40 aa, Homosapiens; identical to SEQ ID NO: 3800

SEQ ID NO: 3827 - DNA, 901 bp, Homosapiens
cactttgtggccctcaagagtgtgagagtccccaatggaggaggaggtggaggaggccttcccatcagcacagttcgtgaggtggctttactgaggcgactggaggcttttgagcatcccaatgttgtccggctgatggacgtctgtgccacatcccgaactgaccgggagatcaaggtaaccctggtgtttgagcatgtagaccaggacctaaggacatatctggacaaggcacccccaccaggcttgccagccgaaacgatcaaggatctgatgcgccagtttctaagaggcctagatttccttcatgccaattgcatcgttcaccgagatctgaagccagagaacattctggtgacaagtggtggaacagtcaagctggctgactttggcctggccagaatctacagctaccagatggcacttacacccgtggttgttacactctggtaccgagctcccgaagttcttctgcagtccacatatgcaacacctgtggacatgtggagtgttggctgtatctttgcagagatgtttcgtcgaaagaaatgctgacttttaacccacacaagcgaatctctgcctttcgagctctgcagcactcttatctacataaggatgaaggtaatccggagtgagcaatggagtggctgccatggaaggaagaaaagctgccatttcccttctggacactgagagggcaatctttgcctttatctctgaggctatggagggtcctcctccatctttctacagagattactttgctgccttaatgacattcccctcccacctctccttttgaggcttctccttctccttcccatttctctacactaaggggtatgttccctcttgtccctttccctacctttatatttggggtccttttttatacagg

SEQ ID NO: 3828 - protein, 139 aa, Homosapiens; identical to SEQ ID NO: 3802

SEQ ID NO: 3829 - DNA, 722 bp, Homosapiens
gcagctggtcacatggtgagggtgggggtgagggggcctctctagcttgcggcctgtgtctatggtcgggccctctgcgtccagctgctccggaccgagctcgggtgtatggggccgtaggaaccggctccggggccccgataacgggccgcccccacagcaccccgggctggcgtgaggcctctcttctgtggaaactctgaagccgaccagttgggcaaaatctttgacctgattgggctgcctccagaggatgactggcctcgagatgtatccctgccccgtggagcctttccccccagagggccccgcccagtgcagtcggtggtacctgagatggaggagtcgggagcacagctgctgctggaaatgctgacttttaacccacacaagcgaatctctgcctttcgagctctgcagcactcttatctacataaggatgaaggtaatccggagtgagcaatggagtggctgccatggaaggaagaaaagctgccatttcccttctggacactgagagggcaatctttgcctttatctctgaggctatggagggtcctcctccatctttctacagagattactttgctgccttaatgacattcccctcccacctctccttttgaggcttctccttctccttcccatttctctacactaaggggtatgttccctcttgtccctttccctacctttatatttggggtccttttttatacagg

SEQ ID NO: 3830 - protein, 40 aa, Homosapiens; identical to SEQ ID NO: 3800

SEQ ID NO: 3831 - DNA, 1136 bp, Homosapiens
gcagctggtcacatggtgagggtgggggtgagggggcctctctagcttgcggcctgtgtctatggtcgggccctctgcgtccagctgctccggaccgagctcgggtgtatggggccgtaggaaccggctccggggccccgataacgggccgcccccacagcaccccgggctggcgtgaggctgatggacgtctgtgccacatcccgaactgaccgggagatcaaggtaaccctggtgtttgagcatgtagaccaggacctaaggacatatctggacaaggcacccccaccaggcttgccagccgaaacgatcaaggatctgatgcgccagtttctaagaggcctagatttccttcatgccaattgcatcgttcaccgagatctgaagccagagaacattctggtgacaagtggtggaacagtcaagctggctgactttggcctggccagaatctacagctaccagatggcacttacacccgtggttgttacactctggtaccgagctcccgaagttcttctgcagtccacatatgcaacacctgtggacatgtggagtgttggctgtatctttgcagagatgtttcgtcgaaagcctctcttctgtggaaactctgaagccgaccagttgggcaaaatctttgacctgattgggctgcctccagaggatgactggcctcgagatgtatccctgccccgtggagcctttccccccagagggccccgcccagtgcagtcggtggtacctgagatggaggagtcgggagcacagctgctgctggaaatgctgacttttaacccacacaagcgaatctctgcctttcgagctctgcagcactcttatctacataaggatgaaggtaatccggagtgagcaatggagtggctgccatggaaggaagaaaagctgccatttcccttctggacactgagagggcaatctttgcctttatctctgaggctatggagggtcctcctccatctttctacagagattactttgctgccttaatgacattcccctcccacctctccttttgaggcttctccttctccttcccatttctctacactaaggggtatgttccctcttgtccctttccctacctttatatttggggtccttttttatacagg

SEQ ID NO: 3832 - protein, 229 aa, Homosapiens; identical to SEQ ID NO: 3810

SEQ ID NO: 3833 - DNA, 1062 bp, Homosapiens
cggcgttcgccccgccctcccagtttccgcgcgcctctttggcagctggtcacatggtgagggtgggggtgagggggcctctctagcttgcggcctgtgtctatggtcgggccctctgcgtccagctgctccggaccgagctcgggtgtatggggccgtaggaaccggctccggggccccgataacgggccgcccccacagcaccccgggctggcgtgagggtctcccttgatctgagaatggctacctctcgatatgagccagtggctgaaattggtgtcggtgcctatgggacagtgtacaaggcccgtgatccccacagtggccactttgtggccctcaagagtgtgagagtccccaatggaggaggaggtggaggaggccttcccatcagcacagttcgtgaggtggctttactgaggcgactggaggcttttgagcatcccaatgttgtccggctgatggacgtctgtgccacatcccgaactgaccgggagatcaagagatgtttcgtcgaaagcctctcttctgtggaaactctgaagccgaccagttgggcaaaatctttgacctgattgggctgcctccagaggatgactggcctcgagatgtatccctgccccgtggagcctttccccccagagggccccgcccagtgcagtcggtggtacctgagatggaggagtcgggagcacagctgctgctggaaatgctgacttttaacccacacaagcgaatctctgcctttcgagctctgcagcactcttatctacataaggatgaaggtaatccggagtgagcaatggagtggctgccatggaaggaagaaaagctgccatttcccttctggacactgagagggcaatctttgcctttatctctgaggctatggagggtcctcctccatctttctacagagattactttgctgccttaatgacattcccctcccacctctccttttgaggcttctccttctccttcccatttctctacactaaggggtatgttccctcttgtccctttccctacctttatatttggggtccttttttatacagg

SEQ ID NO: 3834 - protein, 111 aa, Homosapiens
MATSRYEPVAEIGVGAYGTVYKARDPHSGHFVALKSVRVPNGGGGGGGLPISTVREVALLRRLEAFEHPNVVRLMDVCATSRTDREIKRCFVESLSSVETLKPTSWAKSLT

SEQ ID NO: 3835 - DNA, 1478 bp, Homosapiens
cccagtcgaagcacctcctgtccgcccctcagcgcatgggtggcggtcacgtgcccagaacgtccggcgttcgccccgccctcccagtttccgcgcgcctctttggcagctggtcacatggtgagggtgggggtgagggggcctctctagcttgcggcctgtgtctatggtcgggccctctgcgtccagctgctccggaccgagctcgggtgtatggggccgtaggaaccggctccggggccccgataacgggccgcccccacagcaccccgggctggcgtgagggtctcccttgatctgagaatggctacctctcgatatgagccagtggctgaaattggtgtcggtgcctatgggacagtgtacaaggcccgtgatccccacagtggccactttgtggccctcaagagtgtgagagtccccaatggaggaggaggtggaggaggccttcccatcagcacagttcgtgaggtggctttactgaggcgactggaggcttttgagcatcccaatgttgtccggctgatggacgtctgtgccacatcccgaactgaccgggagatcaaggtaaccctggtgtttgagcatgtagaccaggacctaaggacatatctggacaaggcacccccaccaggcttgccagccgaaacgatcaaggatctgatgcgccagtttctaagaggcctagatttccttcatgccaattgcatcgttcaccgagatctgaagccagagaacattctggtgacaagtggtggaacagtcaagctggctgactttggcctggccagaatctacagctaccagatggcacttacacccgtggttgttacactctggtaccgagctcccgaagttcttctgcagtccacatatgcaacacctgtggacatgtggagtgttggctgtatctttgcagagatgtttcgtcgaaagcctctcttctgtggaaactctgaagccgaccagttgggcaaaatctttgacctgattgggctgcctccagaggatgactggcctcgagatgtatccctgccccgtggagcctttccccccagagggccccgcccagtgcagtcggtggtacctgagatggaggagtcgggagcacagctgctgctggaaatgctgacttttaacccacacaagcgaatctctgcctttcgagctctgcagcactcttatctacataaggatgaaggtaatccggagtgagcaatggagtggctgccatggaaggaagaaaagctgccatttcccttctggacactgagagggcaatctttgcctttatctctgaggctatggagggtcctcctccatctttctacagagattactttgctgccttaatgacattcccctcccacctctccttttgaggcttctccttctccttcccatttctctacactaaggggtatgttccctcttgtccctttccctacctttatatttggggtccttttttatacagg

SEQ ID NO: 3836 - protein, 303 aa, Homosapiens; identical to SEQ ID NO: 528

SEQ ID NO: 3837 - DNA, 1113 bp, Homosapiens
cacctcctgtccgcccctcagcgcatgggtggcggtcacgtgcccagaacgtccggcgttcgccccgccctcccagtttccgcgcgcctctttggcagctggtcacatggtgagggtgggggtgagggggcctctctagcttgcggcctgtgtctatggtcgggccctctgcgtccagctgctccggaccgagctcgggtgtatggggccgtaggaaccggctccggggccccgataacgggccgcccccacagcaccccgggctggcgtgagggtctcccttgatctgagaatggctacctctcgatatgagccagtggctgaaattggtgtcggtgcctatgggacagtgtacaaggcccgtgatccccacagtggccactttgtggccctcaagagtgtgagagtccccaatggaggaggaggtggaggaggccttcccatcagcacagttcgtgaggtggctttactgaggcgactggaggcttttgagcatcccaatgttgtccggctgatggacgtctgtgccacatcccgaactgaccgggagatcaaggtaaccctggtgtttgagcatgtagaccaggacctaaggacatatctggacaaggcacccccaccaggcttgccagccgaaacgatcaaggatctgatgcgccagtttctaagaggcctagatttccttcatgccaattgcatcgttcaccgagatctgaagccagagaacattctggtgacaagtggtggaacagtcaagctggctgactttggcctggccagaatctacagctaccagatggcacttacacccgtgaccagggcttgctgtgttgcccaggctggattgcaatggcatgatcacagctcactgcagcttcaacctcctgggctcaagtgatcctcccatctcagcttcccaactagctgacactacaggcctctcttctgtggaaactctgaagccgaccagttgggcaaaatctttgacctgattgggctgcctccagaggatgactggcctcgagatgtatccctgccccgtggagcctttccccccagagggccccgcccagtgcagtcggtggtacctgagatggaggagtcgggagcaca

SEQ ID NO: 3838 - protein, 201 aa, Homosapiens
MATSRYEPVAEIGVGAYGTVYKARDPHSGHFVALKSVRVPNGGGGGGGLPISTVREVALLRRLEAFEHPNVVRLMDVCATSRTDREIKVTLVFEHVDQDLRTYLDKAPPPGLPAETIKDLMRQFLRGLDFLHANCIVHRDLKPENILVTSGGTVKLADFGLARIYSYQMALTPVTRACCVAQAGLQWHDHSSLQLQPPGLK

SEQ ID NO: 3839 - DNA, 228 bp, Homosapiens
cgcgttcgtttcgcgagctggttatggaagggtcgctcaagggcgggaagtggggcctttgtggtcatgggaaagtataattttagggactgaggtgtaggatcttcgatgcaaggcatgtgtcatgtgtgatctttgtgcggggcgcgattgtcccaaaggaaaaagcgttttctattgcagggcctcacgtggctggagggggtctcccttgatctgagaatggct

SEQ ID NO: 3840 - protein, 31 aa, Homosapiens
MCDLCAGRDCPKGKSVFYCRASRGWRGSPLI

SEQ ID NO: 3841 - DNA, 1990 bp, Homosapiens
gaaggagccgccatttgccaccgccgagcgcacgggccgagccaagcctgatcccggagccggagggggactgggaccgagagaacggcgatggggggcggccccgccgcaggaggacccgggcgcgtaaccccgggggcccggcccgctccagacccagacccgcggggtgcggcaccctgagcccccctccccgccccctgccctggccatggccgcccaccccgccgcccccgggccgccagcccgctcggccccgcaagcaccggagccccggcggtggcagcagtgaacggctgtcgcaggccccgaagaccccggcccggctcggctctctagcgcgcgcccccttcccggccttgtcctctcccctccccccgccgctagcgagccccccttgcacgctgccccccgcccccggtgtccggacgatgctcaagtctcggctccgcatgtttctgaacgagctgaagctgctggtgctgacaggcggggggcggccccgggccgagccgcaaccccgggggggccggggaggcggctgcggctgggcgcccttcgctggctgctccacccgggacggcgacggcgacgaggaggagtactacgggtcggagccgcgggcccggggcctggccggcgacaaggagccgcgggccggacccctgccgccgcccgcgccgccgctgccgcccccgggcgcgctggacgccctgtcgctcagcagtagcctggacagcggactccgaacccctcagtgccggatctgcttccagggcccggagcagggggagctcttaagcccctgccgctgcgacggctcagtgcgctgcacgcatcagccctgcctcatccgctggatcagcgagaggggctcctggagctgtgagctctgctacttcaagtaccaggtcctggcgatcagcaccaagaacccactgcagtggcaggccatctccctgacggtcatcgagaaggtccagattgctgccatagttctgggctcgctcttcctggttgccagcatctcctggctcatctggtcctcactcagcccttcagccaagtggcaacgacaggatctgctctttcagatctgctacggcatgtatggcttcatggatgtcgtctgcataggcctcatcatccatgaaggctcctctgtctaccgcatcttcaagcgctggcaggcagtgaaccagcagtggaaggtcctaaattatgacaagaccaaggacataggaggagatgcagggggagggacggcagggaagtcaggccccaggaactcacggacgggccccacctctggggccacgagccgccccccagctgcccagcgcatgcggacgctcttgcctcagcgctgcggttatacaatcttgcacctccttgggcagctgcggccaccagatgcccgttccagctcccattctggccgagaggttgtcatgagggtcactacagtctgaactggactccaggagcagggatcttgagtcaatgcatcagtcagagaagaactctcatggctgctggaggtaccagctggacaaggtgtttggggcatgctgcccccgtcaccgaggatctgtgtgggtagcctcaagctggagacattgtctggcctcactgcccactgggtagagacacctggatgacatttcagtacccgctggcagctcctcccactcatccagagacggccggtgggcaggcggggagagcagctttccttccctggagagaaccgtctttacctcagctcctagggcctccagccccccagctccaccacggtgacttggtgaagggggaccaatgccagaagaaaggggctgtagacccctattccccaccccatggccacagggcatctggcaataagactagtatacattgacctcccgttccctgcatgagggcggggagttccccctgctccatcccccattgcatgggggaagggcataaagaatcatttatatgc

SEQ ID NO: 3842 - protein, 346 aa, Homosapiens; identical to SEQ ID NO: 530

SEQ ID NO: 3843 - DNA, 2738 bp, Homosapiens
cgctcggccccgcaagcaccggagccccggcggtggcagcagtgaacggctgtcgcaggccccgaagaccccggcccggctcggctctctagcgcgcgcccccttcccggccttgtcctctcccctccccccgccgctagcgagccccccttgcacgctgccccccgcccccggtgtccggacgatgctcaagtctcggctccgcatgtttctgaacgagctgaagctgctggtgctgacaggcggggggcggccccgggccgagccgcaaccccgggggggccggggaggcggctgcggctgggcgcccttcgctggctgctccacccgggacggcgacggcgacgaggaggagtactacgggtcggagccgcgggcccggggcctggccggcgacaaggagccgcgggccggacccctgccgccgcccgcgccgccgctgccgcccccgggcgcgctggacgccctgtcgctcagcagtagcctggacagcggactccgaacccctcagtgccggatctgcttccagggcccggagcagggggagctcttaagcccctgccgctgcgacggctcagtgcgctgcacgcatcagccctgcctcatccgctggatcagcgagaggggctcctggagctgtgagctctgctacttcaagtaccaggtcctggcgatcagcaccaagaacccactgcagtggcaggccatctccctgacggtcatcgagaaggtccagattgctgccatagttctgggctcgctcttcctggttgccagcatctcctggctcatctggtcctcactcagcccttcagccaagtggcaacgacaggatctgctctttcagatctgctacggcatgtatggcttcatggatgtcgtctgcataggcctcatcatccatgaaggctcctctgtctaccgcatcttcaagcgctggcaggcagtgaaccagcagtggaaggtcctaaattatgacaagaccaaggacataggaggagatgcagggggagggacggcagggaagtcaggccccaggaactcacggacgggccccacctctggggccacgagccgccccccagctgcccagcgcatgcggacgctcttgcctcagcgctgcggttatacaatcttgcacctccttgggcagctgcggccaccagatgcccgttccagctcccattctggccgagaggttgtcatgagggtcactacagtctgaactggactccaggagcagggatcttgagtcaatgcatcagtcagagaagaactctcatggctgctggaggtaccagctggacaaggtgtttggggcatgctgcccccgtcaccgaggatctgtgtgggtagcctcaagctggagacattgtctggcctcactgcccactgggtagagacacctggatgacatttcagtacccgctggcagctcctcccactcatccagagacggccggtgggcaggcggggagagcagctttccttccctggagagaaccgtctttacctcagctcctagggcctccagccccccagctccaccacggtgacttggtgaagggggaccaatgccagaagaaaggggctgtagacccctattccccaccccatggccacagggcatctggcaataagactagtatacattgacctcccgttccctgcatgagggcggggagttccccctgctccatcccccattgcatgggggaagggcataaagaatcatttatatgcacgtggagactcctttctcatctggggcttttctggagggttgggagatgtggggaggtttctctgcacaggttgcaaatcccaaatgcagcagtgggttctgagttgtaggtgtgactcccacttgctggtgaataattcatgttggctgctaggtggcagcactccgaggtatctaaagggtagacctggacctgccacctatgagttgtgtgatatagaaaaaaatctcttagctctggttttcctgtctacttcatagggttggaataaggataaatgagggacaggttggatgccgttgcagagaaaatcagcaatgacataaagagatttctagaatagttgatggtccatttatttcaaatagtagctggtgtaacaaattctaaaatgtgtttttcatctggagttgcacagaatcatggaattttgtgttgagtgacataataggtatggaaatatgaggggaaatagacattgcaaatgtgaagcatggtggttatttgttaagaatgagaactcctctgactctaaatatttgggcctgtgggctggggaaggctggagccatctgccttgttctggagatcatctgggttctatcagtccttctcaagtactgtgctcacccagaaaagcagtgtgaagtgaatttggactcatttggagtgagatggagggaatccccccactcagtgttatgagtctccaaccccagtttaagctatttccatggcagtttagggtcacaggtttgatcccggtgtgcccagccagtggtattaatggatggcattatgtttggaggcagcagcatagaggactgttgtttatagagaaaagatttgggaaggactgtttacaatgtgggtcagcctgaagcctgggcactttcttctgtgaccttggggttgtgtattatatgaatgatgctgtttttaagtaaaccattcaacagcaattaaataattccttcattcacggctaaagtc

SEQ ID NO: 3844 - protein, 346 aa, Homosapiens; identical to SEQ ID NO: 530

SEQ ID NO: 3845 - DNA, 1476 bp, Homosapiens
tgatgttgatgatgatagcaaatatgtagtgttttctgtgtcaagttttggtgtgtattaactcttaatcttcacaataatcttattagatactattattatccccttttacaaacgaggacactgatgcacaaagatttgaaaacttacccaaggttacttagccagtaagtgatggagtcaagatttaggattcaaatctagatgttttggtttcagagcacttgcccaatcctgcctttctaaagtaagacaaatggtgtcagacaagtgccacattctagatttaatcaaggcacagagaagacagatgttgatcctgcctgaaggttttagggaaggttcctggagcaccctgctcttcagggccacccatcacctggccctccatccctttctgggactctttggagccctttctcccacacagtggcaggccatctccctgacggtcatcgagaaggtccagattgctgccatagttctgggctcgctcttcctggttgccagcatctcctggctcatctggtcctcactcagcccttcagccaagtggcaacgacaggatctgctctttcagatctgctacggcatgtatggcttcatggatgtcgtctgcataggcctcatcatccatgaaggctcctctgtctaccgcatcttcaagcgctggcaggcagtgaaccagcagtggaaggtcctaaattatgacaagaccaaggacataggaggagatgcagggggagggacggcagggaagtcaggccccaggaactcacggacgggccccacctctggggccacgagccgccccccagctgcccagcgcatgcggacgctcttgcctcagcgctgcggttatacaatcttgcacctccttgggcagctgcggccaccagatgcccgttccagctcccattctggccgagaggttgtcatgagggtcactacagtctgaactggactccaggagcagggatcttgagtcaatgcatcagtcagagaagaactctcatggctgctggaggtaccagctggacaaggtgtttggggcatgctgcccccgtcaccgaggatctgtgtgggtagcctcaagctggagacattgtctggcctcactgcccactgggtagagacacctggatgacatttcagtacccgctggcagctcctcccactcatccagagacggccggtgggcaggcggggagagcagctttccttccctggagagaaccgtctttacctcagctcctagggcctccagccccccagctccaccacggtgacttggtgaagggggaccaatgccagaagaaaggggctgtagacccctattccccaccccatggccacagggcatctggcaataagactagtatacattgacctcccgttccctgcatgagggcggggagttccccctgctccatcccccattgcatgggggaagggcataaagaatcatttatatgc

SEQ ID NO: 3846 - protein, 233 aa, Homosapiens
MVSDKCHILDLIKAQRRQMLILPEGFREGSWSTLLFRATHHLALHPFLGLFGALSPTQWQAISLTVIEKVQIAAIVLGSLFLVASISWLIWSSLSPSAKWQRQDLLFQICYGMYGFMDVVCIGLIIHEGSSVYRIFKRWQAVNQQWKVLNYDKTKDIGGDAGGGTAGKSGPRNSRTGPTSGATSRPPAAQRMRTLLPQRCGYTILHLLGQLRPPDARSSSHSGREVVMRVTTV

SEQ ID NO: 3847 - DNA, 2471 bp, Homosapiens
tgatgttgatgatgatagcaaatatgtagtgttttctgtgtcaagttttggtgtgtattaactcttaatcttcacaataatcttattagatactattattatccccttttacaaacgaggacactgatgcacaaagatttgaaaacttacccaaggttacttagccagtaagtgatggagtcaagatttaggattcaaatctagatgttttggtttcagagcacttgcccaatcctgcctttctaaagtaagacaaatggtgtcagacaagtgccacattctagatttaatcaaggcacagagaagacagatgttgatcctgcctgaaggttttagggaaggttcctggagcaccctgctcttcagggccacccatcacctggccctccatccctttctgggactctttggagccctttctcccacacagtggcaggccatctccctgacggtcatcgagaaggtccagattgctgccatagttctgggctcgctcttcctggttgccagcatctcctggctcatctggtcctcactcagcccttcagccaagtggcaacgacaggatctgctctttcagatctgctacggcatgtatggcttcatggatgtcgtctgcataggcctcatcatccatgaaggctcctctgtctaccgcatcttcaagcgctggcaggcagtgaaccagcagtggaaggtcctaaattatgacaagaccaaggacataggaggagatgcagggggagggacggcagggaagtcaggccccaggaactcacggacgggccccacctctggggccacgagccgccccccagctgcccagcgcatgcggacgctcttgcctcagcgctgcggttatacaatcttgcacctccttgggcagctgcggccaccagatgcccgttccagctcccattctggccgagaggttgtcatgagggtcactacagtctgaactggactccaggagcagggatcttgagtcaatgcatcagtcagagaagaactctcatggctgctggaggtaccagctggacaaggtgtttggggcatgctgcccccgtcaccgaggatctgtgtgggtagcctcaagctggagacattgtctggcctcactgcccactgggtagagacacctggatgacatttcagtacccgctggcagctcctcccactcatccagagacggccggtgggcaggcggggagagcagctttccttccctggagagaaccgtctttacctcagctcctagggcctccagccccccagctccaccacggtgacttggtgaagggggaccaatgccagaagaaaggggctgtagacccctattccccaccccatggccacagggcatctggcaataagactagtatacattgacctcccgttccctgcatgagggcggggagttccccctgctccatcccccattgcatgggggaagggcataaagaatcatttatatgcacgtggagactcctttctcatctggggcttttctggagggttgggagatgtggggaggtttctctgcacaggttgcaaatcccaaatgcagcagtgggttctgagttgtaggtgtgactcccacttgctggtgaataattcatgttggctgctaggtggcagcactccgaggtatctaaagggtagacctggacctgccacctatgagttgtgtgatatagaaaaaaatctcttagctctggttttcctgtctacttcatagggttggaataaggataaatgagggacaggttggatgccgttgcagagaaaatcagcaatgacataaagagatttctagaatagttgatggtccatttatttcaaatagtagctggtgtaacaaattctaaaatgtgtttttcatctggagttgcacagaatcatggaattttgtgttgagtgacataataggtatggaaatatgaggggaaatagacattgcaaatgtgaagcatggtggttatttgttaagaatgagaactcctctgactctaaatatttgggcctgtgggctggggaaggctggagccatctgccttgttctggagatcatctgggttctatcagtccttctcaagtactgtgctcacccagaaaagcagtgtgaagtgaatttggactcatttggagtgagatggagggaatccccccactcagtgttatgagtctccaaccccagtttaagctatttccatggcagtttagggtcacaggtttgatcccggtgtgcccagccagtggtattaatggatggcattatgtttggaggcagcagcatagaggactgttgtttatagagaaaagatttgggaaggactgtttacaatgtgggtcagcctgaagcctgggcactttcttctgtgaccttggggttgtgtattatatgaatgatgctgtttttaagtaaaccattcaacagcaattaaataattccttcattcacggctaaagtc

SEQ ID NO: 3848 - protein, 233 aa, Homosapiens; identical to SEQ ID NO: 3846

SEQ ID NO: 3849 - DNA, 2875 bp, Homosapiens
ggtacaggaggagggggaggtgtggctagtgcaggaaaataatgcagagaagatacaacccactaagccaagaatgtggggacagttacagctgtgcctcccctgcttcccttcctggaggagctgaaagatggggaattcctgaggatgggcctaaaggggctgggctcactggtagaagtgggaatatcagagactgactagtgtagcttggtcacctagtccctactaaaaagccttatagcctttcctaggatgagactttgaggctcctagacaaaggcactctcccaggaggaaaatcttaggccctccctcccatgagggtcattgcaacatgagacccaagggagttgtgaagtcagccccagccccgcctactgttcctgggtgctaatccccagcacagaccactcaggaggagggattggctgaggagcttggagagggggcgtcatcacctcacccaaaggttaaataggggttgagatatgatgctcaggagaagcgctttctttcgcgagcaccctgaaccagaccatgacccagaccctcaagtacgcctccagagtgttccatcgcgtccgctgggcgcccgagttgggcgcctccctaggctaccgagagtaccactcagcacgccggagcttggcagacatcccaggcccctctacgcccagctttctggccgaacttttctgcaagggggggctgtcgaggctacacgagctgcaggtgcagggcgccgcgcacttcgggccggtgtggctagccagctttgggacagtgcgcaccgtgtacgtggctgcccctgcactcgtcgaggagctgctgcgacaggagggaccccggcccgagcgctgcagcttctcgccctggacggagcaccgccgctgccgccagcgggcttgcggactgctcactgcggaaggcgaagaatggcaaaggctccgcagtctcctggccccgctcctcctccggcctcaagcggccgcccgctacgccggaaccctgaacaacgtagtctgcgaccttgtgcggcgtctgaggcgccagcggggacgtggcacggggccgcccgccctggttcgggacgtggcgggggaattttacaagttcggactggaaggcatcgccgcggttctgctcggctcgcgcttgggctgcctggaggctcaagtgccacccgacacggagaccttcatccgcgctgtgggctcggtgtttgtgtccacgctgttgaccatggcgatgccccactggctgcgccaccttgtgcctgggccctggggccgcctctgccgagactgggaccagatgtttgcatttgctcagaggcacgtggagcggcgagaggcagaggcagccatgaggaacggaggacagcccgagaaggacctggagtctggggcgcacctgacccacttcctgttccgggaagagttgcctgcccagtccatcctgggaaatgtgacagagttgctattggcgggagtggacacggtgtccaacacgctctcttgggctctgtatgagctctcccggcaccccgaagtccagacagcactccactcagagatcacagctgccctgagccctggctccagtgcctacccctcagccactgttctgtcccagctgcccctgctgaaggcggtggtcaaggaagtgctaagactgtaccctgtggtacctggaaattctcgtgtcccagacaaagacattcatgtgggtgactatattatccccaaaaatacgctggtcactctgtgtcactatgccacttcaagggaccctgcccagttcccagagccaaattcttttcgtccagctcgctggctgggggagggtcccaccccccacccatttgcatctcttccctttggctttggcaagcgcagctgtatggggagacgcctggcagagcttgaattgcaaatggctttggcccagatcctaacacattttgaggtgcagcctgagccaggtgcggccccagttagacccaagacccggactgtcctggtacctgaaaggagcatcaacctacagtttttggacagatagtcccatggaaagagactgtcatcatcaccctttcattcatcatagggataagattttttgtaggcacaagaccaaggtatacatcttcccctaatgcctatctgaccaaactggatagaaccaccatagtgaagtgtgaggcggccctgaccaatgtgtgaagtatgcacttggcctgactcaggaagccaggtgagaaaaccatggtctctctgcttgcttggcccttctgatcatgtatgcatcccccaaggatgaaatcagattttaactaataatgctggatggcctgaggaaagattcaactgcctctctttttgggctttcatagtgttcattgatgctgctggctaagcatttatcaaagcataagctcagtaactgtgcatctggtctgtacctggttggtccttcgtctttgcatgtaagctctttgagaggaagggtgaagccttatttgttttttatgtcccctgccagggcctgtctctgactaggtgtcaccatacacattcttagattgaatctgaaccatgtggcagaagggataagcagcttacttagtaggctctgtctacccccttccttctttgtcttgcccctaggaaggtgaatctgccctagcctggtttacggtttcttataactctcctttgctctctggccactattaagtgggtttgccccatcacttagttctcaggcagagacatctttgggcctgtccctgcccaggcctctggctttttatattgaaaatttttaaatattcacaaattttagaataaatcaaatattccattcttga

SEQ ID NO: 3850 - protein, 508 aa, Homosapiens; identical to SEQ ID NO: 532

SEQ ID NO: 3851 - DNA, 2960 bp, Homosapiens
ggtacaggaggagggggaggtgtggctagtgcaggaaaataatgcagagaagatacaacccactaagccaagaatgtggggacagttacagctgtgcctcccctgcttcccttcctggaggagctgaaagatggggaattcctgaggatgggcctaaaggggctgggctcactggtagaagtgggaatatcagagactgactagtgtagcttggtcacctagtccctactaaaaagccttatagcctttcctaggatgagactttgaggctcctagacaaaggcactctcccaggaggaaaatcttaggccctccctcccatgagggtcattgcaacatgagacccaagggagttgtgaagtcagccccagccccgcctactgttcctgggtgctaatccccagcacagaccactcaggaggagggattggctgaggagcttggagagggggcgtcatcacctcacccaaaggttaaataggggttgagatatgatgctcaggagaagcgctttctttcgcgagcaccctgaaccagaccatgacccagaccctcaagtacgcctccagagtgttccatcgcgtccgctgggcgcccgagttgggcgcctccctaggctaccgagagtaccactcagcacgccggagcttggcagacatcccaggcccctctacgcccagctttctggccgaacttttctgcaagggggggctgtcgaggctacacgagctgcaggtgcagggcgccgcgcacttcgggccggtgtggctagccagctttgggacagtgcgcaccgtgtacgtggctgcccctgcactcgtcgaggagctgctgcgacaggagggaccccggcccgagcgctgcagcttctcgccctggacggagcaccgccgctgccgccagcgggcttgcggactgctcactgcggaaggcgaagaatggcaaaggctccgcagtctcctggccccgctcctcctccggcctcaagcggccgcccgctacgccggaaccctgaacaacgtagtctgcgaccttgtgcggcgtctgaggcgccagcggggacgtggcacggggccgcccgccctggttcgggacgtggcgggggaattttacaagttcggactggaaggtgagtcccaggacagagctgggcaggcgtcgggggcgccctaccagagcctcccggaaccctgacggcgccccctcccgacaaggcatcgccgcggttctgctcggctcgcgcttgggctgcctggaggctcaagtgccacccgacacggagaccttcatccgcgctgtgggctcggtgtttgtgtccacgctgttgaccatggcgatgccccactggctgcgccaccttgtgcctgggccctggggccgcctctgccgagactgggaccagatgtttgcatttgctcagaggcacgtggagcggcgagaggcagaggcagccatgaggaacggaggacagcccgagaaggacctggagtctggggcgcacctgacccacttcctgttccgggaagagttgcctgcccagtccatcctgggaaatgtgacagagttgctattggcgggagtggacacggtgtccaacacgctctcttgggctctgtatgagctctcccggcaccccgaagtccagacagcactccactcagagatcacagctgccctgagccctggctccagtgcctacccctcagccactgttctgtcccagctgcccctgctgaaggcggtggtcaaggaagtgctaagactgtaccctgtggtacctggaaattctcgtgtcccagacaaagacattcatgtgggtgactatattatccccaaaaatacgctggtcactctgtgtcactatgccacttcaagggaccctgcccagttcccagagccaaattcttttcgtccagctcgctggctgggggagggtcccaccccccacccatttgcatctcttccctttggctttggcaagcgcagctgtatggggagacgcctggcagagcttgaattgcaaatggctttggcccagatcctaacacattttgaggtgcagcctgagccaggtgcggccccagttagacccaagacccggactgtcctggtacctgaaaggagcatcaacctacagtttttggacagatagtcccatggaaagagactgtcatcatcaccctttcattcatcatagggataagattttttgtaggcacaagaccaaggtatacatcttcccctaatgcctatctgaccaaactggatagaaccaccatagtgaagtgtgaggcggccctgaccaatgtgtgaagtatgcacttggcctgactcaggaagccaggtgagaaaaccatggtctctctgcttgcttggcccttctgatcatgtatgcatcccccaaggatgaaatcagattttaactaataatgctggatggcctgaggaaagattcaactgcctctctttttgggctttcatagtgttcattgatgctgctggctaagcatttatcaaagcataagctcagtaactgtgcatctggtctgtacctggttggtccttcgtctttgcatgtaagctctttgagaggaagggtgaagccttatttgttttttatgtcccctgccagggcctgtctctgactaggtgtcaccatacacattcttagattgaatctgaaccatgtggcagaagggataagcagcttacttagtaggctctgtctacccccttccttctttgtcttgcccctaggaaggtgaatctgccctagcctggtttacggtttcttataactctcctttgctctctggccactattaagtgggtttgccccatcacttagttctcaggcagagacatctttgggcctgtccctgcccaggcctctggctttttatattgaaaatttttaaatattcacaaattttagaataaatcaaatattccattcttga

SEQ ID NO: 3852 - protein, 273 aa, Homosapiens
MAMPHWLRHLVPGPWGRLCRDWDQMFAFAQRHVERREAEAAMRNGGQPEKDLESGAHLTHFLFREELPAQSILGNVTELLLAGVDTVSNTLSWALYELSRHPEVQTALHSEITAALSPGSSAYPSATVLSQLPLLKAVVKEVLRLYPVVPGNSRVPDKDIHVGDYIIPKNTLVTLCHYATSRDPAQFPEPNSFRPARWLGEGPTPHPFASLPFGFGKRSCMGRRLAELELQMALAQILTHFEVQPEPGAAPVRPKTRTVLVPERSINLQFLDR

SEQ ID NO: 3853 - DNA, 454 bp, Homosapiens
ttgcccatcacactcaaactttctagggatgggaaatgagagaggaggagtttgcagtatcaaaggcatacactagttgggcacccgagaaagagcagaagctccctattcccaagcccagtcaacgcccttggcgtgggcacaggtcaagctgaaagtccccgcccaggtatccaagtgtccgctgtgtccgctcccccaggtgcagggcgccgcgcacttcgggccggtgtggctagccagctttgggacagtgcgcaccgtgtacgtggctgcccctgcactcgtcgaggagctgctgcgacaggagggaccccggcccgagcgctgcagcttctcgccctggacggagcaccgccgctgccgccagcgggcttgcggactgctcactgcggaaggcgaagaatggcaaaggctccgcagtctcctggccccgctcctcctccggcctcaa

SEQ ID NO: 3854 - protein, 39 aa, Homosapiens
MREEEFAVSKAYTSWAPEKEQKLPIPKPSQRPWRGHRSS

SEQ ID NO: 3855 - DNA, 1528 bp, Homosapiens
ggcctgcgcctccacgtggatttggtagagaaaccccggactgggatcatggcagccgagactcggaacgtggccggagcagaggccccaccgccccagaagcgctactaccggcaacgtgctcactccaaccccatggcggaccacacgctgcgctaagcacaaacacaaagtaggatcccagtgcattaggcagccagtctcgggagaaggggaacttgtgccccagaaagggcagttacccggccagggtcacatcaaccgccagaagtggagttgggcagccctgtgaagccagaggagatggactggtctgagctatacccagagttcttcgctccactcactcaaaatcagagccacgatgacccaaaggataagaaagaaaagagagctcaggcccaagtggagtttgcagacataggctgtggctatggtggcctgttagtggaactgtcaccgctgttcccagacacacttattctgggtctggagatccgggtgaaggtctcagactatgtacaagaccggattcgggccctacgcgcagctcctgcaggtggcttccagaacatcgcctgtctccgtagcaatgccatgaagcaccttcctaacttcttctacaagggccagctgacaaagatgttcttcctcttccccgacccacatttcaagcggacaaagcacaagtggcgaatcatcagtcccaccctgctagcagaatatgcctacgtgctaagagttggggggctggtgtataccataaccgatgtgctggagctacacgactggatgtgcactcatttcgaagagcacccactgtttgagcgtgtgcctctggaggacctgagtgaagaccccgttgtgggacatctaggcacctcaactgaggaggggaagaaagttctacgtaatggagggaagaatttcccagccatcttccgaagaatacaagatcccgtcctccaggcagtgacctcccaaaccagcctgcctggtcactgactgcttactctaccttagctggacctcgtctcccagggattagagaaaagagcaggagtcctgggtcttcccagttgagactgctggagctgagacacagtactctcttaaagaaggtggggagctgcccagggcagaacccactggtgttcatgactacccctggctcctctcaccttgtccctccactgccaacagaaaacaaagcagctgactgagatggtcaaaggactttggaccataggggatctttggaaggctgtggggtcttgctcttccttagcactcctttctccttgtgagatctctcctcagctggaatgaggaatgtagtccatctaaactgcttgctaggctcaattaccacttctgtttgctttgtggatcctgggataacatgtatatgtgtacacatgcctattctgccatttctcaggaaagggtggagtatgtatcatatgccttctaccatcctcctgtcctctccctgcgtaagacttgacctggggaatctgtgttccct

SEQ ID NO: 3856 - protein, 233 aa, Homosapiens
MDWSELYPEFFAPLTQNQSHDDPKDKKEKRAQAQVEFADIGCGYGGLLVELSPLFPDTLILGLEIRVKVSDYVQDRIRALRAAPAGGFQNIACLRSNAMKHLPNFFYKGQLTKMFFLFPDPHFKRTKHKWRIISPTLLAEYAYVLRVGGLVYTITDVLELHDWMCTHFEEHPLFERVPLEDLSEDPVVGHLGTSTEEGKKVLRNGGKNFPAIFRRIQDPVLQAVTSQTSLPGH

SEQ ID NO: 3857 - DNA, 1558 bp, Homosapiens
ccgagaccaggagtaaggggacaggagcgaggactgatgccactgtagaaggcgaggtctctagacccctctcacctgtggggtgcacaggtgcctgcaaccaggatggtaacccagaccaggcagaagcaagctaagagaaaacgttgggtccctgggcctggcctcgccctcccagttggaggctaacggtgcggaggttccctccagcactcgctccttacagccctccccacctagcccagcccagcccagcccagcccagctgaatttgctcttgggtctttaaggggcgggaactgccaccaacgcgcatggctgcgtcattaacttgcgcctctggcctgcgcctccacgtggatttggtagagaaaccccggactgggatcatggcagccgagactcggaacgtggccggagcagaggccccaccgccccagaagcgctactaccggcaacgtgctcactccaaccccatggcggaccacacgctgcgctaccctgtgaagccagaggagatggactggtctgagctatacccagagttcttcgctccactcactcaaaatcagagccacgatgacccaaaggataagaaagaaaagagagctcaggcccaagtggagtttgcagacataggctgtggctatggtggcctgttagctgacaaagatgttcttcctcttccccgacccacatttcaagcggacaaagcacaagtggcgaatcatcagtcccaccctgctagcagaatatgcctacgtgctaagagttggggggctggtgtataccataaccgatgtgctggagctacacgactggatgtgcactcatttcgaagagcacccactgtttgagcgtgtgcctctggaggacctgagtgaagaccccgttgtgggacatctaggcacctcaactgaggaggggaagaaagttctacgtaatggagggaagaatttcccagccatcttccgaagaatacaagatcccgtcctccaggcagtgacctcccaaaccagcctgcctggtcactgactgcttactctaccttagctggacctcgtctcccagggattagagaaaagagcaggagtcctgggtcttcccagttgagactgctggagctgagacacagtactctcttaaagaaggtggggagctgcccagggcagaacccactggtgttcatgactacccctggctcctctcaccttgtccctccactgccaacagaaaacaaagcagctgactgagatggtcaaaggactttggaccataggggatctttggaaggctgtggggtcttgctcttccttagcactcctttctccttgtgagatctctcctcagctggaatgaggaatgtagtccatctaaactgcttgctaggctcaattaccacttctgtttgctttgtggatcctgggataacatgtatatgtgtacacatgcctattctgccatttctcaggaaagggtggagtatgtatcatatgccttctaccatcctcctgtcctctccctgcgtaagacttgacctggggaatctgtgttccct

SEQ ID NO: 3858 - protein, 180 aa, Homosapiens
MAASLTCASGLRLHVDLVEKPRTGIMAAETRNVAGAEAPPPQKRYYRQRAHSNPMADHTLRYPVKPEEMDWSELYPEFFAPLTQNQSHDDPKDKKEKRAQAQVEFADIGCGYGGLLADKDVLPLPRPTFQADKAQVANHQSHPASRICLRAKSWGAGVYHNRCAGATRLDVHSFRRAPTV

SEQ ID NO: 3859 - DNA, 1823 bp, Homosapiens
ctgcccctcccgccccggccccgagcgcacactcgacgaaacccacacgggaccacaagagtcagaccgggcggactggtccgagaccaggagtaaggggacaggagcgaggactgatgccactgtagaaggcgaggtctctagacccctctcacctgtggggtgcacaggtgcctgcaaccaggatggtaacccagaccaggcagaagcaagctaagagaaaacgttgggtccctgggcctggcctcgccctcccagttggaggctaacggtgcggaggttccctccagcactcgctccttacagccctccccacctagcccagcccagcccagcccagcccagctgaatttgctcttgggtctttaaggggcgggaactgccaccaacgcgcatggctgcgtcattaacttgcgcctctggcctgcgcctccacgtggatttggtagagaaaccccggactgggatcatggcagccgagactcggaacgtggccggagcagaggccccaccgccccagaagcgctactaccggcaacgtgctcactccaaccccatggcggaccacacgctgcgctaccctgtgaagccagaggagatggactggtctgagctatacccagagttcttcgctccactcactcaaaatcagagccacgatgacccaaaggataagaaagaaaagagagctcaggcccaagtggagtttgcagacataggctgtggctatggtggcctgttagtggaactgtcaccgctgttcccagacacacttattctgggtctggagatccgggtgaaggtctcagactatgtacaagaccggattcgggccctacgcgcagctcctgcaggtggcttccagaacatcgcctgtctccgtagcaatgccatgaagcaccttcctaacttcttctacaagggccagctgacaaagatgttcttcctcttccccgacccacatttcaagcggacaaagcacaagtggcgaatcatcagtcccaccctgctagcagaatatgcctacgtgctaagagttggggggctggtgtataccataaccgatgtgctggagctacacgactggatgtgcactcatttcgaagagcacccactgtttgagcgtgtgcctctggaggacctgagtgaagaccccgttgtgggacatctaggcacctcaactgaggaggggaagaaagttctacgtaatggagggaagaatttcccagccatcttccgaagaatacaagatcccgtcctccaggcagtgacctcccaaaccagcctgcctggtcactgactgcttactctaccttagctggacctcgtctcccagggattagagaaaagagcaggagtcctgggtcttcccagttgagactgctggagctgagacacagtactctcttaaagaaggtggggagctgcccagggcagaacccactggtgttcatgactacccctggctcctctcaccttgtccctccactgccaacagaaaacaaagcagctgactgagatggtcaaaggactttggaccataggggatctttggaaggctgtggggtcttgctcttccttagcactcctttctccttgtgagatctctcctcagctggaatgaggaatgtagtccatctaaactgcttgctaggctcaattaccacttctgtttgctttgtggatcctgggataacatgtatatgtgtacacatgcctattctgccatttctcaggaaagggtggagtatgtatcatatgccttctaccatcctcctgtcctctccctgcgtaagacttgacctggggaatctgtgttccct

SEQ ID NO: 3860 - protein, 301 aa, Homosapiens
MAASLTCASGLRLHVDLVEKPRTGIMAAETRNVAGAEAPPPQKRYYRQRAHSNPMADHTLRYPVKPEEMDWSELYPEFFAPLTQNQSHDDPKDKKEKRAQAQVEFADIGCGYGGLLVELSPLFPDTLILGLEIRVKVSDYVQDRIRALRAAPAGGFQNIACLRSNAMKHLPNFFYKGQLTKMFFLFPDPHFKRTKHKWRIISPTLLAEYAYVLRVGGLVYTITDVLELHDWMCTHFEEHPLFERVPLEDLSEDPVVGHLGTSTEEGKKVLRNGGKNFPAIFRRIQDPVLQAVTSQTSLPGH

SEQ ID NO: 3861 - DNA, 1194 bp, Homosapiens
aaaccccggactgggatcatggcagccgagactcggaacgtggccggagcagaggccccaccgccccagaagcgctactaccggcaacgtgctcactccaaccccatggcggaccacacgctgcgctatggaactgtcaccgctgttcccagacacacttattctgggtctggagatccgggtgaaggtctcagactatgtacaagaccggattcgggccctacgcgcagctcctgcaggtggcttccagaacatcgcctgtctccgtagcaatgccatgaagcaccttcctaacttcttctacaagggccagctgacaaagatgttcttcctcttccccgacccacatttcaagcggacaaagcacaagtggcgaatcatcagtcccaccctgctagcagaatatgcctacgtgctaagagttggggggctggtgtataccataaccgatgtgctggagctacacgactggatgtgcactcatttcgaagagcacccactgtttgagcgtgtgcctctggaggacctgagtgaagaccccgttgtgggacatctaggcacctcaactgaggaggggaagaaagttctacgtaatggagggaagaatttcccagccatcttccgaagaatacaagatcccgtcctccaggcagtgacctcccaaaccagcctgcctggtcactgactgcttactctaccttagctggacctcgtctcccagggattagagaaaagagcaggagtcctgggtcttcccagttgagactgctggagctgagacacagtactctcttaaagaaggtggggagctgcccagggcagaacccactggtgttcatgactacccctggctcctctcaccttgtccctccactgccaacagaaaacaaagcagctgactgagatggtcaaaggactttggaccataggggatctttggaaggctgtggggtcttgctcttccttagcactcctttctccttgtgagatctctcctcagctggaatgaggaatgtagtccatctaaactgcttgctaggctcaattaccacttctgtttgctttgtggatcctgggataacatgtatatgtgtacacatgcctattctgccatttctcaggaaagggtggagtatgtatcatatgccttctaccatcctcctgtcctctccctgcgtaagacttgacctgggg

SEQ ID NO: 3862 - protein, 185 aa, Homosapiens
MELSPLFPDTLILGLEIRVKVSDYVQDRIRALRAAPAGGFQNIACLRSNAMKHLPNFFYKGQLTKMFFLFPDPHFKRTKHKWRIISPTLLAEYAYVLRVGGLVYTITDVLELHDWMCTHFEEHPLFERVPLEDLSEDPVVGHLGTSTEEGKKVLRNGGKNFPAIFRRIQDPVLQAVTSQTSLPGH

SEQ ID NO: 3863 - DNA, 1098 bp, Homosapiens
aaaccccggactgggatcatggcagccgagactcggaacgtggccggagcagaggccccaccgccccagaagcgctactaccggcaacgtgctcactccaaccccatggcggaccacacgctgcgctatggaactgtcaccgctgttcccagacacacttattctgggtctggagatccgggtgaaggtctcagactatgtacaagaccggattcgggccctacgcgcagctcctgcaggtggcttccagaacatcgcctgtctccgtagcaatgccatgaagcaccttcctaacttcttctacaagggccagctgacaaagatgttcttcctcttccccgacccacatttcaagcggacaaagcacaagtggcgaatcatcagtcccaccctgctagcagaatatgcctacgtgctaagagttggggggctggtgtataccataaccgatgtgctggagctacacgactggatgtgcactcatttcgaagagcacccactgtttgagcgtgtgcctctggaggacctgagtgaagaccccgttgtgggacatctaggcacctcaactgaggaggggaagaaagttctacgtaatggagggaagaatttcccagccatcttccgaagaatacaagatcccgtcctccaggcagtgacctcccaaaccagcctgcctggtcactgactgcttactctaccttagctggacctcgtctcccagggattagagaaaagagcaggagtcctgggtcttcccagttgagactgctggagctgagacacagtactctcttaaagaaggtggggagctgcccagggcagaacccactggtgttcatgactacccctggctcctctcaccttgtccctccactgccaacagaaaacaaagcagctgactgagatggtcaaaggactttggaccataggggatctttggaaggctgtggggtcttgctcttccttagcactcctttctccttgtgagatctctcctcagctggaatgaggaatgtagtccatctaaactgcttgctaggctcaattaccacttctgtttgctttgtggatcctgggataacatgtatatgtgtacac

SEQ ID NO: 3864 - protein, 185 aa, Homosapiens; identical to SEQ ID NO: 3862

SEQ ID NO: 3865 - DNA, 1448 bp, Homosapiens
ccgagaccaggagtaaggggacaggagcgaggactgatgccactgtagaaggcgaggtctctagacccctctcacctgtggggtgcacaggtgcctgcaaccaggatggtaacccagaccaggcagaagcaagctaagagaaaacgttgggtccctgggcctggcctcgccctcccagttggaggctaacggtgcggaggttccctccagcactcgctccttacagccctccccacctagcccagcccagcccagcccagcccagctgaatttgctcttgggtctttaaggggcgggaactgccaccaacgcgcatggctgcgtcattaacttgcgcctctggcctgcgcctccacgtggatttggtagagaaaccccggactgggatcatggcagccgagactcggaacgtggccggagcagaggccccaccgccccagaagcgctactaccggcaacgtgctcactccaaccccatggcggaccacacgctgcgctaccctgtgaagccagaggagatggactggtctgagctatacccagagttcttcgctccactcactcaaaatcagagccacgatgacccaaaggataagaaagaaaagagagctcaggcccaagtggagtttgcagacataggctgtggctatggtggcctgttagctgacaaagatgttcttcctcttccccgacccacatttcaagcggacaaagcacaagtggcgaatcatcagtcccaccctgctagcagaatatgcctacgtgctaagagttggggggctggtgtataccataaccgatgtgctggagctacacgactggatgtgcactcatttcgaagagcacccactgtttgagcgtgtgcctctggaggacctgagtgaagaccccgttgtgggacatctaggcacctcaactgaggaggggaagaaagttctacgtaatggagggaagaatttcccagccatcttccgaagaatacaagatcccgtcctccaggcagtgacctcccaaaccagcctgcctggtcactgactgcttactctaccttagctggacctcgtctcccagggattagagaaaagagcaggagtcctgggtcttcccagttgagactgctggagctgagacacagtactctcttaaagaaggtggggagctgcccagggcagaacccactggtgttcatgactacccctggctcctctcaccttgtccctccactgccaacagaaaacaaagcagctgactgagatggtcaaaggactttggaccataggggatctttggaaggctgtggggtcttgctcttccttagcactcctttctccttgtgagatctctcctcagctggaatgaggaatgtagtccatctaaactgcttgctaggctcaattaccacttctgtttgctttgtggatcctgggataacatgtatatgtgtacac

SEQ ID NO: 3866 - protein, 180 aa, Homosapiens; identical to SEQ ID NO: 3858

SEQ ID NO: 3867 - DNA, 1713 bp, Homosapiens
ctgcccctcccgccccggccccgagcgcacactcgacgaaacccacacgggaccacaagagtcagaccgggcggactggtccgagaccaggagtaaggggacaggagcgaggactgatgccactgtagaaggcgaggtctctagacccctctcacctgtggggtgcacaggtgcctgcaaccaggatggtaacccagaccaggcagaagcaagctaagagaaaacgttgggtccctgggcctggcctcgccctcccagttggaggctaacggtgcggaggttccctccagcactcgctccttacagccctccccacctagcccagcccagcccagcccagcccagctgaatttgctcttgggtctttaaggggcgggaactgccaccaacgcgcatggctgcgtcattaacttgcgcctctggcctgcgcctccacgtggatttggtagagaaaccccggactgggatcatggcagccgagactcggaacgtggccggagcagaggccccaccgccccagaagcgctactaccggcaacgtgctcactccaaccccatggcggaccacacgctgcgctaccctgtgaagccagaggagatggactggtctgagctatacccagagttcttcgctccactcactcaaaatcagagccacgatgacccaaaggataagaaagaaaagagagctcaggcccaagtggagtttgcagacataggctgtggctatggtggcctgttagtggaactgtcaccgctgttcccagacacacttattctgggtctggagatccgggtgaaggtctcagactatgtacaagaccggattcgggccctacgcgcagctcctgcaggtggcttccagaacatcgcctgtctccgtagcaatgccatgaagcaccttcctaacttcttctacaagggccagctgacaaagatgttcttcctcttccccgacccacatttcaagcggacaaagcacaagtggcgaatcatcagtcccaccctgctagcagaatatgcctacgtgctaagagttggggggctggtgtataccataaccgatgtgctggagctacacgactggatgtgcactcatttcgaagagcacccactgtttgagcgtgtgcctctggaggacctgagtgaagaccccgttgtgggacatctaggcacctcaactgaggaggggaagaaagttctacgtaatggagggaagaatttcccagccatcttccgaagaatacaagatcccgtcctccaggcagtgacctcccaaaccagcctgcctggtcactgactgcttactctaccttagctggacctcgtctcccagggattagagaaaagagcaggagtcctgggtcttcccagttgagactgctggagctgagacacagtactctcttaaagaaggtggggagctgcccagggcagaacccactggtgttcatgactacccctggctcctctcaccttgtccctccactgccaacagaaaacaaagcagctgactgagatggtcaaaggactttggaccataggggatctttggaaggctgtggggtcttgctcttccttagcactcctttctccttgtgagatctctcctcagctggaatgaggaatgtagtccatctaaactgcttgctaggctcaattaccacttctgtttgctttgtggatcctgggataacatgtatatgtgtacac

SEQ ID NO: 3868 - protein, 301 aa, Homosapiens; identical to SEQ ID NO: 3860

SEQ ID NO: 3869 - DNA, 1047 bp, Homosapiens
aaaccccggactgggatcatggcagccgagactcggaacgtggccggagcagaggccccaccgccccagaagcgctactaccggcaacgtgctcactccaaccccatggcggaccacacgctgcgctatggaactgtcaccgctgttcccagacacacttattctgggtctggagatccgggtgaaggtctcagactatgtacaagaccggattcgggccctacgcgcagctcctgcaggtggcttccagaacatcgcctgtctccgtagcaatgccatgaagcaccttcctaacttcttctacaagggccagctgacaaagatgttcttcctcttccccgacccacatttcaagcggacaaagcacaagtggcgaatcatcagtcccaccctgctagcagaatatgcctacgtgctaagagttggggggctggtgtataccataaccgatgtgctggagctacacgactggatgtgcactcatttcgaagagcacccactgtttgagcgtgtgcctctggaggacctgagtgaagaccccgttgtgggacatctaggcacctcaactgaggaggggaagaaagttctacgtaatggagggaagaatttcccagccatcttccgaagaatacaagatcccgtcctccaggcagtgacctcccaaaccagcctgcctggtcactgactgcttactctaccttagctggacctcgtctcccagggattagagaaaagagcaggagtcctgggtcttcccagttgagactgctggagctgagacacagtactctcttaaagaaggtggggagctgcccagggcagaacccactggtgttcatgactacccctggctcctctcaccttgtccctccactgccaacagaaaacaaagcagctgactgagatggtcaaaggactttggaccataggggatctttggaaggctgtggggtcttgctcttccttagcactcctttctccttgtgagatctctcctcagctggaatgaggaatgtagtccatctaaactgcttgctaggctcaatt

SEQ ID NO: 3870 - protein, 185 aa, Homosapiens; identical to SEQ ID NO: 3862

SEQ ID NO: 3871 - DNA, 1397 bp, Homosapiens
ccgagaccaggagtaaggggacaggagcgaggactgatgccactgtagaaggcgaggtctctagacccctctcacctgtggggtgcacaggtgcctgcaaccaggatggtaacccagaccaggcagaagcaagctaagagaaaacgttgggtccctgggcctggcctcgccctcccagttggaggctaacggtgcggaggttccctccagcactcgctccttacagccctccccacctagcccagcccagcccagcccagcccagctgaatttgctcttgggtctttaaggggcgggaactgccaccaacgcgcatggctgcgtcattaacttgcgcctctggcctgcgcctccacgtggatttggtagagaaaccccggactgggatcatggcagccgagactcggaacgtggccggagcagaggccccaccgccccagaagcgctactaccggcaacgtgctcactccaaccccatggcggaccacacgctgcgctaccctgtgaagccagaggagatggactggtctgagctatacccagagttcttcgctccactcactcaaaatcagagccacgatgacccaaaggataagaaagaaaagagagctcaggcccaagtggagtttgcagacataggctgtggctatggtggcctgttagctgacaaagatgttcttcctcttccccgacccacatttcaagcggacaaagcacaagtggcgaatcatcagtcccaccctgctagcagaatatgcctacgtgctaagagttggggggctggtgtataccataaccgatgtgctggagctacacgactggatgtgcactcatttcgaagagcacccactgtttgagcgtgtgcctctggaggacctgagtgaagaccccgttgtgggacatctaggcacctcaactgaggaggggaagaaagttctacgtaatggagggaagaatttcccagccatcttccgaagaatacaagatcccgtcctccaggcagtgacctcccaaaccagcctgcctggtcactgactgcttactctaccttagctggacctcgtctcccagggattagagaaaagagcaggagtcctgggtcttcccagttgagactgctggagctgagacacagtactctcttaaagaaggtggggagctgcccagggcagaacccactggtgttcatgactacccctggctcctctcaccttgtccctccactgccaacagaaaacaaagcagctgactgagatggtcaaaggactttggaccataggggatctttggaaggctgtggggtcttgctcttccttagcactcctttctccttgtgagatctctcctcagctggaatgaggaatgtagtccatctaaactgcttgctaggctcaatt

SEQ ID NO: 3872 - protein, 180 aa, Homosapiens; identical to SEQ ID NO: 3858

SEQ ID NO: 3873 - DNA, 1662 bp, Homosapiens
ctgcccctcccgccccggccccgagcgcacactcgacgaaacccacacgggaccacaagagtcagaccgggcggactggtccgagaccaggagtaaggggacaggagcgaggactgatgccactgtagaaggcgaggtctctagacccctctcacctgtggggtgcacaggtgcctgcaaccaggatggtaacccagaccaggcagaagcaagctaagagaaaacgttgggtccctgggcctggcctcgccctcccagttggaggctaacggtgcggaggttccctccagcactcgctccttacagccctccccacctagcccagcccagcccagcccagcccagctgaatttgctcttgggtctttaaggggcgggaactgccaccaacgcgcatggctgcgtcattaacttgcgcctctggcctgcgcctccacgtggatttggtagagaaaccccggactgggatcatggcagccgagactcggaacgtggccggagcagaggccccaccgccccagaagcgctactaccggcaacgtgctcactccaaccccatggcggaccacacgctgcgctaccctgtgaagccagaggagatggactggtctgagctatacccagagttcttcgctccactcactcaaaatcagagccacgatgacccaaaggataagaaagaaaagagagctcaggcccaagtggagtttgcagacataggctgtggctatggtggcctgttagtggaactgtcaccgctgttcccagacacacttattctgggtctggagatccgggtgaaggtctcagactatgtacaagaccggattcgggccctacgcgcagctcctgcaggtggcttccagaacatcgcctgtctccgtagcaatgccatgaagcaccttcctaacttcttctacaagggccagctgacaaagatgttcttcctcttccccgacccacatttcaagcggacaaagcacaagtggcgaatcatcagtcccaccctgctagcagaatatgcctacgtgctaagagttggggggctggtgtataccataaccgatgtgctggagctacacgactggatgtgcactcatttcgaagagcacccactgtttgagcgtgtgcctctggaggacctgagtgaagaccccgttgtgggacatctaggcacctcaactgaggaggggaagaaagttctacgtaatggagggaagaatttcccagccatcttccgaagaatacaagatcccgtcctccaggcagtgacctcccaaaccagcctgcctggtcactgactgcttactctaccttagctggacctcgtctcccagggattagagaaaagagcaggagtcctgggtcttcccagttgagactgctggagctgagacacagtactctcttaaagaaggtggggagctgcccagggcagaacccactggtgttcatgactacccctggctcctctcaccttgtccctccactgccaacagaaaacaaagcagctgactgagatggtcaaaggactttggaccataggggatctttggaaggctgtggggtcttgctcttccttagcactcctttctccttgtgagatctctcctcagctggaatgaggaatgtagtccatctaaactgcttgctaggctcaatt

SEQ ID NO: 3874 - protein, 301 aa, Homosapiens; identical to SEQ ID NO: 3860

SEQ ID NO: 3875 - DNA, 969 bp, Homosapiens
ccgagaccaggagtaaggggacaggagcgaggactgatgccactgtagaaggcgaggtctctagacccctctcacctgtggggtgcacaggtgcctgcaaccaggatggtaacccagaccaggcagaagcaagctaagagaaaacgttgggtccctgggcctggcctcgccctcccagttggaggctaacggtgcggaggttccctccagcactcgctccttacagccctccccacctagcccagcccagcccagcccagcccagctgaatttgctcttgggtctttaaggggcgggaactgccaccaacgcgcatggctgcgtcattaacttgcgcctctggcctgcgcctccacgtggatttggtagagaaaccccggactgggatcatggcagccgagactcggaacgtggccggagcagaggccccaccgccccagaagcgctactaccggcaacgtgctcactccaaccccatggcggaccacacgctgcgctaccctgtgaagccagaggagatggactggtctgagctatacccagagttcttcgctccactcactcaaaatcagagccacgatgacccaaaggataagaaagaaaagagagctcaggcccaagtggagtttgcagacataggctgtggctatggtggcctgttagacactggtgacatcagcatggagaggctccacctaccctctactctgggtctgtgacctttgccctggagagtggagggggctgcctcaaatgcttcttaaaacctgggttgtcctttctggcgtcaatccctacatgagccatttcatctgccaggttccgggtcagtgagctggtcagcacaagcatcagagattagccgttgtggccagtgatcctgaactgtcttttctcagagattctaccatctcccctcccctttgcccctccctcgccagatctcattccttctgccccactctcctg

SEQ ID NO: 3876 - protein, 134 aa, Homosapiens
MAASLTCASGLRLHVDLVEKPRTGIMAAETRNVAGAEAPPPQKRYYRQRAHSNPMADHTLRYPVKPEEMDWSELYPEFFAPLTQNQSHDDPKDKKEKRAQAQVEFADIGCGYGGLLDTGDISMERLHLPSTLGL

SEQ ID NO: 3877 - DNA, 622 bp, Homosapiens
ggactgggatcatggcagccgagactcggaacgtggccggagcagaggccccaccgccccagaagcgctactaccggcaacgtgctcactccaaccccatggcggaccacacgctgcgctaccctgtgaagccagaggagatggactggtctgagctatacccagagttcttcgctccactcactcaaaatcagagccacgatgacccaaaggataagaaagaaaagagagctcaggcccaagtggagtttgcagacataggctgtggctatggtggcctgttaggtaacactcaggccctctttttggggtgagaagaggcctagtagcttctgctgcctcagcaacttttgtggggggtcataattggcctttcccctttcgtccagacactggtgacatcagcatggagaggctccacctaccctctactctgggtctgtgacctttgccctggagagtggagggggctgcctcaaatgcttcttaaaacctgggttgtcctttctggcgtcaatccctacatgagccatttcatctgccaggttccgggtcagtgagctggtcagcacaagcatcagagattagccgttgtggccagtgatcctgaactgtcttttct

SEQ ID NO: 3878 - protein, 100 aa, Homosapiens [sequence omitted]

SEQ ID NO: 3879 - DNA, 495 bp, Homosapiens
atcctttgggtcatcgtggctctgattttgagtgagtggagcgaagaactctgggtatagctcagaccagtccatctcctctggcttcacagggctattggaaagaagacataagaagcatgagaaggccctgagcctgtgcaattatttcgagagtcaaaatgtggatttccgaggcaagaaggtgatcgaactgggtgcggggacaggcatcgtggggatcttggcagcgctgcagggtgcgtgagctggctttttacgggagagagtggggacccaggggcgcggagaaatggtcacttcgtggatctttgggggagaggggagaactttgggcccagtctaaccccttctttttaacaaatttttttttaaaatttgtttttgtttttattttggcgtctgcttctgcgtgccagacagcgcgaattgcctgtcaaagcacctagggtgggtgattggggagggcaggaaataaaactcaggcaggcctat

SEQ ID NO: 3880 - protein, 78 aa, Homosapiens
EGPEPVQLFRESKCGFPRQEGDRTGCGDRHRGDLGSAAGCVSWLFTGESGDPGARRNGHFVDLWGRGENFGPSLTPSF

SEQ ID NO: 3881 - DNA, 2541 bp, Homosapiens
gcgagtgctggagggaacctccgcaccgttagcctccaactgggagggcgaggccaggcccagggacccaacgttttctcttagcttgcttctgcctggtctgggttaccatcctggttgcaggcacctgtgcaccccacaggccctgagcctgtgcaattatttcgagagtcaaaatgtggatttccgaggcaagaaggtgatcgaactgggtgcggggacaggcatcgtggggatcttggcagcgctgcaggggggggatgttaccatcactgacctgcccctggccctagaacagatccagggcaacgtccaggccaatgtgccagctggaggccaggcccaggtgcgtgccttgtcctgggggattgaccatcatgtcttccctgcaaactatgacctggtgctgggggctgatatcgtgtacctggaacccaccttccctctgctgctggggaccctccaacacctgtgcaggccccatggcaccatctatctggcctccaagatgagaaaggagcatgggacagagagcttctttcagcacctcctgccccagcatttccaactggagctggctcagcgggatgaggatgaaaatgtcaacatctatagggccaggcacagggaaccaagacctgcttgacatcacccttgctgttcttctcaatctcttgctctaatgaaggaactgtgtatctcaaaaaccatatttccagagccacaaacatgaggaccaaaaaggatggatttccctggcctctctcactttcctccttccctctttgttaccccagatactcttgggcaggtgcagtgaggtgcctgcttacaaggaatcccagagttctggcagcactagtgttagaacaccaaggaggttcctggctcctgttctcagagaaggaggatggtaaggtatccaggatttttagggggtaagggagatatatgggatgtgagagcagtgattgtagacagactgtcactgatcacttccattcctgttgctgtttacacagaatggactttaaaaaaattctgtgggatttttttttctttttttctttttttttgagacagggtctcactctgtcatccaggctggagtgcagtggtgtgatcacagctcactgcagcctcaacctctgaaggcccagatgatcttcctgcctcagctccccaagtagctgggactagaggcatgcgccaccacacccggctaatttttgtattttcagtagagacagggtttcgccatgttgcccagggtggtctcaaactcctgggctcaagtgatccacccgccttgcctcccaaagtgctgggattgcaggcatggcccactgtgctagcctaggatttttttttttttttaagaaagaattaagccttaaaaatctattgtgcaagaacccaacttttactcaggagctgagaaggaagaagcctcaaaccacccatttcctgctttttagagatagagtctagtggaaccatggctctaactgggtcaagtcctcctagctctgaagctaaggctgcagagctgtcctttggactgtatttcttcatgctttccagagttagagccttgatcacggaacatcattgtgtgcagaagaatactgtacctagtactaagttcttttcatctttgatttttctttagcttcatcagtccttccttcctaatctctaatcccctgaagcctaacacagttcctaatgtgttttgccttaacctcttttctcttcccacattggtacttctggttggggctctctttacttactgcttaggcacatagtcaccttctctggactccctgcttccatgctttctccttcagtccattccgcaaactcttgtgatcttccaaaattagctctgattagctttcacttcctgtagaagcaagaacaagctcctctgcttggtacttagtctgtgtccatgtgatccaaaattaccttcctattgcatttcctactcctttgctacgtgtattggacctctggccaaattacaaaagatgtactctttgttctctaaaaccacactaaagttttctgacttctttcacactctttatgataatcctctgcctgaaaggctattgccacctgtcaaaatcttcattattctttgcctctttcctgagcctcttgcttgaatgtgatttctttctccctgagacccataaggttcatcttatgggaccttaatttgtcttgcatggacatttgtgattctcattttctcaccattaaattaccttggagggtagggctgtggtttactcctgtctaaacccctgaagcctaacacagttcctggcacacaacaggtgttcaacagatattgtgctcattcaataaatatttactcgctttgtttaatggattccacccctgccttcctaggtgaccttggacaaattctcgaacccattcaccaaccacacaagtttgttgtgagtcataaatggataatgaatataaatgcgcattgaaaataaacataaaatgttacccaca

SEQ ID NO: 3882 - protein, 70 aa, Homosapiens
MRTKKDGFPWPLSLSSFPLCYPRYSWAGAVRCLLTRNPRVLAALVLEHQGGSWLLFSEKEDGKVSRIFRG

SEQ ID NO: 3883 - DNA, 2561 bp, Homosapiens
ctcagggaggcggggctcgttccacagggacaccacgacggctcgcggcccccagcctctaccccgctccggatccgggatctgagcgccggccgcggtgcccaggcactcccttggcgggccggatggcggaccccggcccagatcccgaatctgagtcggaatcggtgttcccgcgggaggtcgggctctttgcagactcttactcggagaagagccagttctgtttctgtgggcatgtgctgaccatcacgcagaactttgggtcccgcctcggggtggcggcgcgcgtgtgggacgcggccctgagcctgtgcaattatttcgagagtcaaaatgtggatttccgaggcaagaaggtgatcgaactgggtgcggggacaggcatcgtggggatcttggcagcgctgcaggggggggatgttaccatcactgacctgcccctggccctagaacagatccagggcaacgtccaggccaatgtgccagctggaggccaggcccaggtgcgtgccttgtcctgggggattgaccatcatgtcttccctgcaaactatgacctggtgctgggggctgatatcgtgtacctggaacccaccttccctctgctgctggggaccctccaacacctgtgcaggccccatggcaccatctatctggcctccaagatgagaaaggagcatgggacagagagcttctttcagcacctcctgccccagcatttccaactggagctggctcagcgggatgaggatgaaaatgtcaacatctatagggccaggcacagggaaccaagacctgcttgacatcacccttgctgttcttctcaatctcttgctctaatgaaggaactgtgtatctcaaaaaccatatttccagagccacaaacatgaggaccaaaaaggatggatttccctggcctctctcactttcctccttccctctttgttaccccagatactcttgggcaggtgcagtgaggtgcctgcttacaaggaatcccagagttctggcagcactagtgttagaacaccaaggaggttcctggctcctgttctcagagaaggaggatggtaaggtatccaggatttttagggggtaagggagatatatgggatgtgagagcagtgattgtagacagactgtcactgatcacttccattcctgttgctgtttacacagaatggactttaaaaaaattctgtgggatttttttttctttttttctttttttttgagacagggtctcactctgtcatccaggctggagtgcagtggtgtgatcacagctcactgcagcctcaacctctgaaggcccagatgatcttcctgcctcagctccccaagtagctgggactagaggcatgcgccaccacacccggctaatttttgtattttcagtagagacagggtttcgccatgttgcccagggtggtctcaaactcctgggctcaagtgatccacccgccttgcctcccaaagtgctgggattgcaggcatggcccactgtgctagcctaggatttttttttttttttaagaaagaattaagccttaaaaatctattgtgcaagaacccaacttttactcaggagctgagaaggaagaagcctcaaaccacccatttcctgctttttagagatagagtctagtggaaccatggctctaactgggtcaagtcctcctagctctgaagctaaggctgcagagctgtcctttggactgtatttcttcatgctttccagagttagagccttgatcacggaacatcattgtgtgcagaagaatactgtacctagtactaagttcttttcatctttgatttttctttagcttcatcagtccttccttcctaatctctaatcccctgaagcctaacacagttcctaatgtgttttgccttaacctcttttctcttcccacattggtacttctggttggggctctctttacttactgcttaggcacatagtcaccttctctggactccctgcttccatgctttctccttcagtccattccgcaaactcttgtgatcttccaaaattagctctgattagctttcacttcctgtagaagcaagaacaagctcctctgcttggtacttagtctgtgtccatgtgatccaaaattaccttcctattgcatttcctactcctttgctacgtgtattggacctctggccaaattacaaaagatgtactctttgttctctaaaaccacactaaagttttctgacttctttcacactctttatgataatcctctgcctgaaaggctattgccacctgtcaaaatcttcattattctttgcctctttcctgagcctcttgcttgaatgtgatttctttctccctgagacccataaggttcatcttatgggaccttaatttgtcttgcatggacatttgtgattctcattttctcaccattaaattaccttggagggtagggctgtggtttactcctgtctaaacccctgaagcctaacacagttcctggcacacaacaggtgttcaacagatattgtgctcattcaataaatatttactcgctttgttt

SEQ ID NO: 3884 - protein, 226 aa, Homosapiens; identical to SEQ ID NO: 540

SEQ ID NO: 3885 - DNA, 2701 bp, Homosapiens
ctcagggaggcggggctcgttccacagggacaccacgacggctcgcggcccccagcctctaccccgctccggatccgggatctgagcgccggccgcggtgcccaggcactcccttggcgggccggatggcggaccccggcccagatcccgaatctgagtcggaatcggtgttcccgcgggaggtcgggctctttgcagactcttactcggagaagagccagttctgtttctgtgggcatgtgctgaccatcacgcagaactttgggtcccgcctcggggtggcggcgcgcgtgtgggacgcggccctgagcctgtgcaattatttcgagagtcaaaatgtggatttccgaggcaagaaggtgatcgaactgggtgcggggacaggcatcgtggggatcttggcagcgctgcaggggggggatgttaccatcactgacctgcccctggccctagaacagatccagggcaacgtccaggccaatgtgccagctggaggccaggcccaggtgcgtgccttgtcctgggggattgaccatcatgtcttccctgcaaactatgacctggtgctgggggctgatatcgtgtacctggaacccaccttccctctgctgctggggaccctccaacacctgtgcaggccccatggcaccatctatctggcctccaagatgagaaaggagcatgggacagagagcttctttcagcacctcctgccccagcatttccaactggagctggctcagcgggatgaggatgaaaatgtcaacatctatagggccaggcacagggaaccaagacctgcttgacatcacccttgctgttcttctcaatctcttgctctaatgaaggaactgtgtatctcaaaaaccatatttccagagccacaaacatgaggaccaaaaaggatggatttccctggcctctctcactttcctccttccctctttgttaccccagatactcttgggcaggtgcagtgaggtgcctgcttacaaggaatcccagagttctggcagcactagtgttagaacaccaaggaggttcctggctcctgttctcagagaaggaggatggtaaggtatccaggatttttagggggtaagggagatatatgggatgtgagagcagtgattgtagacagactgtcactgatcacttccattcctgttgctgtttacacagaatggactttaaaaaaattctgtgggatttttttttctttttttctttttttttgagacagggtctcactctgtcatccaggctggagtgcagtggtgtgatcacagctcactgcagcctcaacctctgaaggcccagatgatcttcctgcctcagctccccaagtagctgggactagaggcatgcgccaccacacccggctaatttttgtattttcagtagagacagggtttcgccatgttgcccagggtggtctcaaactcctgggctcaagtgatccacccgccttgcctcccaaagtgctgggattgcaggcatggcccactgtgctagcctaggatttttttttttttttaagaaagaattaagccttaaaaatctattgtgcaagaacccaacttttactcaggagctgagaaggaagaagcctcaaaccacccatttcctgctttttagagatagagtctagtggaaccatggctctaactgggtcaagtcctcctagctctgaagctaaggctgcagagctgtcctttggactgtatttcttcatgctttccagagttagagccttgatcacggaacatcattgtgtgcagaagaatactgtacctagtactaagttcttttcatctttgatttttctttagcttcatcagtccttccttcctaatctctaatcccctgaagcctaacacagttcctaatgtgttttgccttaacctcttttctcttcccacattggtacttctggttggggctctctttacttactgcttaggcacatagtcaccttctctggactccctgcttccatgctttctccttcagtccattccgcaaactcttgtgatcttccaaaattagctctgattagctttcacttcctgtagaagcaagaacaagctcctctgcttggtacttagtctgtgtccatgtgatccaaaattaccttcctattgcatttcctactcctttgctacgtgtattggacctctggccaaattacaaaagatgtactctttgttctctaaaaccacactaaagttttctgacttctttcacactctttatgataatcctctgcctgaaaggctattgccacctgtcaaaatcttcattattctttgcctctttcctgagcctcttgcttgaatgtgatttctttctccctgagacccataaggttcatcttatgggaccttaatttgtcttgcatggacatttgtgattctcattttctcaccattaaattaccttggagggtagggctgtggtttactcctgtctaaacccctgaagcctaacacagttcctggcacacaacaggtgttcaacagatattgtgctcattcaataaatatttactcgctttgtttaatggattccacccctgccttcctaggtgaccttggacaaattctcgaacccattcaccaaccacacaagtttgttgtgagtcataaatggataatgaatataaatgcgcattgaaaataaacataaaatgttacccaca

SEQ ID NO: 3886 - protein, 226 aa, Homosapiens; identical to SEQ ID NO: 540

SEQ ID NO: 3887 - DNA, 2840 bp, Homosapiens
ctcagggaggcggggctcgttccacagggacaccacgacggctcgcggcccccagcctctaccccgctccggatccgggatctgagcgccggccgcggtgcccaggcactcccttggcgggccggatggcggaccccggcccagatcccgaatctgagtcggaatcggtgttcccgcgggaggtcgggctctttgcagactcttactcggagaagagccagttctgtttctgtgggcatgtgctgaccatcacgcagaactttgggtcccgcctcggggtggcggcgcgcgtgtgggacgcggccctgagcctgtgcaattatttcgagagtcaaaatgtggatttccgaggcaagaaggtgatcgaactgggtgcggggacaggcatcgtggggatcttggcagcgctgcagggagcttatggtctagtgagggagacagaggacgatgtcatagaacaagaactctggcgaggtatgcgtggagcctgtggacatgctctatccatgtctaccatgactccctgggaatccatcaagggaagctctgtcagggggggatgttaccatcactgacctgcccctggccctagaacagatccagggcaacgtccaggccaatgtgccagctggaggccaggcccaggtgcgtgccttgtcctgggggattgaccatcatgtcttccctgcaaactatgacctggtgctgggggctgatatcgtgtacctggaacccaccttccctctgctgctggggaccctccaacacctgtgcaggccccatggcaccatctatctggcctccaagatgagaaaggagcatgggacagagagcttctttcagcacctcctgccccagcatttccaactggagctggctcagcgggatgaggatgaaaatgtcaacatctatagggccaggcacagggaaccaagacctgcttgacatcacccttgctgttcttctcaatctcttgctctaatgaaggaactgtgtatctcaaaaaccatatttccagagccacaaacatgaggaccaaaaaggatggatttccctggcctctctcactttcctccttccctctttgttaccccagatactcttgggcaggtgcagtgaggtgcctgcttacaaggaatcccagagttctggcagcactagtgttagaacaccaaggaggttcctggctcctgttctcagagaaggaggatggtaaggtatccaggatttttagggggtaagggagatatatgggatgtgagagcagtgattgtagacagactgtcactgatcacttccattcctgttgctgtttacacagaatggactttaaaaaaattctgtgggatttttttttctttttttctttttttttgagacagggtctcactctgtcatccaggctggagtgcagtggtgtgatcacagctcactgcagcctcaacctctgaaggcccagatgatcttcctgcctcagctccccaagtagctgggactagaggcatgcgccaccacacccggctaatttttgtattttcagtagagacagggtttcgccatgttgcccagggtggtctcaaactcctgggctcaagtgatccacccgccttgcctcccaaagtgctgggattgcaggcatggcccactgtgctagcctaggatttttttttttttttaagaaagaattaagccttaaaaatctattgtgcaagaacccaacttttactcaggagctgagaaggaagaagcctcaaaccacccatttcctgctttttagagatagagtctagtggaaccatggctctaactgggtcaagtcctcctagctctgaagctaaggctgcagagctgtcctttggactgtatttcttcatgctttccagagttagagccttgatcacggaacatcattgtgtgcagaagaatactgtacctagtactaagttcttttcatctttgatttttctttagcttcatcagtccttccttcctaatctctaatcccctgaagcctaacacagttcctaatgtgttttgccttaacctcttttctcttcccacattggtacttctggttggggctctctttacttactgcttaggcacatagtcaccttctctggactccctgcttccatgctttctccttcagtccattccgcaaactcttgtgatcttccaaaattagctctgattagctttcacttcctgtagaagcaagaacaagctcctctgcttggtacttagtctgtgtccatgtgatccaaaattaccttcctattgcatttcctactcctttgctacgtgtattggacctctggccaaattacaaaagatgtactctttgttctctaaaaccacactaaagttttctgacttctttcacactctttatgataatcctctgcctgaaaggctattgccacctgtcaaaatcttcattattctttgcctctttcctgagcctcttgcttgaatgtgatttctttctccctgagacccataaggttcatcttatgggaccttaatttgtcttgcatggacatttgtgattctcattttctcaccattaaattaccttggagggtagggctgtggtttactcctgtctaaacccctgaagcctaacacagttcctggcacacaacaggtgttcaacagatattgtgctcattcaataaatatttactcgctttgtttaatggattccacccctgccttcctaggtgaccttggacaaattctcgaacccattcaccaaccacacaagtttgttgtgagtcataaatggataatgaatataaatgcgcattgaaaataaacataaaatgttacccaca

SEQ ID NO: 3888 - protein, 149 aa, Homosapiens; identical to SEQ ID NO: 542

SEQ ID NO: 3889 - DNA, 2729 bp, Homosapiens
ctctaccccgctccggatccgggatctgagcgccggccgcggtgcccaggcactcccttggcgggccggatggcggaccccggcccagatcccgaatctgagtcggaatcggtgttcccgcgggaggtcgggctctttgcagactcttactcggagaagagccagttctgtttctgtgggcatgtgctgaccatcacgcagaactttgggtcccgcctcggggtggcggcgcgcgtgtgggacgcggccctgagcctgtgcaattatttcgagagtcaaaatgtggatttccgaggcaagaaggagcttatggtctagtgagggagacagaggacgatgtcatagaacaagaactctggcgaggtatgcgtggagcctgtggacatgctctatccatgtctaccatgactccctgggaatccatcaagggaagctctgtcagggggggatgttaccatcactgacctgcccctggccctagaacagatccagggcaacgtccaggccaatgtgccagctggaggccaggcccaggtgcgtgccttgtcctgggggattgaccatcatgtcttccctgcaaactatgacctggtgctgggggctgatatcgtgtacctggaacccaccttccctctgctgctggggaccctccaacacctgtgcaggccccatggcaccatctatctggcctccaagatgagaaaggagcatgggacagagagcttctttcagcacctcctgccccagcatttccaactggagctggctcagcgggatgaggatgaaaatgtcaacatctatagggccaggcacagggaaccaagacctgcttgacatcacccttgctgttcttctcaatctcttgctctaatgaaggaactgtgtatctcaaaaaccatatttccagagccacaaacatgaggaccaaaaaggatggatttccctggcctctctcactttcctccttccctctttgttaccccagatactcttgggcaggtgcagtgaggtgcctgcttacaaggaatcccagagttctggcagcactagtgttagaacaccaaggaggttcctggctcctgttctcagagaaggaggatggtaaggtatccaggatttttagggggtaagggagatatatgggatgtgagagcagtgattgtagacagactgtcactgatcacttccattcctgttgctgtttacacagaatggactttaaaaaaattctgtgggatttttttttctttttttctttttttttgagacagggtctcactctgtcatccaggctggagtgcagtggtgtgatcacagctcactgcagcctcaacctctgaaggcccagatgatcttcctgcctcagctccccaagtagctgggactagaggcatgcgccaccacacccggctaatttttgtattttcagtagagacagggtttcgccatgttgcccagggtggtctcaaactcctgggctcaagtgatccacccgccttgcctcccaaagtgctgggattgcaggcatggcccactgtgctagcctaggatttttttttttttttaagaaagaattaagccttaaaaatctattgtgcaagaacccaacttttactcaggagctgagaaggaagaagcctcaaaccacccatttcctgctttttagagatagagtctagtggaaccatggctctaactgggtcaagtcctcctagctctgaagctaaggctgcagagctgtcctttggactgtatttcttcatgctttccagagttagagccttgatcacggaacatcattgtgtgcagaagaatactgtacctagtactaagttcttttcatctttgatttttctttagcttcatcagtccttccttcctaatctctaatcccctgaagcctaacacagttcctaatgtgttttgccttaacctcttttctcttcccacattggtacttctggttggggctctctttacttactgcttaggcacatagtcaccttctctggactccctgcttccatgctttctccttcagtccattccgcaaactcttgtgatcttccaaaattagctctgattagctttcacttcctgtagaagcaagaacaagctcctctgcttggtacttagtctgtgtccatgtgatccaaaattaccttcctattgcatttcctactcctttgctacgtgtattggacctctggccaaattacaaaagatgtactctttgttctctaaaaccacactaaagttttctgacttctttcacactctttatgataatcctctgcctgaaaggctattgccacctgtcaaaatcttcattattctttgcctctttcctgagcctcttgcttgaatgtgatttctttctccctgagacccataaggttcatcttatgggaccttaatttgtcttgcatggacatttgtgattctcattttctcaccattaaattaccttggagggtagggctgtggtttactcctgtctaaacccctgaagcctaacacagttcctggcacacaacaggtgttcaacagatattgtgctcattcaataaatatttactcgctttgtttaatggattccacccctgccttcctaggtgaccttggacaaattctcgaacccattcaccaaccacacaagtttgttgtgagtcataaatggataatgaatataaatgcgcattgaaaataaacataaaatgttacccaca

SEQ ID NO: 3890 - protein, 82 aa, Homosapiens
MADPGPDPESESESVFPREVGLFADSYSEKSQFCFCGHVLTITQNFGSRLGVAARVWDAALSLCNYFESQNVDFRGKKELMV

SEQ ID NO: 3891 - DNA, 477 bp, Homosapiens
gtgcccaggcactcccttggcgggccggatggcggaccccggcccagatcccgaatctgagtcggaatcggtgttcccgcgggaggtcgggctctttgcagactcttactcggagaagagccagttctgtttctgtgggcatgtgctgaccatcacgcagaactttgggtcccgcctcggggtggcggcgcgcgtgtgggacgcggccctgagcctgtgcaattatttcgagagtcaaaatgtggatttccgaggcaagaaggtgatcgaactgggtgcggggacaggcatcgtggggatcttggcagcgctgcaggctccccagtccaaaccaccacgatcacttgcctggactactacaacagccacacttgtcttcctgctttgactccttgtcctcacctagacctctgcccttccacctagtggtcagagtgatcttttcaaaataaaactgtaatcatgtattcccacccc

SEQ ID NO: 3892 - protein, 119 aa, Homosapiens
MADPGPDPESESESVFPREVGLFADSYSEKSQFCFCGHVLTITQNFGSRLGVAARVWDAALSLCNYFESQNVDFRGKKVIELGAGTGIVGILAALQAPQSKPPRSLAWTTTTATLVFLL

SEQ ID NO: 3893 - DNA, 1245 bp, Homosapiens
ttgttgcctcaccagtgcgcccgccggagggtgtttatcgcggctagagagatgtcgctgctgcggtcgctgcgcgtgtttctggtcgcgcggaccgggagctacccggctgggtctcttctgcgtcagtcgccccagccaaggcacacattttatgctgggccccgtctgtctgcctcggcctccagcaaggagctcctcatgaagctgcggcggaaaacaggctactcctttgtaaattgcaagaaagctctggagacttgtggcggggacctcaaacaggcagagatctggctccacaaggaggcccagaaggagggctggagcaaagctgccaagctccaagggaggaagaccaaagaaggcctgattgggctgttgcaggaaggaaacacaactgtattagtagaggtaaactgtgagacagattttgtttctagaaatttaaaatttcaactgttggtccagcaagtagcccttggaaccatgatgcattgtcagaccctaaaggatcaaccctctgcatacagtaaagtgcagtggctcacgcctgtaaacctagcactttgggaggctgaagcaggtggatcacttgagggtttcttgaattcctctgagctttctggacttccagctgggcctgacagagaaggctcactcaaggatcagttggctttagcaattggaaaactgggagaaaacatgattcttaaacgagctgcatgggtgaaggtgccatctgggttctacgttggctcttatgtccacggagcaatgcagagtccctcacttcacaagctggtgctggggaagtatggggccctggtcatctgtgagacgtctgaacagaaaacaaaccttgaagacgttggccgccgccttgggcagcatgtggtgggcatggcccccctctctgttggctccctggacgatgagcctgggggagaggcagagactaagatgctgtcccagccgtatttgctggatccctccattaccttggggcagtatgtgcagcctcagggggtgtcggtagtagactttgtgcggtttgaatgtggagaaggtgaagaggcagcagaaactgaataggttccagagacttttggcccaggaggaatatttacttttagctctggacatcattacaaaaaggaatatttcccaaacctcttcagaccgagaatgcatgggtaaaattattaaatagttgtataataaaaataattttttccttgtttgcgt

SEQ ID NO: 3894 - protein, 346 aa, Homosapiens; identical to SEQ ID NO: 544

SEQ ID NO: 3895 - DNA, 1182 bp, Homosapiens
ttgttgcctcaccagtgcgcccgccggagggtgtttatcgcggctagagagatgtcgctgctgcggtcgctgcgcgtgtttctggtcgcgcggaccgggagctacccggctgggtctcttctgcgtcagtcgccccagccaaggcacacattttatgctgggccccgtctgtctgcctcggcctccagcaaggagctcctcatgaagctgcggcggaaaacaggctactcctttgtaaattgcaagaaagctctggagacttgtggcggggacctcaaacaggcagagatctggctccacaaggaggcccagaaggagggctggagcaaagctgccaagctccaagggaggaagaccaaagaaggcctgattgggctgttgcaggaaggaaacacaactgtattagtagaggtaaactgtgagacagattttgtttctagaaatttaaaatttcaactgttggtccagcaagtagcccttggaaccatgatgcattgtcagaccctaaaggatcaaccctctgcatacagtaaaggtttcttgaattcctctgagctttctggacttccagctgggcctgacagagaaggctcactcaaggatcagttggctttagcaattggaaaactgggagaaaacatgattcttaaacgagctgcatgggtgaaggtgccatctgggttctacgttggctcttatgtccacggagcaatgcagagtccctcacttcacaagctggtgctggggaagtatggggccctggtcatctgtgagacgtctgaacagaaaacaaaccttgaagacgttggccgccgccttgggcagcatgtggtgggcatggcccccctctctgttggctccctggacgatgagcctgggggagaggcagagactaagatgctgtcccagccgtatttgctggatccctccattaccttggggcagtatgtgcagcctcagggggtgtcggtagtagactttgtgcggtttgaatgtggagaaggtgaagaggcagcagaaactgaataggttccagagacttttggcccaggaggaatatttacttttagctctggacatcattacaaaaaggaatatttcccaaacctcttcagaccgagaatgcatgggtaaaattattaaatagttgtataataaaaataattttttccttgtttgcgt

SEQ ID NO: 3896 - protein, 325 aa, Homosapiens
MSLLRSLRVFLVARTGSYPAGSLLRQSPQPRHTFYAGPRLSASASSKELLMKLRRKTGYSFVNCKKALETCGGDLKQAEIWLHKEAQKEGWSKAAKLQGRKTKEGLIGLLQEGNTTVLVEVNCETDFVSRNLKFQLLVQQVALGTMMHCQTLKDQPSAYSKGFLNSSELSGLPAGPDREGSLKDQLALAIGKLGENMILKRAAWVKVPSGFYVGSYVHGAMQSPSLHKLVLGKYGALVICETSEQKTNLEDVGRRLGQHVVGMAPLSVGSLDDEPGGEAETKMLSQPYLLDPSITLGQYVQPQGVSVVDFVRFECGEGEEAAETE

SEQ ID NO: 3897 - DNA, 2487 bp, Homosapiens
ttgttgcctcaccagtgcgcccgccggagggtgtttatcgcggctagagagatgtcgctgctgcggtcgctgcgcgtgtttctggtcgcgcggaccgggagctacccggctgggtctcttctgcgtcagtcgccccagccaaggcacacattttatgctgggccccgtctgtctgcctcggcctccagcaaggagctcctcatgaagctgcggcggaaaacaggctactcctttgtaaattgcaagaaagctctggagacttgtggcggggacctcaaacaggcagagatctggctccacaaggaggcccagaaggagggctggagcaaagctgccaagctccaagggaggaagaccaaagaaggcctgattgggctgttgcaggaaggaaacacaactgtattagtagaggtaaactgtgagacagattttgtttctagaaatttaaaatttcaactgttggtccagcaagtagcccttggaaccatgatgcattgtcagaccctaaaggatcaaccctctgcatacagtaaagtgcagtggctcacgcctgtaaacctagcactttgggaggctgaagcaggtggatcacttgagggtttcttgaattcctctgagctttctggacttccagctgggcctgacagagaaggctcactcaaggatcagttggctttagcaattggaaaactgggagaaaacatgattcttaaacgagctgcatgggtgaaggtgccatctgggttctacgttggctcttatgtccacggagcaatgcagagtccctcacttcacaagctggtgctggggaagtatggggccctggtcatctgtgagacgtctgaacagaaaacaaaccttgaagacgttggccgccgccttgggcagcatgtggtgggcatggcccccctctctgttggctccctggacgatgagcctgggggagaggcagagactaagatgctgtcccagccgtatttgctggatccctccattaccttggggcagtatgtgcagcctcagggggtgtcggtagtagactttgtgcggtttgaatgtggagaaggtgaagaggcagcagaaactgaataggttccagagacttttggcccaggaggaatatttacttttagctctggacatcattacaaaaaggaatatttcccaaacctcttcagaccgagaatgcatgggtaaaattattaaatagttgtataataaaaataattttttccttgtttgcgtaatactggatttagcttttctgtgcctttcaaaaacaacaggtgggccttattgacgtgatagtgtcgtggagaacaggcatcaacaatactgctgctcccttcaacatagatttattatggtatttctgaaatttctaacttatatgttctgtcttacaccttttatgacatagaactcttttgttctgtttttgctttgcgacactgtgaaccgtgcttctgcctcggaacctccctagttatattacttgtgccacatggatttctttaggattattgattcaaacctagagttgtctggaaaatgtgggttctcttctttgtgattgtctgtagtatgctttgaaggtgctctgcagtggtagacacactggttctggcctcatttaatgaaattaataacacatgcccctatttctcttttggatgatgtgtgggtgggtgggtactgaggtttcctggccagctgtaaggcagattttgacattcttgtgccagaaacagaaattagagtagtccagttacccagagagctcacttaacattgcctctttacttccccagtactgaaacatttcttcaagtataacataaaattaccgtaacaagcagacccagaatactgaaaataactccatttgttcattataggtatctttatttgaaaagtgaaaaatgctttgacacattacagatctgggtatttggattttgcctatggagtgcatatatgatttcaatgatttacaggctaaatagattttagaaataatcatcttaaaattgaaaacaaaggtaggtcctggtataatattaaacataaagttattaaacattttaagcattgttttttggttctctttcttttgatttctccagatttatgcagttttagtgctttctgctgaggctttagctagagggccacaaaacccaaaaactatatggttaacattttaggtatataacaagcaaggaatgcaaggatgagaaaaaatggagaacatgccgtgatttgcagactctattatatctaaattaagtagctgaatgtcaggcagaaattggtggataaattatttcctgatattggcactatctgctcttttctgtggccttgcaataggtataggccttcttgctttagaaaagccccttttctttcttcatttggagctgtttccagccaggcagagctgcaaattgccctcttgtgatgccaaacacagacacaaagtcc

SEQ ID NO: 3898 - protein, 346 aa, Homosapiens; identical to SEQ ID NO: 544

SEQ ID NO: 3899 - DNA, 2424 bp, Homosapiens
ttgttgcctcaccagtgcgcccgccggagggtgtttatcgcggctagagagatgtcgctgctgcggtcgctgcgcgtgtttctggtcgcgcggaccgggagctacccggctgggtctcttctgcgtcagtcgccccagccaaggcacacattttatgctgggccccgtctgtctgcctcggcctccagcaaggagctcctcatgaagctgcggcggaaaacaggctactcctttgtaaattgcaagaaagctctggagacttgtggcggggacctcaaacaggcagagatctggctccacaaggaggcccagaaggagggctggagcaaagctgccaagctccaagggaggaagaccaaagaaggcctgattgggctgttgcaggaaggaaacacaactgtattagtagaggtaaactgtgagacagattttgtttctagaaatttaaaatttcaactgttggtccagcaagtagcccttggaaccatgatgcattgtcagaccctaaaggatcaaccctctgcatacagtaaaggtttcttgaattcctctgagctttctggacttccagctgggcctgacagagaaggctcactcaaggatcagttggctttagcaattggaaaactgggagaaaacatgattcttaaacgagctgcatgggtgaaggtgccatctgggttctacgttggctcttatgtccacggagcaatgcagagtccctcacttcacaagctggtgctggggaagtatggggccctggtcatctgtgagacgtctgaacagaaaacaaaccttgaagacgttggccgccgccttgggcagcatgtggtgggcatggcccccctctctgttggctccctggacgatgagcctgggggagaggcagagactaagatgctgtcccagccgtatttgctggatccctccattaccttggggcagtatgtgcagcctcagggggtgtcggtagtagactttgtgcggtttgaatgtggagaaggtgaagaggcagcagaaactgaataggttccagagacttttggcccaggaggaatatttacttttagctctggacatcattacaaaaaggaatatttcccaaacctcttcagaccgagaatgcatgggtaaaattattaaatagttgtataataaaaataattttttccttgtttgcgtaatactggatttagcttttctgtgcctttcaaaaacaacaggtgggccttattgacgtgatagtgtcgtggagaacaggcatcaacaatactgctgctcccttcaacatagatttattatggtatttctgaaatttctaacttatatgttctgtcttacaccttttatgacatagaactcttttgttctgtttttgctttgcgacactgtgaaccgtgcttctgcctcggaacctccctagttatattacttgtgccacatggatttctttaggattattgattcaaacctagagttgtctggaaaatgtgggttctcttctttgtgattgtctgtagtatgctttgaaggtgctctgcagtggtagacacactggttctggcctcatttaatgaaattaataacacatgcccctatttctcttttggatgatgtgtgggtgggtgggtactgaggtttcctggccagctgtaaggcagattttgacattcttgtgccagaaacagaaattagagtagtccagttacccagagagctcacttaacattgcctctttacttccccagtactgaaacatttcttcaagtataacataaaattaccgtaacaagcagacccagaatactgaaaataactccatttgttcattataggtatctttatttgaaaagtgaaaaatgctttgacacattacagatctgggtatttggattttgcctatggagtgcatatatgatttcaatgatttacaggctaaatagattttagaaataatcatcttaaaattgaaaacaaaggtaggtcctggtataatattaaacataaagttattaaacattttaagcattgttttttggttctctttcttttgatttctccagatttatgcagttttagtgctttctgctgaggctttagctagagggccacaaaacccaaaaactatatggttaacattttaggtatataacaagcaaggaatgcaaggatgagaaaaaatggagaacatgccgtgatttgcagactctattatatctaaattaagtagctgaatgtcaggcagaaattggtggataaattatttcctgatattggcactatctgctcttttctgtggccttgcaataggtataggccttcttgctttagaaaagccccttttctttcttcatttggagctgtttccagccaggcagagctgcaaattgccctcttgtgatgccaaacacagacacaaagtcc

SEQ ID NO: 3900 - protein, 325 aa, Homosapiens; identical to SEQ ID NO: 3896

SEQ ID NO: 3901 - DNA, 856 bp, Homosapiens
ttgttgcctcaccagtgcgcccgccggagggtgtttatcgcggctagagagatgtcgctgctgcggtcgctgcgcgtgtttctggtcgcgcggaccgggagctacccggctgggtctcttctgcgtcagtcgccccagccaaggcacacattttatgctgggccccgtctgtctgcctcggcctccagcaaggagctcctcatgaagctgcggcggaaaacaggctactcctttgtaaattgcaagaaagctctggagacttgtggcggggacctcaaacaggcagagatctggctccacaaggaggcccagaaggagggctggagcaaagctgccaagctccaagggaggaagaccaaagaaggcctgattgggctgttgcaggaaggaaacacaactgtattagtagaggtaaactgtgagacagattttgtttctagaaatttaaaatttcaactgttggtccagcaagtagcccttggaaccatgatgcattgtcagaccctaaaggatcaaccctctgcatacagtaaaggtttcttgaattcctctgagctttctggacttccagctgggcctgacagagaaggctcactcaaggatcagttggctttagcaattgggtcccaggctaggaaccagcctgtgaagatgggaggctcaaacccctgcttaatgatcaggattggtgtgtcgggatctcggccgctggggtctgcctttccaaattggagctgtctctgaacttcagcttcctgaatccaacttcttgcagaacacctcctcttgactgctctaagcaccttaaaaataacaccttcaggatgtagctcttctttactaaacttgtatctga

SEQ ID NO: 3902 - protein, 230 aa, Homosapiens
MSLLRSLRVFLVARTGSYPAGSLLRQSPQPRHTFYAGPRLSASASSKELLMKLRRKTGYSFVNCKKALETCGGDLKQAEIWLHKEAQKEGWSKAAKLQGRKTKEGLIGLLQEGNTTVLVEVNCETDFVSRNLKFQLLVQQVALGTMMHCQTLKDQPSAYSKGFLNSSELSGLPAGPDREGSLKDQLALAIGSQARNQPVKMGGSNPCLMIRIGVSGSRPLGSAFPNWSCL

SEQ ID NO: 3903 - DNA, 830 bp, Homosapiens
ttgttgcctcaccagtgcgcccgccggagggtgtttatcgcggctagagagatgtcgctgctgcggtcgctgcgcgtgtttctggtcgcgcggaccgggagctacccggctgggtctcttctgcgtcagtcgccccagccaaggcacacattttatgctgggccccgtctgtctgcctcggcctccagcaaggagctcctcatgaagctgcggcggaaaacaggctactcctttgtaaattgcaagaaagctctggagacttgtggcggggacctcaaacaggcagagatctggctccacaaggaggcccagaaggagggctggagcaaagctgccaagctccaagggaggaagaccaaagaaggcctgattgggctgttgcaggaaggaaacacaactgtattagtagaggtaaactgtgagacagattttgtttctagaaatttaaaatttcaactgttggtccagcaagtagcccttggaaccatgatgcattgtcagaccctaaaggatcaaccctctgcatacagtaaaggtttcttgaattcctctgagctttctggacttccagctgggcctgacagagaaggctcactcaaggatcagttggctttagcaattgtgctgaggactcatcacatttgcatgatttgaatcgtgagatgaactgggccatcctgttcaggagcatcccatcatggctcggtctttgcaaggctgagcaatgatttgaatatatcttccaggtgagatattgatagcacatttgaggatgtgcctttcactaccctgaaaactctacagactcacaagactcttaaagaagactc

SEQ ID NO: 3904 - protein, 200 aa, Homosapiens
MSLLRSLRVFLVARTGSYPAGSLLRQSPQPRHTFYAGPRLSASASSKELLMKLRRKTGYSFVNCKKALETCGGDLKQAEIWLHKEAQKEGWSKAAKLQGRKTKEGLIGLLQEGNTTVLVEVNCETDFVSRNLKFQLLVQQVALGTMMHCQTLKDQPSAYSKGFLNSSELSGLPAGPDREGSLKDQLALAIVLRTHHICMI

SEQ ID NO: 3905 - DNA, 1951 bp, Homosapiens
agagatgtcgctgctgcggtcgctgcgcgtgtttctggtcgcgcggaccgggagctacccggctgggtctcttctgcgtcagtcgccccagccaaggcacacattttatgctgggccccgtctgtctgcctcggcctccagcaaggagctcctcatgaagctgcggcggaaaacaggctactcctttgtaaattgcaagaaagctctggagacttgtggcggggacctcaaacaggcagagatctggctccacaaggaggcccagaaggagggctggagcaaagctgccaagctccaagggaggaagaccaaagaaggcctgattgggctgttgcaggaaggaaacacaactgtattagtagaggtgacccccctctctgttggctccctggacgatgagcctgggggagaggcagagactaagatgctgtcccagccgtatttgctggatccctccattaccttggggcagtatgtgcagcctcagggggtgtcggtagtagactttgtgcggtttgaatgtggagaaggtgaagaggcagcagaaactgaataggttccagagacttttggcccaggaggaatatttacttttagctctggacatcattacaaaaaggaatatttcccaaacctcttcagaccgagaatgcatgggtaaaattattaaatagttgtataataaaaataattttttccttgtttgcgtaatactggatttagcttttctgtgcctttcaaaaacaacaggtgggccttattgacgtgatagtgtcgtggagaacaggcatcaacaatactgctgctcccttcaacatagatttattatggtatttctgaaatttctaacttatatgttctgtcttacaccttttatgacatagaactcttttgttctgtttttgctttgcgacactgtgaaccgtgcttctgcctcggaacctccctagttatattacttgtgccacatggatttctttaggattattgattcaaacctagagttgtctggaaaatgtgggttctcttctttgtgattgtctgtagtatgctttgaaggtgctctgcagtggtagacacactggttctggcctcatttaatgaaattaataacacatgcccctatttctcttttggatgatgtgtgggtgggtgggtactgaggtttcctggccagctgtaaggcagattttgacattcttgtgccagaaacagaaattagagtagtccagttacccagagagctcacttaacattgcctctttacttccccagtactgaaacatttcttcaagtataacataaaattaccgtaacaagcagacccagaatactgaaaataactccatttgttcattataggtatctttatttgaaaagtgaaaaatgctttgacacattacagatctgggtatttggattttgcctatggagtgcatatatgatttcaatgatttacaggctaaatagattttagaaataatcatcttaaaattgaaaacaaaggtaggtcctggtataatattaaacataaagttattaaacattttaagcattgttttttggttctctttcttttgatttctccagatttatgcagttttagtgctttctgctgaggctttagctagagggccacaaaacccaaaaactatatggttaacattttaggtatataacaagcaaggaatgcaaggatgagaaaaaatggagaacatgccgtgatttgcagactctattatatctaaattaagtagctgaatgtcaggcagaaattggtggataaattatttcctgatattggcactatctgctcttttctgtggccttgcaataggtataggccttcttgctttagaaaagccccttttctttcttcatttggagctgtttccagccaggcagagctgcaaattgccctcttgtgatgccaaacacagacacaaagtcc

SEQ ID NO: 3906 - protein, 183 aa, Homosapiens
MSLLRSLRVFLVARTGSYPAGSLLRQSPQPRHTFYAGPRLSASASSKELLMKLRRKTGYSFVNCKKALETCGGDLKQAEIWLHKEAQKEGWSKAAKLQGRKTKEGLIGLLQEGNTTVLVEVTPLSVGSLDDEPGGEAETKMLSQPYLLDPSITLGQYVQPQGVSVVDFVRFECGEGEEAAETE

SEQ ID NO: 3907 - DNA, 1335 bp, Homosapiens
ggttaccatcaaagaatgtgcgttatgtttaagcacctttcaagcctgcatggacccaaaaggggggattttcatttttacttatccttgaaatgtcttctgactccctggctcttttgcttttcctgaagacacagaccagacctaagatgtccctcccctataagaaagacctcatcctgtgttttctctctcttcttctcaggcaggaaaaacatatgaacaattaaaagaagagctgggagatgctgctgctatcatgcgaatcactgctgacatgaagaatgcaaccctctccctgaattctaatgacagtgagccaaaatattaccctatagcagttctgttgaaaaaccagaatcaggagctgcctgaggatgtaaaccctgccaaaaaggagaattacctctctgaacaggactttgtgtctgtgtttggcatcacaagagggcaatttgcagctctgcctggctggaaacagctccaaatgaagaaagaaaaggggcttttctaaagcaagaaggcctatacctattgcaaggccacagaaaagagcagatagtgccaatatcaggaaataatttatccaccaatttctgcctgacattcagctacttaatttagatataatagagtctgcaaatcacggcatgttctccattttttctcatccttgcattccttgcttgttatatacctaaaatgttaaccatatagtttttgggttttgtggccctctagctaaagcctcagcagaaagcactaaaactgcataaatctggagaaatcaaaagaaagagaaccaaaaaacaatgcttaaaatgtttaataactttatgtttaatattataccaggacctacctttgttttcaattttaagatgattatttctaaaatctatttagcctgtaaatcattgaaatcatatatgcactccataggcaaaatccaaatacccagatctgtaatgtgtcaaagcatttttcacttttcaaataaagatacctataatgaacaaatggagttattttcagtattctgggtctgcttgttacggtaattttatgttatacttgaagaaatgtttcagtactggggaagtaaagaggcaatgttaagtgagctctctgggtaactggactactctaatttctgtttctggcacaagaatgtcaaaatctgccttacagctggccaggaaacctcagtacccacccacccacacatcatccaaaagagaaataggggcatgtgttattaatttcattaaatgaggccagaaccagtgtgtctaccactgcagagcaccttcaaagcatactacagacaatcac

SEQ ID NO: 3908 - protein, 84 aa, Homosapiens
MRITADMKNATLSLNSNDSEPKYYPIAVLLKNQNQELPEDVNPAKKENYLSEQDFVSVFGITRGQFAALPGWKQLQMKKEKGLF

SEQ ID NO: 3909 - DNA, 3310 bp, Homosapiens
gatgtttcagtcctggaaagacaagcatcatgcctctgaccagtgccttcagggctgtggacaacgaccctgggatcattgtctggagaatagagaaaatggagctggcgctggtgcctgtgagcgcccacggcaacttctatgagggggactgctacgtcatcctctcgacccggagagtggccagtctcctatcccaggacatccacttctggatcgggaaggactcctcccaggatgagcaaagctgcgcagccatatataccacacagctggacgactacctgggaggcagccctgtgcagcaccgagaggtccagtaccatgagtcagacactttccgtggctacttcaagcagggcatcatctacaagcaggggggtgtcgcctctgggatgaagcacgtggagaccaatacctacgacgtgaagcggctgctacatgtgaaagggaaaagaaacatcagggctaccgaggtggaaatgagctgggacagtttcaaccgaggtgatgtcttcttgctggaccttgggaaagtcatcatccaatggaatggcccagagagcaacagtggggagcgcctgaaggctatgcttctggcaaaggatattcgagacagggagcgagggggccgtgctaaaataggagtgatcgagggagacaaggaggcagccagcccagagctgatgaaggtccttcaggacacccttggccgacgctccattatcaagcctacagtccctgatgagatcatagatcagaagcagaaatcaactatcatgttgtatcatatctcagattcagctgggcagctggcagtcacagaggtagcaacaaggcctctggtccaggacttactgaaccatgatgactgctacatcctggaccaaagtggaaccaaaatctacgtgtggaaaggaaaaggagccacaaaggctgaaaaacaggcagccatgtctaaagcgctgggcttcatcaagatgaagagctaccccagcagcaccaatgtggagaccgtcaacgatggtgctgagtcggccatgttcaagcagctgttccagaagtggtcagtaaaggaccagaccatgggcctggggaaaacgttcagcattggtaaaattgctaaagttttccaggataaatttgatgtgactctgctacacaccaagccagaggtagctgcccaggaaagaatggtcgatgatggcaacggaaaagttgaggtctggagaattgagaacctggagctggtccctgtggagtatcaatggtatggcttcttttatgggggagactgttatctggtcctctacacatacgaggtaaatgggaagccacatcacatcttgtacatctggcagggccgccacgcctcacaggatgagctggcagcctcagcataccaggcagtggaggtggatcggcagtttgatggggctgctgtgcaggttcgagtcaggatgggaacggagccacgccacttcatggccatcttcaaagggaagctagttatctttgagggtgggacttccaggaagggaaatgccgagcctgaccctccagtaagactcttccaaattcatggaaatgacaaatctaacaccaaagcagtggaagttccagcctttgcctcctccctaaactccaatgatgtctttctgctgcgaactcaggcagagcactacctgtggtatggcaaggggtctagtggggatgagcgggcaatggctaaggagctggccagccttctctgtgatggcagcgagaacactgtggccgagggccaggagccagccgagttctgggacctactgggagggaaaactccctatgccaatgataaaagacttcagcaggaaatcctagatgtccagtctcgtctctttgaatgttccaataagaccggccaattcgttgtcactgagatcacagacttcacccaggatgacctgaaccctactgacgtgatgctcctagatacctgggaccaggtgttcttgtggattggggctgaggccaatgccacggagaaggagagtgcccttgccacagcacagcagtacctgcacactcaccccagcggccgagatcccgacacaccaatcctgatcattaagcaggggtttgagcctcccatcttcacaggctggttcctagcctgggaccctaacatttggagtgcaggaaaaacatatgaacaattaaaagaagagctgggagatgctgctgctatcatgcgaatcactgctgacatgaagaatgcaaccctctccctgaattctaatgacagtgagccaaaatattaccctatagcagttctgttgaaaaaccagaatcaggagctgcctgaggatgtaaaccctgccaaaaaggagaattacctctctgaacaggactttgtgtctgtgtttggcatcacaagagggcaatttgcagctctgcctggctggaaacagctccaaatgaagaaagaaaaggggcttttctaaagcaagaaggcctatacctattgcaaggccacagaaaagagcagatagtgccaatatcaggaaataatttatccaccaatttctgcctgacattcagctacttaatttagatataatagagtctgcaaatcacggcatgttctccattttttctcatccttgcattccttgcttgttatatacctaaaatgttaaccatatagtttttgggttttgtggccctctagctaaagcctcagcagaaagcactaaaactgcataaatctggagaaatcaaaagaaagagaaccaaaaaacaatgcttaaaatgtttaataactttatgtttaatattataccaggacctacctttgttttcaattttaagatgattatttctaaaatctatttagcctgtaaatcattgaaatcatatatgcactccataggcaaaatccaaatacccagatctgtaatgtgtcaaagcatttttcacttttcaaataaagatacctataatgaacaaatggagttattttcagtattctgggtctgcttgttacggtaattttatgttatacttgaagaaatgtttcagtactggggaagtaaagaggcaatgttaagtgagctctctgggtaactggactactctaatttctgtttctggcacaagaatgtcaaaatctgccttacagctggccaggaaacctcagtacccacccacccacacatcatccaaaagagaaataggggcatgtgttattaatttcattaaatgaggccagaaccagtgtgtctaccactgcagagcaccttcaaagcatactacagacaatcac

SEQ ID NO: 3910 - protein, 819 aa, Homosapiens
MPLTSAFRAVDNDPGIIVWRIEKMELALVPVSAHGNFYEGDCYVILSTRRVASLLSQDIHFWIGKDSSQDEQSCAAIYTTQLDDYLGGSPVQHREVQYHESDTFRGYFKQGIIYKQGGVASGMKHVETNTYDVKRLLHVKGKRNIRATEVEMSWDSFNRGDVFLLDLGKVIIQWNGPESNSGERLKAMLLAKDIRDRERGGRAKIGVIEGDKEAASPELMKVLQDTLGRRSIIKPTVPDEIIDQKQKSTIMLYHISDSAGQLAVTEVATRPLVQDLLNHDDCYILDQSGTKIYVWKGKGATKAEKQAAMSKALGFIKMKSYPSSTNVETVNDGAESAMFKQLFQKWSVKDQTMGLGKTFSIGKIAKVFQDKFDVTLLHTKPEVAAQERMVDDGNGKVEVWRIENLELVPVEYQWYGFFYGGDCYLVLYTYEVNGKPHHILYIWQGRHASQDELAASAYQAVEVDRQFDGAAVQVRVRMGTEPRHFMAIFKGKLVIFEGGTSRKGNAEPDPPVRLFQIHGNDKSNTKAVEVPAFASSLNSNDVFLLRTQAEHYLWYGKGSSGDERAMAKELASLLCDGSENTVAEGQEPAEFWDLLGGKTPYANDKRLQQEILDVQSRLFECSNKTGQFVVTEITDFTQDDLNPTDVMLLDTWDQVFLWIGAEANATEKESALATAQQYLHTHPSGRDPDTPILIIKQGFEPPIFTGWFLAWDPNIWSAGKTYEQLKEELGDAAAIMRITADMKNATLSLNSNDSEPKYYPIAVLLKNQNQELPEDVNPAKKENYLSEQDFVSVFGITRGQFAALPGWKQLQMKKEKGLF

SEQ ID NO: 3911 - DNA, 1017 bp, Homosapiens
ggttaccatcaaagaatgtgcgttatgtttaagcacctttcaagcctgcatggacccaaaaggggggattttcatttttacttatccttgaaatgtcttctgactccctggctcttttgcttttcctgaagacacagaccagacctaagatgtccctcccctataagaaagacctcatcctgtgttttctctctcttcttctcaggcaggaaaaacatatgaacaattaaaagaagagctgggagatgctgctgctatcatgcgaatcactgctgacatgaagaatgcaaccctctccctgaattctaatgacagtgagccaaaatattaccctatagcagttctgttgaaaaaccagaatcaggagctgcctgaggatgtaaaccctgccaaaaaggagaattacctctctgaacaggactttgtgtctgtgtttggcatcacaagagggcaatttgcagctctgcctggctggaaacagctccaaatgaagaaagaaaaggggcttttctaaagcaagaaggcctatacctattgcaaggccacagaaaagagcagatagtgccaatatcaggaaataatttatccaccaatttctgcctgacattcagctacttaatttagatataatagagtctgcaaatcacggcatgttctccattttttctcatccttgcattccttgcttgttatatacctaaaatgttaaccatatagtttttgggttttgtggccctctagctaaagcctcagcagaaagcactaaaactgcataaatctggagaaatcaaaagaaagagaaccaaaaaacaatgcttaaaatgtttaataactttatgtttaatattataccaggacctacctttgttttcaattttaagatgattatttctaaaatctatttagcctgtaaatcattgaaatcatatatgcactccataggcaaaatccaaatacccagatctgtaatgtgtcaaagcatttttcacttttcaaataaagatacctataatgaac

SEQ ID NO: 3912 - protein, 84 aa, Homosapiens; identical to SEQ ID NO: 3908

SEQ ID NO: 3913 - DNA, 3395 bp, Homosapiens
aagatacaaaaaaaattatccaggcatggtggcgcatgccggtagtccaggctacctggcagggcactgagataggaaaatcacttgaacccgggaggctgcagtgagccgagatcacgccacggcactccagcctaggtgagagcgagactctgtctaaaaaaaaaaaaagcactcagaacagttcttggcacacagtacctgctgaataaaaggtggctgttattattgaaggggatatcacatatcaaggttaatggccctgtcctcaaggagcttatatttgtgcagatccatgcagatgaaccaagccagaagcaataaatgagcaaacaaatgtgatgcaaagtcagtaaggacaaaagtactgaaagaacacagcataatcatcctaaaaattaacaaccataatcaccgcaagccaataaacagatccaaaaatgttccactcagtcattttttttttaggcaggtaccttggtccttagacaaaagtgagttagaatttgactctgactcccagaggggagacgcttatatcatgtggcttcatagaggtgaattaccagacaagcaaagaactcagtgtattccaccactgacctgcctttgggaatgggtggctctgcagggcttcatcaagatgaagagctaccccagcagcaccaatgtggagaccgtcaacgatggtgctgagtcggccatgttcaagcagctgttccagaagtggtcagtaaaggaccagaccatgggcctggggaaaacgttcagcattggtaaaattgctaaagttttccaggataaatttgatgtgactctgctacacaccaagccagaggtagctgcccaggaaagaatggtcgatgatggcaacggaaaagttgaggtctggagaattgagaacctggagctggtccctgtggagtatcaatggtatggcttcttttatgggggagactgttatctggtcctctacacatacgaggtaaatgggaagccacatcacatcttgtacatctggcaggtaggcctggcacaggcttcagctttggatcctgatgtgtcctctggccactgggctggggcggggagcatgggtccttcatggcctctcaccattgcagggccgccacgcctcacaggatgagctggcagcctcagcataccaggcagtggaggtggatcggcagtttgatggggctgctgtgcaggttcgagtcaggatgggaacggagccacgccacttcatggccatcttcaaagggaagctagttatctttgagggtgggacttccaggaagggaaatgccgagcctgaccctccagtaagactcttccaaattcatggaaatgacaaatctaacaccaaagcagtggaagttccagcctttgcctcctccctaaactccaatgatgtctttctgctgcgaactcaggcagagcactacctgtggtatggcaaggggtctagtggggatgagcgggcaatggctaaggagctggccagccttctctgtgatggcagcgagaacactgtggccgagggccaggagccagccgagttctgggacctactgggagggaaaactccctatgccaatgataaaagacttcagcaggaaatcctagatgtccagtctcgtctctttgaatgttccaataagaccggccaattcgttgtcactgagatcacagacttcacccaggatgacctgaaccctactgacgtgatgctcctagatacctgggaccaggtgttcttgtggattggggctgaggccaatgccacggagaaggagagtgcccttgccacagcacagcagtacctgcacactcaccccagcggccgagatcccgacacaccaatcctgatcattaagcaggggtttgagcctcccatcttcacaggctggttcctacctgggcaacagagcgagagtccgtctcaaaaacacaacaacaaaaaaatgaatatttgttttattattcaactctgccgtttaaggagagattaaagtcattggcagtatttttcagaaataagcttctaacccaaatgacatttttattcatttctgacagtgaagtccacagaaacttaggccatttacacctattttaatggttaaaagaagtggagcctctagccaggaatccagcagttctttaacctcaggaggagtgcatggcaccaggtgttcaaaccatctggcaattctgtcctttgtgctctacaaactcagattccaaagctaatgttgatgtagtatctttaaattgtatttaagtaggactacaacctaaagtcatttaaaggctggaaatgcagggctaaataaaagtaccaagagaaggtatgtgatcccaatattcaaatgagatccagacacaagatgtatgccaaactagctatacaggacttgccttggacttactgaatcagctttcccaagaacaaccccaaaatctgaatattttctattcccagatgattctgacatgcagccaggtttggggagcattgttatcaaagatgattacagagggtgaagtggcataagtcaaaatgttaaatattatacacattcagaactgtaaccacacagacactgaggagtcttttccctgtgcctacattcttatcttacctaggacatgaagaatgcaaccctctccctgaattctaatgacagtgagccaaaatattaccctatagcagttctgttgaaaaaccagaatcaggagctgcctgaggatgtaaaccctgccaaaaaggagaattacctctctgaacaggactttgtgtctgtgtttggcatcacaagagggcaatttgcagctctgcctggctggaaacagctccaaatgaagaaagaaaaggggcttttctaaagcaagaaggcctatacctattgcaaggccacagaaaagagcagatagtgccaatatcaggaaataatttatccaccaatttctgcctgacattcagctacttaatttagatataatagagtctgcaaatcacggcatgttctccattttttctcatccttgcattccttgcttgttatatacctaaaatgttaaccatatagtttttgggttttgtggccctctagctaaagcctcagcagaaagcactaaaactgcataaatctggagaaatcaaaagaaagagaaccaaaaaacaatgcttaaaatgtttaataactttatgtttaatattataccaggacctacctttgttttcaattttaagatgattatttctaaaatctatttagcctgtaaatcattgaaatcatatatgcactccataggcaaaatccaaatacccagatctgtaatgtgtcaaagcatttttcacttttcaaataaagatacctataatgaac

SEQ ID NO: 3914 - protein, 318 aa, Homosapiens
MCPLATGLGRGAWVLHGLSPLQGRHASQDELAASAYQAVEVDRQFDGAAVQVRVRMGTEPRHFMAIFKGKLVIFEGGTSRKGNAEPDPPVRLFQIHGNDKSNTKAVEVPAFASSLNSNDVFLLRTQAEHYLWYGKGSSGDERAMAKELASLLCDGSENTVAEGQEPAEFWDLLGGKTPYANDKRLQQEILDVQSRLFECSNKTGQFVVTEITDFTQDDLNPTDVMLLDTWDQVFLWIGAEANATEKESALATAQQYLHTHPSGRDPDTPILIIKQGFEPPIFTGWFLPGQQSESPSQKHNNKKMNICFIIQLCRLRRD

SEQ ID NO: 3915 - DNA, 2992 bp, Homosapiens
gatgtttcagtcctggaaagacaagcatcatgcctctgaccagtgccttcagggctgtggacaacgaccctgggatcattgtctggagaatagagaaaatggagctggcgctggtgcctgtgagcgcccacggcaacttctatgagggggactgctacgtcatcctctcgacccggagagtggccagtctcctatcccaggacatccacttctggatcgggaaggactcctcccaggatgagcaaagctgcgcagccatatataccacacagctggacgactacctgggaggcagccctgtgcagcaccgagaggtccagtaccatgagtcagacactttccgtggctacttcaagcagggcatcatctacaagcaggggggtgtcgcctctgggatgaagcacgtggagaccaatacctacgacgtgaagcggctgctacatgtgaaagggaaaagaaacatcagggctaccgaggtggaaatgagctgggacagtttcaaccgaggtgatgtcttcttgctggaccttgggaaagtcatcatccaatggaatggcccagagagcaacagtggggagcgcctgaaggctatgcttctggcaaaggatattcgagacagggagcgagggggccgtgctaaaataggagtgatcgagggagacaaggaggcagccagcccagagctgatgaaggtccttcaggacacccttggccgacgctccattatcaagcctacagtccctgatgagatcatagatcagaagcagaaatcaactatcatgttgtatcatatctcagattcagctgggcagctggcagtcacagaggtagcaacaaggcctctggtccaggacttactgaaccatgatgactgctacatcctggaccaaagtggaaccaaaatctacgtgtggaaaggaaaaggagccacaaaggctgaaaaacaggcagccatgtctaaagcgctgggcttcatcaagatgaagagctaccccagcagcaccaatgtggagaccgtcaacgatggtgctgagtcggccatgttcaagcagctgttccagaagtggtcagtaaaggaccagaccatgggcctggggaaaacgttcagcattggtaaaattgctaaagttttccaggataaatttgatgtgactctgctacacaccaagccagaggtagctgcccaggaaagaatggtcgatgatggcaacggaaaagttgaggtctggagaattgagaacctggagctggtccctgtggagtatcaatggtatggcttcttttatgggggagactgttatctggtcctctacacatacgaggtaaatgggaagccacatcacatcttgtacatctggcagggccgccacgcctcacaggatgagctggcagcctcagcataccaggcagtggaggtggatcggcagtttgatggggctgctgtgcaggttcgagtcaggatgggaacggagccacgccacttcatggccatcttcaaagggaagctagttatctttgagggtgggacttccaggaagggaaatgccgagcctgaccctccagtaagactcttccaaattcatggaaatgacaaatctaacaccaaagcagtggaagttccagcctttgcctcctccctaaactccaatgatgtctttctgctgcgaactcaggcagagcactacctgtggtatggcaaggggtctagtggggatgagcgggcaatggctaaggagctggccagccttctctgtgatggcagcgagaacactgtggccgagggccaggagccagccgagttctgggacctactgggagggaaaactccctatgccaatgataaaagacttcagcaggaaatcctagatgtccagtctcgtctctttgaatgttccaataagaccggccaattcgttgtcactgagatcacagacttcacccaggatgacctgaaccctactgacgtgatgctcctagatacctgggaccaggtgttcttgtggattggggctgaggccaatgccacggagaaggagagtgcccttgccacagcacagcagtacctgcacactcaccccagcggccgagatcccgacacaccaatcctgatcattaagcaggggtttgagcctcccatcttcacaggctggttcctagcctgggaccctaacatttggagtgcaggaaaaacatatgaacaattaaaagaagagctgggagatgctgctgctatcatgcgaatcactgctgacatgaagaatgcaaccctctccctgaattctaatgacagtgagccaaaatattaccctatagcagttctgttgaaaaaccagaatcaggagctgcctgaggatgtaaaccctgccaaaaaggagaattacctctctgaacaggactttgtgtctgtgtttggcatcacaagagggcaatttgcagctctgcctggctggaaacagctccaaatgaagaaagaaaaggggcttttctaaagcaagaaggcctatacctattgcaaggccacagaaaagagcagatagtgccaatatcaggaaataatttatccaccaatttctgcctgacattcagctacttaatttagatataatagagtctgcaaatcacggcatgttctccattttttctcatccttgcattccttgcttgttatatacctaaaatgttaaccatatagtttttgggttttgtggccctctagctaaagcctcagcagaaagcactaaaactgcataaatctggagaaatcaaaagaaagagaaccaaaaaacaatgcttaaaatgtttaataactttatgtttaatattataccaggacctacctttgttttcaattttaagatgattatttctaaaatctatttagcctgtaaatcattgaaatcatatatgcactccataggcaaaatccaaatacccagatctgtaatgtgtcaaagcatttttcacttttcaaataaagatacctataatgaac

SEQ ID NO: 3916 - protein, 819 aa, Homosapiens; identical to SEQ ID NO: 3910

SEQ ID NO: 3917 - DNA, 1698 bp, Homosapiens
aagatacaaaaaaaattatccaggcatggtggcgcatgccggtagtccaggctacctggcagggcactgagataggaaaatcacttgaacccgggaggctgcagtgagccgagatcacgccacggcactccagcctaggtgagagcgagactctgtctaaaaaaaaaaaaagcactcagaacagttcttggcacacagtacctgctgaataaaaggtggctgttattattgaaggggatatcacatatcaaggttaatggccctgtcctcaaggagcttatatttgtgcagatccatgcagatgaaccaagccagaagcaataaatgagcaaacaaatgtgatgcaaagtcagtaaggacaaaagtactgaaagaacacagcataatcatcctaaaaattaacaaccataatcaccgcaagccaataaacagatccaaaaatgttccactcagtcattttttttttaggcaggtaccttggtccttagacaaaagtgagttagaatttgactctgactcccagaggggagacgcttatatcatgtggcttcatagaggtgaattaccagacaagcaaagaactcagtgtattccaccactgacctgcctttgggaatgggtggctctgcagggcttcatcaagatgaagagctaccccagcagcaccaatgtggagaccgtcaacgatggtgctgagtcggccatgttcaagcagctgttccagaagtggtcagtaaaggaccagaccatgggcctggggaaaacgttcagcattggtaaaattggtgagactgcccccagatcatcctctcattgctaagactctagaaaagcaggcacagatgcttcttactcactcggcttttcccaaccctttctccacagctaaagttttccaggataaatttgatgtgactctgctacacaccaagccagaggtagctgcccaggaaagaatggtcgatgatggcaacggaaaagttgagatctggactctgcttttcttctctctagggtgggacttccaggaagggaaatgccgagcctgaccctccagtaagactcttccaaattcatggaaatgacaaatctaacaccaaagcagtggaagttccagcctttgcctcctccctaaactccaatgatgtctttctgctgcgaactcaggcagagcactacctgtggtatggcaaggtaggatggctgggccccgggtcagaccagcccctcggagcccagacctgcactcccctcctcctgtcagcaaggtcaaaggacctagagtaggctggagtgcttgctttggcagcacatatactaaaactggaatgatacagagaagattagcatggtccctgtgcaaggatggcatgcaaattcatgaagcgtttgatattaaaaaaaaaaaaaaaaaaaaaaagctgggcacggtggctcatccctgtaatcctagcactttgggaggctgaggcaggcaaatcacgaggtcaggagttcgagaccagcctggccaacatggtgaaaccccatctctactaaaaatacaaaaattagctgggcatggtggcacacgcccatagtcccagctactcaggaggctgaggcagaagaatctcttgaaccagggggcggaggttgcagtgagccgagattgtaccactgtactccagcctgggcgacagagtgagactccgtctc

SEQ ID NO: 3918 - protein, 68 aa, Homosapiens
MLLTHSAFPNPFSTAKVFQDKFDVTLLHTKPEVAAQERMVDDGNGKVEIWTLLFFSLGWDFQEGKCRA

SEQ ID NO: 3919 - DNA, 1181 bp, Homosapiens
ggaaaagttgaggtaagcccaatgattcaaatgtcagggcagacagcactggccttcatggctgtcctgctgggggcaggggtgcaggtgattctgtgtctgctttgctttccctttcccctccggcacctcaggagtcttctttaagagtcttgtgagtctgtagagttttcagggtagtgaaaggcacatcctcaaatgtgctatcaatatctcacctggaagatatattcaaatcattgctcagccttgcaaagaccgagccatgatgggatgctcctgaacaggatggcccagttcatctcacgattcaaatcatgcaaatgtgatgagtcctcagcactgggagagaaccagagggagaaagggaacatggagtaaacgtcagcacctttcccacctggattctctctttagtgtggcctagcccctctcagcacccccatctctggaaaacggtgtctccttctatgcccaggtctggagaattgagaacctggagctggtccctgtggagtatcaatggtatggcttcttttatgggggagactgttatctggtcctctacacatacgaggtaaatgggaagccacatcacatcttgtacatctggcagggccgccacgcctcacaggatgagctggcagcctcagcataccaggcagtggaggtggatcggcagtttgatggggctgctgtgcaggttcgagtcaggatgggaacggagccacgccacttcatggccatcttcaaagggaagctagttatctttgagggtgggacttccaggaagggaaatgccgagcctgaccctccagtaagactcttccaaattcatggaaatgacaaatctaacaccaaagcagtggaagttccagcctttgcctcctccctaaactccaatgatgtctttctgctgcgaactcaggcagagcactacctgtggtatggcaaggtaggatggctgggccccgggtcagaccagcccctcggagcccagacctgcactcccctcctcctgtcagcaaggtcaaaggacctagagtaggctggagtgcttgctttggcagcacatatactaaaactggaatgatacagagaagattagcatggtccctgtgcaaggatggcatgcaaattcatgaagcgtttgatattaaaaaaaaaaaaaaaaaaaaaaa

SEQ ID NO: 3920 - protein, 110 aa, Homosapiens
MGTEPRHFMAIFKGKLVIFEGGTSRKGNAEPDPPVRLFQIHGNDKSNTKAVEVPAFASSLNSNDVFLLRTQAEHYLWYGKVGWLGPGSDQPLGAQTCTPLLLSARSKDLE

SEQ ID NO: 3921 - DNA, 3607 bp, Homosapiens
aagcgacggccatcccatgcctcaccacacggcccggaaacagcgggaagtaactggaaagagctttaggacagcttagatgccgagtgggcgaatgccagaccaatgatacccagagctacctgccgccaacttgttgagatgtgtgtttgactgtgagagagtgtgtgtttgtgtgtgtgttttgccatgaactgtggccccagtgtatagtgtttcagtgggggagaagctgaaagaccaagactcttcccaagttagcttgtctcctctcctgtcaccctaagagccactgagttgtgtagggatgaagactattgaagactccattgccaaaccatggcctttcctcagtgttgtaaggcctatgccaaggataaaggaagggtatgcctttgggtactccaggcacacacctttctgaaatccttctccagccagctgctgcagacaaaagatcacatttctgggaagatgagaacttgtttccagaccagcatccagtggccatcaggtcttgtggcccaaaggctatgcttgcctccggctgagtgcctgggataggccttttctatgtctccccaaggctggggtgctgagcctgccttcctcaccacctagccatagtctcaaacctgtggggaaggaggttttctccctgcccgggaagaggacagataactgatttccgttcttttgactgtgttttaaaattctctttctaaacacagagtgttgggcctggtttgtttctgacaaagttacagtcctgggcctgtaatgaatgtcggcggcgctggggttgcagggaaaagacaaatcctcaaagcgtggacgtgtgtccccatggcttgtggatcagctaagctcgggatcatttccataagtctgcttttcagggattctctgctggtgctggtgcaaggacttctgttccaaaggctgggaaaaactaagctgtcccagcccctcccatttcttgggcagggctcttttcctgttgtgtcttcccccagggcctgtcctgtaccgagctctgtctgttccagccttcatccttcctggctgttgcttttcctcttaagggcctcagaactcttgctcttcctgggctgagggggaatgagtgttcttgccatttgccagcctaatgcgcatgctttctgcctctggtaacaggagtgagtgagcccctcagacctgcactctgggtgtctcctgctttcaaaggttcttaatagtgaatgctttaaaattaaagtcatcacgaaatggaagttttcccagggtggaaaataagaggaagtgctgctgtaattgggagcacaaggggcctcccaaaaaggagccccacctcagcatcactgccttaatcgtggcctccctggggtgggtggggttctctcctccctccctccctcctcctggggtgggagggcgctcctgttcccatctctgtgttccctggaggcaggtatcacaaagcatttgtgaattgctttaggtgcagggacaccacccactcaggactcttccccatcatcccttccattgccacaccctagatccagcctcaggaactaacaagttttgagaaaagcaggtagtagagcagcagcttcgtgctctcagcggtggctggctggcatttttctctagcgttgtggtgccaccttcccttcttgtcccaaggttataaggccttgtctttctctttggaatcataaagtggaacagagtccccagaactcatgtggccatttccgccagcatcactccccggtgcctatggggtcccggtgtacctaaagggagaaggaccccatgtgctagccagaaatatactgtctcttgaaggaaagcaggagctcagactcttagagccagctgtggcttcggacccaaggcctgacctaggctgctatcctaatattgcaggaggggcctctcttccaagccccaccctaagggttagcccttggccaaatcttttgccgtctaggcccagccaggcttttctgactaaataagcaataagaggctctaagctgactgagttgcaaggaccctttccgccctcccttggatctccatgtttttccagatggcggaagagcatgtgccaccccctttcctaacagacttgtccaagtgcttggcgtgggacccatgaccaaagcccaggatggcttggtgggagtgtccctgctgcatctgcatgaagcccctgctttttaggcctcactcccatcagaaccctgcctgcccacctgcaactcccccccaacaatgccattcccacttgccccagagaagctactcggccaaacctagccagggtctgttcttgtggaccagagccagcctagtcattatttgctgtcgggtttccagtttcaccgtgtgttagggtgagggatgattgtaaaatttgctcctcaaaggaatcaggccagactcaattttggagggcaagacagggaggaggccgcttcatcccagactctcttctagggcttcccaccatcagcccctcccacttgagactggtctttgggaggcaataggccaccatgcctggtcagcaccaattcaagccatgccaggaatctgcctacctgccaggttcagttcttttaaggtgcctcttcagggacacagtgtgtctctctgattgggcttctaaatcaaaagcctgatgttcgtgtccctctcatagggggagctttggacacaggaccagtttggaaaagggtcaggtaagggtttccactctgcacattgtagagggaacactctgtaggcccatgggtcccttactagagaggttgagtgaatttgccttcagttaacatgggaccttctgtttagcttcctcttgcttcccaaagattttaagcattttgtaaatgtataaactcacctctggtaacagtggcccagacgctgctttgtgctaaaagcatgggaaatgtaaaggcagtctttctctgggaaatggatgctattctattctgctgcccctacctgttcctgaggcctcatttagaaagaaaatcccctcagaaggctgtctggcacccagtgtcctagccaggccaagtatatgagaaaggtaagtccattttccccttcaggtcctcagtggattacttaaccactgctgtccctcggtccctttttcctaaacgggtttagttctgtcttttttctccttttttctaaatgctggtaaatatttacattcagccagggaagaggaggccagaggtcgggccagctgccccattcttttaacgttgtagggcctgcccatggagcggaccctcctctttgggcctcgtgagcttttttgcttatcatgttccatttcgtgccgctttcccccttcaagatgccatttggagggtaggggatctgcttcccactgtgactgggctatgggattctgactaccttgcttacagattcatggtttgataaatttgttgtattcaaaaacttgaaatgcaggacgccattaagtgtctgtttatatttttggaatatttgtattacttacaattaattaataaaagtgggtttaaaaaacctttccaggaatgtg

SEQ ID NO: 3922 - protein, 111 aa, Homosapiens [sequence omitted]

SEQ ID NO: 3923 - DNA, 3165 bp, Homosapiens
ggggagggacctgagaaagaccctcatcctggacaactcgcctgcttcttacatattccaccccgagaatgcagtgcctgtgcagtcctggtttgatgacatggcagacactgagttgctgaacctgatcccaatctttgaggagctggggtgctgagcctgccttcctcaccacctagccatagtctcaaacctgtggggaaggaggttttctccctgcccgggaagaggacagataactgatttccgttcttttgactgtgttttaaaattctctttctaaacacagagtgttgggcctggtttgtttctgacaaagttacagtcctgggcctgtaatgaatgtcggcggcgctggggttgcagggaaaagacaaatcctcaaagcgtggacgtgtgtccccatggcttgtggatcagctaagctcgggatcatttccataagtctgcttttcagggattctctgctggtgctggtgcaaggacttctgttccaaaggctgggaaaaactaagctgtcccagcccctcccatttcttgggcagggctcttttcctgttgtgtcttcccccagggcctgtcctgtaccgagctctgtctgttccagccttcatccttcctggctgttgcttttcctcttaagggcctcagaactcttgctcttcctgggctgagggggaatgagtgttcttgccatttgccagcctaatgcgcatgctttctgcctctggtaacaggagtgagtgagcccctcagacctgcactctgggtgtctcctgctttcaaaggttcttaatagtgaatgctttaaaattaaagtcatcacgaaatggaagttttcccagggtggaaaataagaggaagtgctgctgtaattgggagcacaaggggcctcccaaaaaggagccccacctcagcatcactgccttaatcgtggcctccctggggtgggtggggttctctcctccctccctccctcctcctggggtgggagggcgctcctgttcccatctctgtgttccctggaggcaggtatcacaaagcatttgtgaattgctttaggtgcagggacaccacccactcaggactcttccccatcatcccttccattgccacaccctagatccagcctcaggaactaacaagttttgagaaaagcaggtagtagagcagcagcttcgtgctctcagcggtggctggctggcatttttctctagcgttgtggtgccaccttcccttcttgtcccaaggttataaggccttgtctttctctttggaatcataaagtggaacagagtccccagaactcatgtggccatttccgccagcatcactccccggtgcctatggggtcccggtgtacctaaagggagaaggaccccatgtgctagccagaaatatactgtctcttgaaggaaagcaggagctcagactcttagagccagctgtggcttcggacccaaggcctgacctaggctgctatcctaatattgcaggaggggcctctcttccaagccccaccctaagggttagcccttggccaaatcttttgccgtctaggcccagccaggcttttctgactaaataagcaataagaggctctaagctgactgagttgcaaggaccctttccgccctcccttggatctccatgtttttccagatggcggaagagcatgtgccaccccctttcctaacagacttgtccaagtgcttggcgtgggacccatgaccaaagcccaggatggcttggtgggagtgtccctgctgcatctgcatgaagcccctgctttttaggcctcactcccatcagaaccctgcctgcccacctgcaactcccccccaacaatgccattcccacttgccccagagaagctactcggccaaacctagccagggtctgttcttgtggaccagagccagcctagtcattatttgctgtcgggtttccagtttcaccgtgtgttagggtgagggatgattgtaaaatttgctcctcaaaggaatcaggccagactcaattttggagggcaagacagggaggaggccgcttcatcccagactctcttctagggcttcccaccatcagcccctcccacttgagactggtctttgggaggcaataggccaccatgcctggtcagcaccaattcaagccatgccaggaatctgcctacctgccaggttcagttcttttaaggtgcctcttcagggacacagtgtgtctctctgattgggcttctaaatcaaaagcctgatgttcgtgtccctctcatagggggagctttggacacaggaccagtttggaaaagggtcaggtaagggtttccactctgcacattgtagagggaacactctgtaggcccatgggtcccttactagagaggttgagtgaatttgccttcagttaacatgggaccttctgtttagcttcctcttgcttcccaaagattttaagcattttgtaaatgtataaactcacctctggtaacagtggcccagacgctgctttgtgctaaaagcatgggaaatgtaaaggcagtctttctctgggaaatggatgctattctattctgctgcccctacctgttcctgaggcctcatttagaaagaaaatcccctcagaaggctgtctggcacccagtgtcctagccaggccaagtatatgagaaaggtaagtccattttccccttcaggtcctcagtggattacttaaccactgctgtccctcggtccctttttcctaaacgggtttagttctgtcttttttctccttttttctaaatgctggtaaatatttacattcagccagggaagaggaggccagaggtcgggccagctgccccattcttttaacgttgtagggcctgcccatggagcggaccctcctctttgggcctcgtgagcttttttgcttatcatgttccatttcgtgccgctttcccccttcaagatgccatttggagggtaggggatctgcttcccactgtgactgggctatgggattctgactaccttgcttacagattcatggtttgataaatttgttgtattcaaaaacttgaaatgcaggacgccattaagtgtctgtttatatttttggaatatttgtattacttacaattaattaataaaagtgggtttaaaaaacctttccaggaatgtg

SEQ ID NO: 3924 - protein, 111 aa, Homosapiens [sequence omitted]

SEQ ID NO: 3925 - DNA, 4308 bp, Homosapiens
ggttgaggttgggaccactgatccattggaagcctggtgaggggtacagccagttctccgggtctgtggggtctcagggggccgcaggcttccagccaggtagcccaggaggctgggctgcaggggttgagagctccttgctgctgtgtaactggtgaaggtacccagtactgcaaaccttcatcacagggatgcctccaacaggctgctctgctcttcctcaggtgtatgtgctcaagaggccttatgtggatgagttcctgagacgcatgggggaactctttgaatgtgttctcttcactgccagcctggccaagtatgccgaccctgtgacagacctgctggaccggtgtggggtgttccgggcccgcctattccgtgagtcttgcgtgttccaccagggctgctacgtcaaggacctcagccgcctggggagggacctgagaaagaccctcatcctggacaactcgcctgcttcttacatattccaccccgagaatgcagtgcctgtgcagtcctggtttgatgacatggcagacactgagttgctgaacctgatcccaatctttgaggagctgagcggagcagaggacgtctacaccagccttgggcagctgcgggccccttagcctgccctgcttccaagcgacggccatcccagtaggggactttcccacactgtgcctttacgatcagcgtgacagagtagaagctggagtgcctcaccacacggcccggaaacagcgggaagtaactggaaagagctttaggacagcttagatgccgagtgggcgaatgccagaccaatgatacccagagctacctgccgccaacttgttgagatgtgtgtttgactgtgagagagtgtgtgtttgtgtgtgtgttttgccatgaactgtggccccagtgtatagtgtttcagtgggggagaagctgaaagaccaagactcttcccaagttagcttgtctcctctcctgtcaccctaagagccactgagttgtgtagggatgaagactattgaagactccattgccaaaccatggcctttcctcagtgttgtaaggcctatgccaaggataaaggaagggtatgcctttgggtactccaggcacacacctttctgaaatccttctccagccagctgctgcagacaaaagatcacatttctgggaagatgagaacttgtttccagaccagcatccagtggccatcaggtcttgtggcccaaaggctatgcttgcctccggctgagtgcctgggataggccttttctatgtctccccaaggctggggtgctgagcctgccttcctcaccacctagccatagtctcaaacctgtggggaaggaggttttctccctgcccgggaagaggacagataactgatttccgttcttttgactgtgttttaaaattctctttctaaacacagagtgttgggcctggtttgtttctgacaaagttacagtcctgggcctgtaatgaatgtcggcggcgctggggttgcagggaaaagacaaatcctcaaagcgtggacgtgtgtccccatggcttgtggatcagctaagctcgggatcatttccataagtctgcttttcagggattctctgctggtgctggtgcaaggacttctgttccaaaggctgggaaaaactaagctgtcccagcccctcccatttcttgggcagggctcttttcctgttgtgtcttcccccagggcctgtcctgtaccgagctctgtctgttccagccttcatccttcctggctgttgcttttcctcttaagggcctcagaactcttgctcttcctgggctgagggggaatgagtgttcttgccatttgccagcctaatgcgcatgctttctgcctctggtaacaggagtgagtgagcccctcagacctgcactctgggtgtctcctgctttcaaaggttcttaatagtgaatgctttaaaattaaagtcatcacgaaatggaagttttcccagggtggaaaataagaggaagtgctgctgtaattgggagcacaaggggcctcccaaaaaggagccccacctcagcatcactgccttaatcgtggcctccctggggtgggtggggttctctcctccctccctccctcctcctggggtgggagggcgctcctgttcccatctctgtgttccctggaggcaggtatcacaaagcatttgtgaattgctttaggtgcagggacaccacccactcaggactcttccccatcatcccttccattgccacaccctagatccagcctcaggaactaacaagttttgagaaaagcaggtagtagagcagcagcttcgtgctctcagcggtggctggctggcatttttctctagcgttgtggtgccaccttcccttcttgtcccaaggttataaggccttgtctttctctttggaatcataaagtggaacagagtccccagaactcatgtggccatttccgccagcatcactccccggtgcctatggggtcccggtgtacctaaagggagaaggaccccatgtgctagccagaaatatactgtctcttgaaggaaagcaggagctcagactcttagagccagctgtggcttcggacccaaggcctgacctaggctgctatcctaatattgcaggaggggcctctcttccaagccccaccctaagggttagcccttggccaaatcttttgccgtctaggcccagccaggcttttctgactaaataagcaataagaggctctaagctgactgagttgcaaggaccctttccgccctcccttggatctccatgtttttccagatggcggaagagcatgtgccaccccctttcctaacagacttgtccaagtgcttggcgtgggacccatgaccaaagcccaggatggcttggtgggagtgtccctgctgcatctgcatgaagcccctgctttttaggcctcactcccatcagaaccctgcctgcccacctgcaactcccccccaacaatgccattcccacttgccccagagaagctactcggccaaacctagccagggtctgttcttgtggaccagagccagcctagtcattatttgctgtcgggtttccagtttcaccgtgtgttagggtgagggatgattgtaaaatttgctcctcaaaggaatcaggccagactcaattttggagggcaagacagggaggaggccgcttcatcccagactctcttctagggcttcccaccatcagcccctcccacttgagactggtctttgggaggcaataggccaccatgcctggtcagcaccaattcaagccatgccaggaatctgcctacctgccaggttcagttcttttaaggtgcctcttcagggacacagtgtgtctctctgattgggcttctaaatcaaaagcctgatgttcgtgtccctctcatagggggagctttggacacaggaccagtttggaaaagggtcaggtaagggtttccactctgcacattgtagagggaacactctgtaggcccatgggtcccttactagagaggttgagtgaatttgccttcagttaacatgggaccttctgtttagcttcctcttgcttcccaaagattttaagcattttgtaaatgtataaactcacctctggtaacagtggcccagacgctgctttgtgctaaaagcatgggaaatgtaaaggcagtctttctctgggaaatggatgctattctattctgctgcccctacctgttcctgaggcctcatttagaaagaaaatcccctcagaaggctgtctggcacccagtgtcctagccaggccaagtatatgagaaaggtaagtccattttccccttcaggtcctcagtggattacttaaccactgctgtccctcggtccctttttcctaaacgggtttagttctgtcttttttctccttttttctaaatgctggtaaatatttacattcagccagggaagaggaggccagaggtcgggccagctgccccattcttttaacgttgtagggcctgcccatggagcggaccctcctctttgggcctcgtgagcttttttgcttatcatgttccatttcgtgccgctttcccccttcaagatgccatttggagggtaggggatctgcttcccactgtgactgggctatgggattctgactaccttgcttacagattcatggtttgataaatttgttgtattcaaaaacttgaaatgcaggacgccattaagtgtctgtttatatttttggaatatttgtattacttacaattaattaataaaagtgggtttaaaaaacctttccaggaatgtg

SEQ ID NO: 3926 - protein, 145 aa, Homosapiens
MPPTGCSALPQVYVLKRPYVDEFLRRMGELFECVLFTASLAKYADPVTDLLDRCGVFRARLFRESCVFHQGCYVKDLSRLGRDLRKTLILDNSPASYIFHPENAVPVQSWFDDMADTELLNLIPIFEELSGAEDVYTSLGQLRAP

SEQ ID NO: 3927 - DNA, 5002 bp, Homosapiens
caaagctcccgactgtccgcagccccggccgctcacagatggagggtcccagggcctaggacgcagcccccagcgggaagctccagctggccgtgaagaggccgagtcgagagccgggaggcgcgcgggggtgggcgctgcagccgcgggttgtttatctggagtacggaggggaggggggagcctggaaaccgccccgtgtcccatttcctcctcttgttttcgctccggattctccatgttggacccaaactgaggagcccggagctgccgctgggggatcggggccgggggcacccgggggagccgctgcccgggccgcccgccctttgtacaggccgcctcccttcccggtccggggaggaaacgagaggggggatgtgaacagctgtggaagtcggagtctcgggagccggagcgggcccccgcccaggccccccagcccagcccagcccgcgcgcccgcccgtcctcccgcccagccagcccgggcccgcgggattgttagatggaacacggctccatcatcacccaggcgcggagggaagacgccctggtgctcaccaagcaaggcctggtctccaagtcctctcctaagaagcctcgtggacgtaacatcttcaaggcccttttctgctgttttcgcgcccagcatgttggccagtcaagttcctccactgagctcgctgcgtataaggaggaagcaaacaccattgctaagtcggatctgctccagtgtctccagtaccagttctaccagatcccagggacctgcctgctcccagaggtgacagaggaagatcaaggaaggatctgtgtggtcattgacctcgatgaaacccttgtgcatagctcctttaagccaatcaacaatgctgacttcatagtgcctatagagattgaggggaccactcaccaggtgtatgtgctcaagaggccttatgtggatgagttcctgagacgcatgggggaactctttgaatgtgttctcttcactgccagcctggccaagtatgccgaccctgtgacagacctgctggaccggtgtggggtgttccgggcccgcctattccgtgagtcttgcgtgttccaccagggctgctacgtcaaggacctcagccgcctggggagggacctgagaaagaccctcatcctggacaactcgcctgcttcttacatattccaccccgagaatgcagtgcctgtgcagtcctggtttgatgacatggcagacactgagttgctgaacctgatcccaatctttgaggagctgagcggagcagaggacgtctacaccagccttgggcagctgcgggccccttagcctgccctgcttccaagcgacggccatcccagtaggggactttcccacactgtgcctttacgatcagcgtgacagagtagaagctggagtgcctcaccacacggcccggaaacagcgggaagtaactggaaagagctttaggacagcttagatgccgagtgggcgaatgccagaccaatgatacccagagctacctgccgccaacttgttgagatgtgtgtttgactgtgagagagtgtgtgtttgtgtgtgtgttttgccatgaactgtggccccagtgtatagtgtttcagtgggggagaagctgaaagaccaagactcttcccaagttagcttgtctcctctcctgtcaccctaagagccactgagttgtgtagggatgaagactattgaagactccattgccaaaccatggcctttcctcagtgttgtaaggcctatgccaaggataaaggaagggtatgcctttgggtactccaggcacacacctttctgaaatccttctccagccagctgctgcagacaaaagatcacatttctgggaagatgagaacttgtttccagaccagcatccagtggccatcaggtcttgtggcccaaaggctatgcttgcctccggctgagtgcctgggataggccttttctatgtctccccaaggctggggtgctgagcctgccttcctcaccacctagccatagtctcaaacctgtggggaaggaggttttctccctgcccgggaagaggacagataactgatttccgttcttttgactgtgttttaaaattctctttctaaacacagagtgttgggcctggtttgtttctgacaaagttacagtcctgggcctgtaatgaatgtcggcggcgctggggttgcagggaaaagacaaatcctcaaagcgtggacgtgtgtccccatggcttgtggatcagctaagctcgggatcatttccataagtctgcttttcagggattctctgctggtgctggtgcaaggacttctgttccaaaggctgggaaaaactaagctgtcccagcccctcccatttcttgggcagggctcttttcctgttgtgtcttcccccagggcctgtcctgtaccgagctctgtctgttccagccttcatccttcctggctgttgcttttcctcttaagggcctcagaactcttgctcttcctgggctgagggggaatgagtgttcttgccatttgccagcctaatgcgcatgctttctgcctctggtaacaggagtgagtgagcccctcagacctgcactctgggtgtctcctgctttcaaaggttcttaatagtgaatgctttaaaattaaagtcatcacgaaatggaagttttcccagggtggaaaataagaggaagtgctgctgtaattgggagcacaaggggcctcccaaaaaggagccccacctcagcatcactgccttaatcgtggcctccctggggtgggtggggttctctcctccctccctccctcctcctggggtgggagggcgctcctgttcccatctctgtgttccctggaggcaggtatcacaaagcatttgtgaattgctttaggtgcagggacaccacccactcaggactcttccccatcatcccttccattgccacaccctagatccagcctcaggaactaacaagttttgagaaaagcaggtagtagagcagcagcttcgtgctctcagcggtggctggctggcatttttctctagcgttgtggtgccaccttcccttcttgtcccaaggttataaggccttgtctttctctttggaatcataaagtggaacagagtccccagaactcatgtggccatttccgccagcatcactccccggtgcctatggggtcccggtgtacctaaagggagaaggaccccatgtgctagccagaaatatactgtctcttgaaggaaagcaggagctcagactcttagagccagctgtggcttcggacccaaggcctgacctaggctgctatcctaatattgcaggaggggcctctcttccaagccccaccctaagggttagcccttggccaaatcttttgccgtctaggcccagccaggcttttctgactaaataagcaataagaggctctaagctgactgagttgcaaggaccctttccgccctcccttggatctccatgtttttccagatggcggaagagcatgtgccaccccctttcctaacagacttgtccaagtgcttggcgtgggacccatgaccaaagcccaggatggcttggtgggagtgtccctgctgcatctgcatgaagcccctgctttttaggcctcactcccatcagaaccctgcctgcccacctgcaactcccccccaacaatgccattcccacttgccccagagaagctactcggccaaacctagccagggtctgttcttgtggaccagagccagcctagtcattatttgctgtcgggtttccagtttcaccgtgtgttagggtgagggatgattgtaaaatttgctcctcaaaggaatcaggccagactcaattttggagggcaagacagggaggaggccgcttcatcccagactctcttctagggcttcccaccatcagcccctcccacttgagactggtctttgggaggcaataggccaccatgcctggtcagcaccaattcaagccatgccaggaatctgcctacctgccaggttcagttcttttaaggtgcctcttcagggacacagtgtgtctctctgattgggcttctaaatcaaaagcctgatgttcgtgtccctctcatagggggagctttggacacaggaccagtttggaaaagggtcaggtaagggtttccactctgcacattgtagagggaacactctgtaggcccatgggtcccttactagagaggttgagtgaatttgccttcagttaacatgggaccttctgtttagcttcctcttgcttcccaaagattttaagcattttgtaaatgtataaactcacctctggtaacagtggcccagacgctgctttgtgctaaaagcatgggaaatgtaaaggcagtctttctctgggaaatggatgctattctattctgctgcccctacctgttcctgaggcctcatttagaaagaaaatcccctcagaaggctgtctggcacccagtgtcctagccaggccaagtatatgagaaaggtaagtccattttccccttcaggtcctcagtggattacttaaccactgctgtccctcggtccctttttcctaaacgggtttagttctgtcttttttctccttttttctaaatgctggtaaatatttacattcagccagggaagaggaggccagaggtcgggccagctgccccattcttttaacgttgtagggcctgcccatggagcggaccctcctctttgggcctcgtgagcttttttgcttatcatgttccatttcgtgccgctttcccccttcaagatgccatttggagggtaggggatctgcttcccactgtgactgggctatgggattctgactaccttgcttacagattcatggtttgataaatttgttgtattcaaaaacttgaaatgcaggacgccattaagtgtctgtttatatttttggaatatttgtattacttacaattaattaataaaagtgggtttaaaaaacctttccaggaatgtg

SEQ ID NO: 3928 - protein, 271 aa, Homosapiens
MEHGSIITQARREDALVLTKQGLVSKSSPKKPRGRNIFKALFCCFRAQHVGQSSSSTELAAYKEEANTIAKSDLLQCLQYQFYQIPGTCLLPEVTEEDQGRICVVIDLDETLVHSSFKPINNADFIVPIEIEGTTHQVYVLKRPYVDEFLRRMGELFECVLFTASLAKYADPVTDLLDRCGVFRARLFRESCVFHQGCYVKDLSRLGRDLRKTLILDNSPASYIFHPENAVPVQSWFDDMADTELLNLIPIFEELSGAEDVYTSLGQLRAP

SEQ ID NO: 3929 - DNA, 3302 bp, Homosapiens
caaagctcccgactgtccgcagccccggccgctcacagatggagggtcccagggcctaggacgcagcccccagcgggaagctccagctggccgtgaagaggccgagtcgagagccgggaggcgcgcgggggtgggcgctgcagccgcgggttgtttatctggagtacggaggggaggggggagcctggaaaccgccccgtgtcccatttcctcctcttgttttcgctccggattctccatgttggacccaaactgaggagcccggagctgccgctgggggatcggggccgggggcacccgggggagccgctgcccgggccgcccgccctttgtacaggccgcctcccttcccggtccggggaggaaacgagaggggggatgtgaacagctgtggaagtcggagtctcgggagccggagcgggcccccgcccaggccccccagcccagcccagcccgcgcgcccgcccgtcctcccgcccagccagcccgggcccgcgggattgttagatggaacacggctccatcatcacccaggcgcggagggaagacgccctggtgctcaccaagcaaggcctggtctccaagtcctctcctaagaagcctcgtggacgtaacatcttcaaggcccttttctgctgttttcgcgcccagcatgttggccagtcaagttcctccactgagctcgctgcgtataaggaggaagcaaacaccattgctaagtcggatctgctccagtgtctccagtaccagttctaccagatcccagggacctgcctgctcccagaggtgacagaggaagatcaaggaaggatctgtgtggtcattgacctcgatgaaacccttgtgcatagctcctttaagccaatcaacaatgctgacttcatacccctcagacctgcactctgggtgtctcctgctttcaaaggttcttaatagtgaatgctttaaaattaaagtcatcacgaaatggaagttttcccagggtggaaaataagaggaagtgctgctgtaattgggagcacaaggggcctcccaaaaaggagccccacctcagcatcactgccttaatcgtggcctccctggggtgggtggggttctctcctccctccctccctcctcctggggtgggagggcgctcctgttcccatctctgtgttccctggaggcaggtatcacaaagcatttgtgaattgctttaggtgcagggacaccacccactcaggactcttccccatcatcccttccattgccacaccctagatccagcctcaggaactaacaagttttgagaaaagcaggtagtagagcagcagcttcgtgctctcagcggtggctggctggcatttttctctagcgttgtggtgccaccttcccttcttgtcccaaggttataaggccttgtctttctctttggaatcataaagtggaacagagtccccagaactcatgtggccatttccgccagcatcactccccggtgcctatggggtcccggtgtacctaaagggagaaggaccccatgtgctagccagaaatatactgtctcttgaaggaaagcaggagctcagactcttagagccagctgtggcttcggacccaaggcctgacctaggctgctatcctaatattgcaggaggggcctctcttccaagccccaccctaagggttagcccttggccaaatcttttgccgtctaggcccagccaggcttttctgactaaataagcaataagaggctctaagctgactgagttgcaaggaccctttccgccctcccttggatctccatgtttttccagatggcggaagagcatgtgccaccccctttcctaacagacttgtccaagtgcttggcgtgggacccatgaccaaagcccaggatggcttggtgggagtgtccctgctgcatctgcatgaagcccctgctttttaggcctcactcccatcagaaccctgcctgcccacctgcaactcccccccaacaatgccattcccacttgccccagagaagctactcggccaaacctagccagggtctgttcttgtggaccagagccagcctagtcattatttgctgtcgggtttccagtttcaccgtgtgttagggtgagggatgattgtaaaatttgctcctcaaaggaatcaggccagactcaattttggagggcaagacagggaggaggccgcttcatcccagactctcttctagggcttcccaccatcagcccctcccacttgagactggtctttgggaggcaataggccaccatgcctggtcagcaccaattcaagccatgccaggaatctgcctacctgccaggttcagttcttttaaggtgcctcttcagggacacagtgtgtctctctgattgggcttctaaatcaaaagcctgatgttcgtgtccctctcatagggggagctttggacacaggaccagtttggaaaagggtcaggtaagggtttccactctgcacattgtagagggaacactctgtaggcccatgggtcccttactagagaggttgagtgaatttgccttcagttaacatgggaccttctgtttagcttcctcttgcttcccaaagattttaagcattttgtaaatgtataaactcacctctggtaacagtggcccagacgctgctttgtgctaaaagcatgggaaatgtaaaggcagtctttctctgggaaatggatgctattctattctgctgcccctacctgttcctgaggcctcatttagaaagaaaatcccctcagaaggctgtctggcacccagtgtcctagccaggccaagtatatgagaaaggtaagtccattttccccttcaggtcctcagtggattacttaaccactgctgtccctcggtccctttttcctaaacgggtttagttctgtcttttttctccttttttctaaatgctggtaaatatttacattcagccagggaagaggaggccagaggtcgggccagctgccccattcttttaacgttgtagggcctgcccatggagcggaccctcctctttgggcctcgtgagcttttttgcttatcatgttccatttcgtgccgctttcccccttcaagatgccatttggagggtaggggatctgcttcccactgtgactgggctatgggattctgactaccttgcttacagattcatggtttgataaatttgttgtattcaaaaacttgaaatgcaggacgccattaagtgtctgtttatatttttggaatatttgtattacttacaattaattaataaaagtgggtttaaaaaacctttccaggaatgtg

SEQ ID NO: 3930 - protein, 141 aa, Homosapiens
MEHGSIITQARREDALVLTKQGLVSKSSPKKPRGRNIFKALFCCFRAQHVGQSSSSTELAAYKEEANTIAKSDLLQCLQYQFYQIPGTCLLPEVTEEDQGRICVVIDLDETLVHSSFKPINNADFIPLRPALWVSPAFKGS

SEQ ID NO: 3931 - DNA, 731 bp, Homosapiens
aagcgacggccatcccatgcctcaccacacggcccggaaacagcgggaagtaactggaaagagctttaggacagcttagatgccgagtgggcgaatgccagaccaatgatacccagagctacctgccgccaacttgttgagatgtgtgtttgactgtgagagagtgtgtgtttgtgtgtgtgttttgccatgaactgtggccccagtgtatagtgtttcagtgggggagaagctgaaagaccaagactcttcccaagttagcttgtctcctctcctgtcaccctaagagccactgagttgtgtagggatgaagactattgaagactccattgccaaaccatggcctttcctcagtgttgtaaggcctatgccaaggataaaggaagggtatgcctttgggtactccaggcacacacctttctgaaatccttctccagccagctgctgcagacaaaagatcacatttctgggaagatgagaacttgtttccagaccagcatccagtggccatcaggtcttgtggcccaaaggctatgcttgcctccggctgagtgcctgggataggccttttctatgtctccccaaggctggggtgctgagcctgccttcctcaccacctagccatagtctcaaacctgtggggaaggaggttttctccctgcccgggaagaggacagataactgatttccgttcttttgactgtgttttaaaattctctttctaaacacag

SEQ ID NO: 3932 - protein, 74 aa, Homosapiens
MAFPQCCKAYAKDKGRVCLWVLQAHTFLKSFSSQLLQTKDHISGKMRTCFQTSIQWPSGLVAQRLCLPPAECLG

SEQ ID NO: 3933 - DNA, 1432 bp, Homosapiens
ggttgaggttgggaccactgatccattggaagcctggtgaggggtacagccagttctccgggtctgtggggtctcagggggccgcaggcttccagccaggtagcccaggaggctgggctgcaggggttgagagctccttgctgctgtgtaactggtgaaggtacccagtactgcaaaccttcatcacagggatgcctccaacaggctgctctgctcttcctcaggtgtatgtgctcaagaggccttatgtggatgagttcctgagacgcatgggggaactctttgaatgtgttctcttcactgccagcctggccaagtatgccgaccctgtgacagacctgctggaccggtgtggggtgttccgggcccgcctattccgtgagtcttgcgtgttccaccagggctgctacgtcaaggacctcagccgcctggggagggacctgagaaagaccctcatcctggacaactcgcctgcttcttacatattccaccccgagaatgcagtgcctgtgcagtcctggtttgatgacatggcagacactgagttgctgaacctgatcccaatctttgaggagctgagcggagcagaggacgtctacaccagccttgggcagctgcgggccccttagcctgccctgcttccaagcgacggccatcccagtaggggactttcccacactgtgcctttacgatcagcgtgacagagtagaagctggagtgcctcaccacacggcccggaaacagcgggaagtaactggaaagagctttaggacagcttagatgccgagtgggcgaatgccagaccaatgatacccagagctacctgccgccaacttgttgagatgtgtgtttgactgtgagagagtgtgtgtttgtgtgtgtgttttgccatgaactgtggccccagtgtatagtgtttcagtgggggagaagctgaaagaccaagactcttcccaagttagcttgtctcctctcctgtcaccctaagagccactgagttgtgtagggatgaagactattgaagactccattgccaaaccatggcctttcctcagtgttgtaaggcctatgccaaggataaaggaagggtatgcctttgggtactccaggcacacacctttctgaaatccttctccagccagctgctgcagacaaaagatcacatttctgggaagatgagaacttgtttccagaccagcatccagtggccatcaggtcttgtggcccaaaggctatgcttgcctccggctgagtgcctgggataggccttttctatgtctccccaaggctggggtgctgagcctgccttcctcaccacctagccatagtctcaaacctgtggggaaggaggttttctccctgcccgggaagaggacagataactgatttccgttcttttgactgtgttttaaaattctctttctaaacacag

SEQ ID NO: 3934 - protein, 145 aa, Homosapiens; identical to SEQ ID NO: 3926

SEQ ID NO: 3935 - DNA, 2126 bp, Homosapiens
caaagctcccgactgtccgcagccccggccgctcacagatggagggtcccagggcctaggacgcagcccccagcgggaagctccagctggccgtgaagaggccgagtcgagagccgggaggcgcgcgggggtgggcgctgcagccgcgggttgtttatctggagtacggaggggaggggggagcctggaaaccgccccgtgtcccatttcctcctcttgttttcgctccggattctccatgttggacccaaactgaggagcccggagctgccgctgggggatcggggccgggggcacccgggggagccgctgcccgggccgcccgccctttgtacaggccgcctcccttcccggtccggggaggaaacgagaggggggatgtgaacagctgtggaagtcggagtctcgggagccggagcgggcccccgcccaggccccccagcccagcccagcccgcgcgcccgcccgtcctcccgcccagccagcccgggcccgcgggattgttagatggaacacggctccatcatcacccaggcgcggagggaagacgccctggtgctcaccaagcaaggcctggtctccaagtcctctcctaagaagcctcgtggacgtaacatcttcaaggcccttttctgctgttttcgcgcccagcatgttggccagtcaagttcctccactgagctcgctgcgtataaggaggaagcaaacaccattgctaagtcggatctgctccagtgtctccagtaccagttctaccagatcccagggacctgcctgctcccagaggtgacagaggaagatcaaggaaggatctgtgtggtcattgacctcgatgaaacccttgtgcatagctcctttaagccaatcaacaatgctgacttcatagtgcctatagagattgaggggaccactcaccaggtgtatgtgctcaagaggccttatgtggatgagttcctgagacgcatgggggaactctttgaatgtgttctcttcactgccagcctggccaagtatgccgaccctgtgacagacctgctggaccggtgtggggtgttccgggcccgcctattccgtgagtcttgcgtgttccaccagggctgctacgtcaaggacctcagccgcctggggagggacctgagaaagaccctcatcctggacaactcgcctgcttcttacatattccaccccgagaatgcagtgcctgtgcagtcctggtttgatgacatggcagacactgagttgctgaacctgatcccaatctttgaggagctgagcggagcagaggacgtctacaccagccttgggcagctgcgggccccttagcctgccctgcttccaagcgacggccatcccagtaggggactttcccacactgtgcctttacgatcagcgtgacagagtagaagctggagtgcctcaccacacggcccggaaacagcgggaagtaactggaaagagctttaggacagcttagatgccgagtgggcgaatgccagaccaatgatacccagagctacctgccgccaacttgttgagatgtgtgtttgactgtgagagagtgtgtgtttgtgtgtgtgttttgccatgaactgtggccccagtgtatagtgtttcagtgggggagaagctgaaagaccaagactcttcccaagttagcttgtctcctctcctgtcaccctaagagccactgagttgtgtagggatgaagactattgaagactccattgccaaaccatggcctttcctcagtgttgtaaggcctatgccaaggataaaggaagggtatgcctttgggtactccaggcacacacctttctgaaatccttctccagccagctgctgcagacaaaagatcacatttctgggaagatgagaacttgtttccagaccagcatccagtggccatcaggtcttgtggcccaaaggctatgcttgcctccggctgagtgcctgggataggccttttctatgtctccccaaggctggggtgctgagcctgccttcctcaccacctagccatagtctcaaacctgtggggaaggaggttttctccctgcccgggaagaggacagataactgatttccgttcttttgactgtgttttaaaattctctttctaaacacag

SEQ ID NO: 3936 - protein, 271 aa, Homosapiens; identical to SEQ ID NO: 3928

SEQ ID NO: 3937 - DNA, 1626 bp, Homosapiens
catttgactgggactcccccatggagagaagtcctcccaggtcctctgcaaggggcatctgttccttggctatggacatgccctaaagtgccaggtggacggaagagctcctgggaccagcaggttgggagcatcaattcacgttggctagaaatgtgacttctttagtatttaccattttaacaaaatccatgataagggatttggaaggtcccatggaaaggatgaaatgacacctctctgctacccagtttctttaagacctctacggttgagaagagaggacaaaggaacacccccacctctgccatcctccgagggatttttcacagcaattccagtgctgctcagtggaaagctctgcaagtcaactgcaaacccccagccccagatgttaggcatttacaaactttgttgctgatttatcagcgctcctctgcaattttggggacaggagcaaacacaagcttaagtcaccacgcaggctgcaacccttacccaaagatgggggaaaaactccaaaggagatgcaggagggagcctcagcagtcactgtgagagcacaaagaggccaagacccagggtaggcaaaggaaggtgagaggcaccagcagggcaggaggaggagccagctataaacatgcaggcttcccgccccctgcatagcaagctatggaaggaagctccagcaagattcatgtctaagcttttcaagttaaaggcttgcctacatctacagtgaacggtgtctgaacaactttttgagggaataaggcagaatttctcccttatgcggataacaaaagagctagccatcctgaaaacttgccacatcgtaattttcagagatggtcagtctctcagaagaatccttgcaattagctatcagaacctgtccagttcggcatgtgagaaggtaatccagggcatcatcgagaggaaggggcatcaggattcatggacaacaaaaaaatctctgattcctccaaaaggcgtgtgggtcactgagctccggaagaggctgcctccaccaggtctcatttcacgttgggaggttacagcgtgggtcttgtttccttggctttcccccatctaatcccaaagccaaggtcacaacctcttagcaatggggtgacaatctcatatagagctgcaatcaacagccattcttgccaagctgatattaacatttcttttttctttttgatgttacacacaatcctgtccttgctgtaccagaaagccatttcacccatctgtctgggaagatgatccaattttggtgcttttatcatcaatgctttcagcaactttgttctacttcccctactgtaattacttttgaatcatcaacgcacccagacagccttaaacctcagagaacagaatgctaaaaaaagaaaaaaaaaacccgcaatggcaagtaacttcactaaatagccacccaagctaggagcaatttgtttctttccagaaatttacttattaataataagtacctcacactccttcttcccctttttccaaaggcaggcaaggcatggagatgggatgttgtggagaggacggagtggggagaagaaggaactccaaaaggagccaattaaaacatctgcttccccagtc

SEQ ID NO: 3938 - protein, 101 aa, Homosapiens
MRITKELAILKTCHIVIFRDGQSLRRILAISYQNLSSSACEKVIQGIIERKGHQDSWTTKKSLIPPKGVWVTELRKRLPPPGLISRWEVTAWVLFPWLSPI

SEQ ID NO: 3939 - DNA, 570 bp, Homosapiens
aggggcatcaggattcatggacaacaaaaaaatctctgattcctccaaaaggcgtgtgggtcactgagctccggaagaggctgcctccaccaggtctcatttcacgttgggaggttacagcgtgggtcttgtttccttggctttcccccatctaatcccaaagccaaggtcacaacctcttagcaatggggtgacaatctcatatagagctgcaatcaacagccattcttgccaagctgatattaacatttcttttttctttttgatgttacacacaatcctgtccttgctgtaccagaaagccatttcacccatctgtctgggaagatgatccaattttggtgcttttatcatcaatgctttcagcaactttgttctacttcccctactgtaattacttttgaatcatcaacgcacccagacagccttaaacctcagagaacagaatgctaaaaaaagaaaaaaaaaacccgcaatggcaagcatggagatgggatgttgtggagaggacggagtggggagaagaaggaactccaaaaggagccaattaaaacatctgcttccccagtc

SEQ ID NO: 3940 - protein, 34 aa, Homosapiens
MLKKEKKNPQWQAWRWDVVERTEWGEEGTPKGAN

SEQ ID NO: 3941 - DNA, 3506 bp, Homosapiens
gggcgcaggaggcccactcccccgactgggtcggctgctaccctcaggccagggtgtgcggtggagaaactgaggctctcctccagctgctctgggagaaaggaaagccggggaccccacacactggcgtctgtgtcccagaacacccagcaggggggagagcaatttaagaaataatctggttggcaaagggcgtcatgaaaatcagccatttctagagctgaggggcggtggtgtttagcccagaggacctagctagctttcagggaaaaaacggatgtggcctttcaggcagagcccagaaaaaaagacctgtgattaggagaccctaagaaccagcaaagaacttctaaatattggaggggaggtggtgtagctgcaaagagcccacacccacgctgagttagctctgacagcttctaaaggaaagggagatgcttagattatcctgagaaactggaggatctcctgagtgacctgaaaaggtcatctcactcatccgcctgtggctggagtaaaatatacggagcccatcccaggactcccagtgggagaggatgaacaatcacttctgaaactaagctcaggagaagttgaggagctttctcaagggagaagagctgccaggagaagcaagggtctctctcagtgccacttcctttccataaaccataatgatgggctctgaaattgtccaaggaaggaaacccatggcttctcagagcaaccagtaccaggggttcaagttcgtcagagagcatgttgaagttctattttattttcctccattggtcacctgctggggatgaggcataggcctagtgttgtcacctggaggaaagacatgatgcaattaacaaagctgctaatgcctcctctcaccctgacctctgctcttagcctctgtaccagcccaccctctgcatcctgcacagccagctgggccctgagaggtcctcctggccctcctcccacccgtcctttgcctgtcagatggagggtctttatgctgagatcactggagaaacagagcttcagtgcactctgtcacaccagcaatgagaaaacctttctaaaggggaaagctcacagtaggcagattcctgattattccataaatcctggagaagaaaaatataggttaacataaggattcaagaggatgacactctgtgtgttcaggcataagctaaattcactcattccgttatttagtgattttgttatttagggtgtgcctggcactgagctaggcgccggggctaccacatgaataagacagagatggcccctccctgaaccctgccgcatgcccttccactctgcctcccaggacaggaggctatgatacactttcctctcctgcaccagcatatgtctgtctccttcccagcccacccctagcaggtgttgtccccagccccagctgcttatgtctcgtgtgttctgccaagagctgcttctgtcagaaggcactaactctctggtgattgggtggtggatagaagaggtaacctaaaggcctgtccagaaaatgagatcaaagttggcagcctcctgggcccctcccaaaaaaggatatagccaccaccatttataattaattcaggccccacttcactctgtcccacctgctttctgtctctctctctctctttttttttttaagatctttttctgatatgcctggttgccccaatgcaagtctcctctttctgaagcttcctgtgccaccaggggcctgtccacctcagagacctctcaggtgcagctcagctgcatccacagggggtcctgagtccctaggccctgcacagatgtctacccaggttctcttggtctcttccatagctatgaggcctcctcattgagggtgcccaaacaccacccttaatcacaagtttgccagcctccaccttctaaccctcctagaccacatcagcccctgccttattccagtattttcctgatttcgcctatttccagcttccctcagccattcacaagcacagcctgatgctgtgcataggaagacctggcagtaagcctatggtgaacaaatatttttaatgaacaaacagaaattatggccccaaactgaaaacaccctggaagccacaaactctgttaccttcaaaagaagccagatctggaccgctgaggtttttaaaaaatgcaatgagcgaattagtgaaatcagttcatcacggacactgtgtctttcaggaaatgaagcctccgaagaaaaaagggatcctagcccctgccaaattccattctgtttcaaattagccttccagtaaaatgagggggctgtcctaactggtctttaaggtcctcctagtaccagagctctgaggctctgtatttcccctgaacaacctcttggaactctccacattctcataacagaagaaaatgcatttgtgctctgggctgaagctcagaagtgggctttcacgacagtcatttcaggcctgtttccctttttctcccttccctgaaagggcctctggtctttcccaagctgcctgagtagaaggaaacacacagctcccccagagcagagaggcccgcgagagggaaagctggcccaggcccagggcaggctcgcctctgactctgcagggacattattccctcccagccagcagggaacttctggaacttctaaacagcacatcctcgagccagcccaggcccccacagcatcctgcaccccaggtttacaagctttttaatgatggagttttgctcttacgcccaggctggaatgaagtggcatgatcttggctcactgcaacctctgccccaccaaaattcaagcaattctcctgcctcagcctcccgagtagctgggattacaggaagataactttggcagcagaatgggaagaagattggatgggagagagatcaaaggctgggagattctaagaggctgttgcagtatagtcgaggtttgtctgccagtggagtccatgtttccaccactgtcctacatggcctctcctcacgaatggctccaacctcctgggtgcgatggatgaagccgggtgcagagatggaaagagcagcccaactttcctaactggaggactgaagcgagagctctcactgtcggcctagtgtggattgactcctttccaccacattccccaaccaaggacagtctataccaagctcacagcactgaggcgctgggggagggccagcccacacctagccccgtcaatcttggtggcatggactccctcctaaagctttctcaggaggccccatttcctactgcagcggggcaagaattcaggaggagcccactcaaaggggagacagaggcagtgctccctgtgagcagctcttcctcctcagagctgtcatggacaattggagagaaaaaccgggacattctccccaaccaggatattttgtatgctttgcacttactgctgcgttcccttcatctaaaagctctaaaatttcaaataaaaaggtacaatgaaagc

SEQ ID NO: 3942 - protein, 53 aa, Homosapiens
MGRRLDGREIKGWEILRGCCSIVEVCLPVESMFPPLSYMASPHEWLQPPGCDG

SEQ ID NO: 3943 - DNA, 549 bp, Homosapiens
cctgagtagaaggaaacacacagctcccccagagcagagaggcccgcgagagggaaagctggcccaggcccagggcaggctcgcctctgactctgcagggacattattccctcccagccagcagggaacttctggaacttctaaacagcacatcctcgagccagcccaggcccccacagcatcctgcaccccaggtttacaagctttttaatgaaatcagagcaccacagccagctctagcccagagggaaagtaagaggatgtttctgcagcagctgtcctttctcctgtaactactaaactgtcgcccctcactaaagaggatggctttgcctatgctgtccccaccccttgaagcgagcttcctcctctattgggataggtaactctcttttcttcaataattctttaatgttataaaatacctgccagtgttcacatttccctgaatgatttttaattctttttccttttttagtatgtttgtttgaagtaggaatctaaacaagatctatatattgtgattaattgatatgtctccgaagtctc

SEQ ID NO: 3944 - protein, 69 aa, Homosapiens
LSRRKHTAPPEQRGPREGKLAQAQGRLASDSAGTLFPPSQQGTSGTSKQHILEPAQAPTASCTPGLQAF

SEQ ID NO: 3945 - DNA, 484 bp, Homosapiens
cttcggaggcttcatttcctgaaagacacagtgtccgtgatgaactgatttcactaattcgctcattgcattttttaaaaacctcagcggtccagatctggcttcttttgaaggtgacaacactaggcctatgcctcatccccagcaggtgaccaatggaggaaaataaaatagaacttcaacatgctctctgacgaacttgaacccctggtactggttgctctgagaagccatgggtttccttccttggacaatttcagagcccatcattatggtttatggaaaggaagtggcactgagagagacccttgcttctcctggcagctcttctcccttgagaaagctcctcaacttctcctgagcttagtttcagaagtgattgttcatcctctcccactgggagtcctgggatgggctccgtatattttactccagccacaggcggatgagtgagatgaccttttcaggtcactcaggagatcct

SEQ ID NO: 3946 - protein, 89 aa, Homosapiens [sequence omitted]

SEQ ID NO: 3947 - DNA, 722 bp, Homosapiens
gcgataagacgcacggtgttctgggaggagttacgcaggcagggttgtggttgctggctgttaccaggacaaccggaggcgattgaccgttatctgcggtttggagccgttagcgggagaggcagagatattcagaggtcttttaggatgcgctaaagggtcgtgagggctctcttaaaattttcttcacaagcggttatccagtcgtgccccgcggccctgctgctggccccggggatctgagtcgtaccctcttgtttttctctgagtcagtcttaaggtgaaatgaagtgtggcccagtggctcctcactgtcgcttctctagttttctgcctccttttagaaaattgaattgaaaagacaggatgaagtggacacagcatgtgaagacaattctttcaagaagtttggctgtcaaggaaaacagagaatgtgctaaagaacatacagacacagagcagacaggccacctttgcaaccacatggaggtttgtctgatattgaagctaaagaagctaagctggaagacagagagaccaagtcctgatgacattgtttgaacccagagatccagacatgcctgaaaactagttttaccactggacttatccgttgaatgagccaataaactctcttttatacttaaccttgggttttacctggatttttgtcattgacagctcaaaatattctaatatagaagtatacatcattaaatcaa

SEQ ID NO: 3948 - protein, 64 aa, Homosapiens
MKWTQHVKTILSRSLAVKENRECAKEHTDTEQTGHLCNHMEVCLILKLKKLSWKTERPSPDDIV

SEQ ID NO: 3949 - DNA, 455 bp, Homosapiens
gttagcgggagaggcagagatattcagaggtcttttaggatgcgctaaagggtcgtgagggctctcttaaaattttcttcacaagcggttatccagtcgtgccccgcggccctgctgctggccccggggatctgagtcgtaccctcttgtttttctctgagtcagtcttaaggtgaaatgaagtgtggcccagtggctcctcactgtcgcttctctagttttctgcctccttttagaaaatgtgctaaagaacatacagacacagagcagacaggccacctttgcaaccacatggaggtttgtctgatattgaagctaaagaagctaagctggaagacagagagaccaagtcctgatgacattgtttgaacccagagatccagacatgcctgaaaactagttttaccactggacttatccgttgaatgagccaataaactctcttttatacttaa

SEQ ID NO: 3950 - protein, 63 aa, Homosapiens
MKCGPVAPHCRFSSFLPPFRKCAKEHTDTEQTGHLCNHMEVCLILKLKKLSWKTERPSPDDIV

SEQ ID NO: 3951 - DNA, 631 bp, Homosapiens
ggtgttctgggaggagttacgcaggcagggttgtggttgctggctgttaccaggacaaccggaggcgattgaccgttatctgcggtttggagccgttagcgggagaggcagagatattcagaggtcttttaggatgcgctaaagggtcgtgagggctctcttaaaattttcttcacaagcggttatccagtcgtgccccgcggccctgctgctggccccggggatctgagtcgtaccctcttgtttttctctgagtcagtcttaaggtgaaatgaagtgtggcccagtggctcctcactgtcgcttctctagttttctgcctccttttagaaaattgaattgaaaagacaggatgaagtggacacagcatgtgaagacaattctttcaagaagtttggctgtcaaggaaaacagagaatgtgctaaagaacatacagacacagagcagacaggccacctttgcaaccacatggaggtttgtctgatattgaagctaaagaagctaagctggaagacagagagaccaagtcctgatgacattgtttgaacccagagatccagacatgcctgaaaactagttttaccactggacttatccgttgaatgagccaataaactctcttttatactt

SEQ ID NO: 3952 - protein, 64 aa, Homosapiens; identical to SEQ ID NO: 3948

SEQ ID NO: 3953 - DNA, 863 bp, Homosapiens
gaggagttacgcaggcagggttgtggttgctggctgttaccaggacaaccggaggcgattgaccgttatctgcggtttggagccgttagcgggagaggcagagatattcagaggtcttttaggatgcgctaaagggtcgtgagggctctcttaaaattttcttcacaagcggttatccagtcgtgccccgcggccctgctgctggccccggggatctgagtcgtaccctcttgtttttctctgagtcagtcttaaggtgaaatgaagtgtggcccagtggctcctcactgtcgcttctctagttttctgcctccttttagaaaatgtaagttgagaatttctaatttacatcgggatgtgttctaatgcgcttgtttttaaaactgtggaaaatttttaaaagaaaataaatctcaccagtcatccagctacccagaagtaacattttcatgcattacctattaatttttttctctgcatattttttcatagttgagataatttagggaaaaccattttgtgtccttcatatatggatgaatacaatataattttggtattaatatcatagcaacaaagaaggcattgaaggctttaaatctgtttacagtgaattgaaaagacaggatgaagtggacacagcatgtgaagacaattctttcaagaagtttggctgtcaaggaaaacagagaatgtgctaaagaacatacagacacagagcagacaggccacctttgcaaccacatggaggtttgtctgatattgaagctaaagaagctaagctggaagacagagagaccaagtcctgatgacattgtttgaacccagagatccagacatgcctgaaaactagttttaccact

SEQ ID NO: 3954 - protein, 64 aa, Homosapiens; identical to SEQ ID NO: 3948

SEQ ID NO: 3955 - DNA, 732 bp, Homosapiens
gagatattcagaggtcttttaggatgcgctaaagggtcgtgagggctctcttaaaattttcttcacaagcggttatccagtcgtgccccgcggccctgctgctggccccggggatctgagtcgtaccctcttgtttttctctgagtcagtcttaaggtgaaatgaagtgtggcccagtggctcctcactgtcgcttctctagttttctgcctccttttagaaaattgaattgaaaagacaggatgaagtggacacagcatgtgaagacaattctttcaagaagtttggctgtcaaggaaaacagagaatgtgagtagccaaagcagaatgacagtgaaagaaagaaattgggagccagacaatacagcccgacagtttacgcctgtacggatgtacctctttcacaaaagattgagtatgcttggggaaaaaaaatacacactataataggagaaaatgatgaagagaaactgaggtaaaggtaattggaaaacaaaataaagccaggggtatattaataccccaaaacttcataccaaaaggtccgtgtatttactagaggggtgccacaaattgggctctgaggttcctagcaattaaaccaaagggaaaatataagtttaacatgatccgtatgagggaggaggcctaatggcatattatagaatcctgttacacattagctgtatgaaattgattgggtaatgtaagctctttagacctcatttctcc

SEQ ID NO: 3956 - protein, 39 aa, Homosapiens
MTVKERNWEPDNTARQFTPVRMYLFHKRLSMLGEKKYTL

SEQ ID NO: 3957 - DNA, 456 bp, Homosapiens
ccagtcgtgccccgcggccctgctgctggccccggggatctgagtcgtaccctcttgtttttctctgagtcagtcttaaggtgaaatgaagtgtggcccagtggctcctcactgtcgcttctctagttttctgcctccttttagaaaattgaattgaaaagacaggatgaagtggacacagcatgtgaagacaattctttcaagaagtttggctgtcaaggaaaacagagaatgtgagtagccaaagcagaatgacagtgaaagaaagaaattgggagccagacaatacagcccgacagtttacgcctgtacggatgtacctctttcacaaaagattgagtatgcttggggaaaaaaaatacacactataataggagaaaatgatgaagagaaactgaggtaaaggtaattggaaaacaaaataaagccaggggtatattaataccccaaaacttc

SEQ ID NO: 3958 - protein, 39 aa, Homosapiens; identical to SEQ ID NO: 3956

SEQ ID NO: 3959 - DNA, 1189 bp, Homosapiens
gcctctcgccccgcctcccgcgctccccgtcaggttcaaagccccctcccgcctaacgtcttcagcccagccaggctgcccttcttccctgcggagggagggcctgggcggtcgcgttggcgggagggaggttacctttcccagtctcgctctggccgcctgagccaggaggaagcagcggcgaggtctgcgggaggcatggcgggagctccggacgagcgccggcggggccccgcggcaggggagcagctgcagcagcaacacgtctcttgccaggtcttccccgagcgtctggcccaggggaatccccagcaagggttcttctccagcttcttcaccagcaaccagaagtgccagcttaggctcctgaagacgctggagacaaatccatatgtcaaacttctgcttgatgctatgaaacactcaggttgtgctgttaacaaagatagacacttttcttgcgaagactgtaatggaaatgtcagtggaggttttgatgcttcaacatctcagatagttttgtgccagaataatatccataatcaggcccatatgaacagagtggtcacacacgagcttattcatgcatttgatcattgtcgtgcccatgtcgactggttcaccaacatcagacatttggcgtgctcagaggttcgagctgctaaccttagtggagactgctcacttgtcaatgaaatattcaggttacattttggattaaaacaacaccaccagacttgtgtgcgagacagagccactctttctatcctggctgttaggaatatcagcaaagaagtagctaaaaaggctgttgatgaagtttttgaatcttgtttcaatgaccatgaaccttttggaaggatcccacataacaagacttatgcaagatatgctcacagagactttgaaaaccgtgatcggtattattcaaatatatgagcacaatgacatttttatattacagagcttccatcatcatgaagaaaaaaaaatttggttctcaagtgaacaaacatataaaatgtaaacaatccctacaatccagataaaacagagaagactgtgattctagcatattatcagaaaaagtaactatggcaaaaaatgaaactgctttaaactccaaggcagaaattgtatctttatagctaaccatttagtaaataaatacattacatttttgtatttt

SEQ ID NO: 3960 - protein, 246 aa, Homosapiens; identical to SEQ ID NO: 550

SEQ ID NO: 3961 - DNA, 1319 bp, Homosapiens
gcctctcgccccgcctcccgcgctccccgtcaggttcaaagccccctcccgcctaacgtcttcagcccagccaggctgcccttcttccctgcggagggagggcctgggcggtcgcgttggcgggagggaggttacctttcccagtctcgctctggccgcctgagccaggaggaagcagcggcgaggtctgcgggaggcatggcgggagctccggacgagcgccggcggggccccgcggcaggggagcagctgcagcagcaacacgtctcttgccaggtcttccccgagcgtctggcccaggggaatccccagcaagggttcttctccagcttcttcaccagcaaccagaagtgccagcttaggctcctgaagacgctggagacaaatccatatgtcaaacttctgcttgatgctatgaaacactcaggttgtgctgttaacaaagatagacacttttcttgcgaagactgtaatggaaatgtcagtggaggttttgatgcttcaacatctcagatagttttgtgccagaataatatccataatcaggcccatatgaacagagtggtcacacacgagcttattcatgcatttgatcattgtcgtgcccatgtcgactggttcaccaacatcagacatttggcgtgctcagaggttcgagctgctaaccttagtggagactgctcacttgtcaatgaaatattcaggttacattttggattaaaacaacaccaccagacttgtgtgcgagacagagccactctttctatcctggctgttaggaatatcagcaaagaagtagctaaaaaggctgttgatgaagtttttgaatcttgtttcaatgaccatgaaccttttggaaggatcccacataacaagacttatgcaagatatgctcacagagactttgaaaaccgtgatcggtattattcaaatatatgagcacaatgacatttttatattacagagcttccatcatcatgaagaaaaaaaaatttggttctcaagtgaacaaacatataaaatgtaaacaatccctacaatccagataaaacagagaagactgtgattctagcatattatcagaaaaagtaactatggcaaaaaatgaaactgctttaaactccaaggcagaaattgtatctttatagctaaccatttagtaaataaatacattacatttttgtattttagtcatttgtttttattacatgtgattattttaaaatttgattatgaaacctgtgaagtgtgctcttccatgatgttgataggtgaccactgttggtatttacattaaatgtaaagaaatgtgtactgat

SEQ ID NO: 3962 - protein, 246 aa, Homosapiens; identical to SEQ ID NO: 550

SEQ ID NO: 3963 - DNA, 1169 bp, Homosapiens
ttcagcccagccaggctgcccttcttccctgcggagggagggcctgggcggtcgcgttggcgggagggaggttacctttcccagtctcgctctggccgcctgagccaggaggaagcagcggcgaggtctgcgggaggcatggcgggagctccggacgagcgccggcggggccccgcggcaggggagcagctgcagcagcaacacgtctcttgccaggtcttccccgagcgtctggcccaggggaatccccagcaagggttcttctccagcttcttcaccagcaaccagaagtgccagcttaggctcctgaagacgctggagacaagtaggagccatgacctggaggctgtggttccacagaatggatccatatgtcaaacttctgcttgatgctatgaaacactcaggttgtgctgttaacaaagatagacacttttcttgcgaagactgtaatggaaatgtcagtggaggttttgatgcttcaacatctcagatagttttgtgccagaataatatccataatcaggcccatatgaacagagtggtcacacacgagcttattcatgcatttgatcattgtcgtgcccatgtcgactggttcaccaacatcagacatttggcgtgctcagaggttcgagctgctaaccttagtggagactgctcacttgtcaatgaaatattcaggttacattttggattaaaacaacaccaccagacttgtgtgcgagacagagccactctttctatcctggctgttaggaatatcagcaaagaagtagctaaaaaggctgttgatgaagtttttgaatcttgtttcaatgaccatgaaccttttggaaggatcccacataacaagacttatgcaagatatgctcacagagactttgaaaaccgtgatcggtattattcaaatatatgagcacaatgacatttttatattacagagcttccatcatcatgaagaaaaaaaaatttggttctcaagtgaacaaacatataaaatgtaaacaatccctacaatccagataaaacagagaagactgtgattctagcatattatcagaaaaagtaactatggcaaaaaatgaaactgctttaaactccaaggcagaaattgtatctttatagctaaccatttagtaaataaatacattacatttttgtatttt

SEQ ID NO: 3964 - protein, 194 aa, Homosapiens
MTWRLWFHRMDPYVKLLLDAMKHSGCAVNKDRHFSCEDCNGNVSGGFDASTSQIVLCQNNIHNQAHMNRVVTHELIHAFDHCRAHVDWFTNIRHLACSEVRAANLSGDCSLVNEIFRLHFGLKQHHQTCVRDRATLSILAVRNISKEVAKKAVDEVFESCFNDHEPFGRIPHNKTYARYAHRDFENRDRYYSNI

SEQ ID NO: 3965 - DNA, 1299 bp, Homosapiens
ttcagcccagccaggctgcccttcttccctgcggagggagggcctgggcggtcgcgttggcgggagggaggttacctttcccagtctcgctctggccgcctgagccaggaggaagcagcggcgaggtctgcgggaggcatggcgggagctccggacgagcgccggcggggccccgcggcaggggagcagctgcagcagcaacacgtctcttgccaggtcttccccgagcgtctggcccaggggaatccccagcaagggttcttctccagcttcttcaccagcaaccagaagtgccagcttaggctcctgaagacgctggagacaagtaggagccatgacctggaggctgtggttccacagaatggatccatatgtcaaacttctgcttgatgctatgaaacactcaggttgtgctgttaacaaagatagacacttttcttgcgaagactgtaatggaaatgtcagtggaggttttgatgcttcaacatctcagatagttttgtgccagaataatatccataatcaggcccatatgaacagagtggtcacacacgagcttattcatgcatttgatcattgtcgtgcccatgtcgactggttcaccaacatcagacatttggcgtgctcagaggttcgagctgctaaccttagtggagactgctcacttgtcaatgaaatattcaggttacattttggattaaaacaacaccaccagacttgtgtgcgagacagagccactctttctatcctggctgttaggaatatcagcaaagaagtagctaaaaaggctgttgatgaagtttttgaatcttgtttcaatgaccatgaaccttttggaaggatcccacataacaagacttatgcaagatatgctcacagagactttgaaaaccgtgatcggtattattcaaatatatgagcacaatgacatttttatattacagagcttccatcatcatgaagaaaaaaaaatttggttctcaagtgaacaaacatataaaatgtaaacaatccctacaatccagataaaacagagaagactgtgattctagcatattatcagaaaaagtaactatggcaaaaaatgaaactgctttaaactccaaggcagaaattgtatctttatagctaaccatttagtaaataaatacattacatttttgtattttagtcatttgtttttattacatgtgattattttaaaatttgattatgaaacctgtgaagtgtgctcttccatgatgttgataggtgaccactgttggtatttacattaaatgtaaagaaatgtgtactgat

SEQ ID NO: 3966 - protein, 194 aa, Homosapiens; identical to SEQ ID NO: 3964

SEQ ID NO: 3967 - DNA, 1197 bp, Homosapiens
gccaggaggaagcagcggcgaggtctgcgggaggcatggcgggagctccggacgagcgccggcggggccccgcggcaggggagcagctgcagcagcaacacgtctcttgccaggtcttccccgagcgtctggcccaggggaatccccagcaagggttcttctccagcttcttcaccagcaaccagaagtgccagcttaggctcctgaagacgctggagacaaatccatatgtcaaacttctgcttgatgctatgaaacactcaggttgtgctgttaacaaagatagacacttttcttgcgaagactgtaatggaaatgtcagtggaggttttgatgcttcaacatctcagagatggggttttgctctgttgcccaggctggtcccgaactcctgggctcaaggaatctgcctgcctcagcctctcaaagtactgggattataggcatgagccactgcacccaacctcattgtatatgctcatgacaacctgggtttttcttcatgacaactgtcattgcatatagttttgtgccagaataatatccataatcaggcccatatgaacagagtggtcacacacgagcttattcatgcatttgatcattgtcgtgcccatgtcgactggttcaccaacatcagacatttggcgtgctcagaggttcgagctgctaaccttagtggagactgctcacttgtcaatgaaatattcaggttacattttggattaaaacaacaccaccagacttgtgtgcgagacagagccactctttctatcctggctgttaggaatatcagcaaagaagtagctaaaaaggctgttgatgaagtttttgaatcttgtttcaatgaccatgaaccttttggaaggatcccacataacaagacttatgcaagatatgctcacagagactttgaaaaccgtgatcggtattattcaaatatatgagcacaatgacatttttatattacagagcttccatcatcatgaagaaaaaaaaatttggttctcaagtgaacaaacatataaaatgtaaacaatccctacaatccagataaaacagagaagactgtgattctagcatattatcagaaaaagtaactatggcaaaaaatgaaactgctttaaactccaaggcagaaattgtatctttatagctaaccatttagtaaataaatacattacatttttgtatttt

SEQ ID NO: 3968 - protein, 135 aa, Homosapiens
MAGAPDERRRGPAAGEQLQQQHVSCQVFPERLAQGNPQQGFFSSFFTSNQKCQLRLLKTLETNPYVKLLLDAMKHSGCAVNKDRHFSCEDCNGNVSGGFDASTSQRWGFALLPRLVPNSWAQGICLPQPLKVLGL

SEQ ID NO: 3969 - DNA, 1327 bp, Homosapiens
gccaggaggaagcagcggcgaggtctgcgggaggcatggcgggagctccggacgagcgccggcggggccccgcggcaggggagcagctgcagcagcaacacgtctcttgccaggtcttccccgagcgtctggcccaggggaatccccagcaagggttcttctccagcttcttcaccagcaaccagaagtgccagcttaggctcctgaagacgctggagacaaatccatatgtcaaacttctgcttgatgctatgaaacactcaggttgtgctgttaacaaagatagacacttttcttgcgaagactgtaatggaaatgtcagtggaggttttgatgcttcaacatctcagagatggggttttgctctgttgcccaggctggtcccgaactcctgggctcaaggaatctgcctgcctcagcctctcaaagtactgggattataggcatgagccactgcacccaacctcattgtatatgctcatgacaacctgggtttttcttcatgacaactgtcattgcatatagttttgtgccagaataatatccataatcaggcccatatgaacagagtggtcacacacgagcttattcatgcatttgatcattgtcgtgcccatgtcgactggttcaccaacatcagacatttggcgtgctcagaggttcgagctgctaaccttagtggagactgctcacttgtcaatgaaatattcaggttacattttggattaaaacaacaccaccagacttgtgtgcgagacagagccactctttctatcctggctgttaggaatatcagcaaagaagtagctaaaaaggctgttgatgaagtttttgaatcttgtttcaatgaccatgaaccttttggaaggatcccacataacaagacttatgcaagatatgctcacagagactttgaaaaccgtgatcggtattattcaaatatatgagcacaatgacatttttatattacagagcttccatcatcatgaagaaaaaaaaatttggttctcaagtgaacaaacatataaaatgtaaacaatccctacaatccagataaaacagagaagactgtgattctagcatattatcagaaaaagtaactatggcaaaaaatgaaactgctttaaactccaaggcagaaattgtatctttatagctaaccatttagtaaataaatacattacatttttgtattttagtcatttgtttttattacatgtgattattttaaaatttgattatgaaacctgtgaagtgtgctcttccatgatgttgataggtgaccactgttggtatttacattaaatgtaaagaaatgtgtactgat

SEQ ID NO: 3970 - protein, 135 aa, Homosapiens; identical to SEQ ID NO: 3968

SEQ ID NO: 3971 - DNA, 760 bp, Homosapiens
tcagcctcccaaagtgctgggattacaagtgagagccactgctccccacctacttaagggtcttaaggacacttcagacttgaaatgtttttgtgccagaataatatccataatcaggcccatatgaacagagtggtcacacacgagcttattcatgcatttgatcattgtcgtgcccatgtcgactggttcaccaacatcagacatttggcgtgctcagaggttcgagctgctaaccttagtggagactgctcacttgtcaatgaaatattcaggttacattttggattaaaacaacaccaccagacttgtgtgcgagacagagccactctttctatcctggctgttaggaatatcagcaaagaagtagctaaaaaggctgttgatgaagtttttgaatcttgtttcaatgaccatgaaccttttggaaggatcccacataacaagacttatgcaagatatgctcacagagactttgaaaaccgtgatcggtattattcaaatatatgagcacaatgacatttttatattacagagcttccatcatcatgaagaaaaaaaaatttggttctcaagtgaacaaacatataaaatgtaaacaatccctacaatccagataaaacagagaagactgtgattctagcatattatcagaaaaagtaactatggcaaaaaatgaaactgctttaaactccaaggcagaaattgtatctttatagctaaccatttagtaaataaatacattacatttttgtatttt

SEQ ID NO: 3972 - protein, 141 aa, Homosapiens
MFLCQNNIHNQAHMNRVVTHELIHAFDHCRAHVDWFTNIRHLACSEVRAANLSGDCSLVNEIFRLHFGLKQHHQTCVRDRATLSILAVRNISKEVAKKAVDEVFESCFNDHEPFGRIPHNKTYARYAHRDFENRDRYYSNI

SEQ ID NO: 3973 - DNA, 890 bp, Homosapiens
tcagcctcccaaagtgctgggattacaagtgagagccactgctccccacctacttaagggtcttaaggacacttcagacttgaaatgtttttgtgccagaataatatccataatcaggcccatatgaacagagtggtcacacacgagcttattcatgcatttgatcattgtcgtgcccatgtcgactggttcaccaacatcagacatttggcgtgctcagaggttcgagctgctaaccttagtggagactgctcacttgtcaatgaaatattcaggttacattttggattaaaacaacaccaccagacttgtgtgcgagacagagccactctttctatcctggctgttaggaatatcagcaaagaagtagctaaaaaggctgttgatgaagtttttgaatcttgtttcaatgaccatgaaccttttggaaggatcccacataacaagacttatgcaagatatgctcacagagactttgaaaaccgtgatcggtattattcaaatatatgagcacaatgacatttttatattacagagcttccatcatcatgaagaaaaaaaaatttggttctcaagtgaacaaacatataaaatgtaaacaatccctacaatccagataaaacagagaagactgtgattctagcatattatcagaaaaagtaactatggcaaaaaatgaaactgctttaaactccaaggcagaaattgtatctttatagctaaccatttagtaaataaatacattacatttttgtattttagtcatttgtttttattacatgtgattattttaaaatttgattatgaaacctgtgaagtgtgctcttccatgatgttgataggtgaccactgttggtatttacattaaatgtaaagaaatgtgtactgat

SEQ ID NO: 3974 - protein, 141 aa, Homosapiens; identical to SEQ ID NO: 3972

SEQ ID NO: 3975 - DNA, 1992 bp, Homosapiens
atgtttgcgccacctacagcctcggagggtgagcgtcatggcggcttcttgccctctcccggtgaccccggacctgcccacgctgcgtgccaagttgcagggactgctgcagttcctgagggatgccctgtccatttccaatgcacataccgtggatttctacacagaatccgtgtgggaggagctggtcgacttgccaccggagacagtgctggctgcgctgaggaagtcagcgtcggagacggaggccctgccctcagagacgcgccccctagtggaagcagagtgggaagcaggtatgactgattttcccaaaatattttgtgaaacttctcagaagttggtgagtgtggaagcctttgctctggctgcgaaatactattctgtacaaaacttgggaatatgtactccttttgaacagttgcttgtagcccttcgaggaaatcaaaaccagagaattggtgaaaatcagaaggcagttgagtttatgaatatgaagaaatctcatgaagttcaggcaatgtcagagctgatcagcagtattgctgactactatggaataaagcaggtgattgacttgggttccggtaaaggctacctaagctcttttttgtccttgaagtatggcttaaaagtttatggaattgattcttcaaataccaatactcatggagctgaggagagaaacagaaaattgaagaaacattggaaactctgtcatgctcagtcaagattagatgtcaatggactagcattaaaaatggcaaaagaaaggaaagtgcaaaataaagttaaaaataaagctgatactgaggaagtgtttaacaacagtcctacaaatcaagaaaagatgcctacctcagctattttgcctgatttttctggctctgtaatttctaatatcagaaaccaaatggaaacccttcattctcagccacatcaagaagaaaatttgtgttttgaaaattccttttctcttataaaccttttgcctattaatgctgtagagcctacttcttcacagcaaatacccaacagagaaacatctgaagccaataaagagagaagaaaaatgacatcaaagtcaagtgaatcaaatatatattcacctttaacctcttttatcactgctgattcagaactccatgacattattaaagatttggaggattgtttgatggtgggtctccacacttgtggtgatctggctccaaatactttgcgaatatttacctccaactctgaaatcaagggagtttgcagtgtgggttgttgctaccacctcttatctgaagaatttgaaaaccagcataaagaacgtactcaggaaaagtggggatttccaatgtgccactatttaaaggaagagagatggtgctgtggtcgtaatgccagaatgtcagcatgtttggcattggagcgggttgcagctggccaagggctgcctactgaatcactcttctatcgtgctgttcttcaggatattattaaagattgttatggcatcaccaaatgtgatcggcatgttggtaaaatttattccaaatgttcttcttttctggattatgtcagacggtctctaaagaagcttggattagatgagtccaagctgccagaaaaaattataatgaactactacgagaagtataagcctcgaatgaatgagctggaagcttttaatatgttgaaagttgtactggctccctgtatagagactttgattcttctggatcgactttgttacctgaaagagcaggaagatattgcatggtctgctcttgtgaagttgtttgatcccgtgaaatctcccagatgttatgctgttattgccctgaagaagcagcagtgatttccattgaagcaaattattagatgtatttctctatgagacctgttgctgagattgcttttctaaacatatatgtcctgttatacaaaaatttttaaatgactgttatgtattttaaataataaaataatggctaacaacag

SEQ ID NO: 3976 - protein, 603 aa, Homosapiens
MAASCPLPVTPDLPTLRAKLQGLLQFLRDALSISNAHTVDFYTESVWEELVDLPPETVLAALRKSASETEALPSETRPLVEAEWEAGMTDFPKIFCETSQKLVSVEAFALAAKYYSVQNLGICTPFEQLLVALRGNQNQRIGENQKAVEFMNMKKSHEVQAMSELISSIADYYGIKQVIDLGSGKGYLSSFLSLKYGLKVYGIDSSNTNTHGAEERNRKLKKHWKLCHAQSRLDVNGLALKMAKERKVQNKVKNKADTEEVFNNSPTNQEKMPTSAILPDFSGSVISNIRNQMETLHSQPHQEENLCFENSFSLINLLPINAVEPTSSQQIPNRETSEANKERRKMTSKSSESNIYSPLTSFITADSELHDIIKDLEDCLMVGLHTCGDLAPNTLRIFTSNSEIKGVCSVGCCYHLLSEEFENQHKERTQEKWGFPMCHYLKEERWCCGRNARMSACLALERVAAGQGLPTESLFYRAVLQDIIKDCYGITKCDRHVGKIYSKCSSFLDYVRRSLKKLGLDESKLPEKIIMNYYEKYKPRMNELEAFNMLKVVLAPCIETLILLDRLCYLKEQEDIAWSALVKLFDPVKSPRCYAVIALKKQQ

SEQ ID NO: 3977 - DNA, 651 bp, Homosapiens
gcattggagcgggttgcagctggccaagggctgcctactgaatcactcttctatcgtgctgttcttcaggatattattaaagattgttatggcatcaccaaatgtgatcggcatgttggtaaaatttattccaaatgttcttcttttctggattatgtcagacggtctctaaagaagcttggattagatgagtccaagctgccagaaaaaattataatgaactactacgagaagtataagcctcgaatgaatgagctggaagcttttaatatgttgaaagttgtactggctccctgtatagagactttgattcttctggatcgactttgttacctgaaagagcaggaagatattgcatggtctgctcttgtgaagttgtttgatcccgtgaaatctcccagatgttatgctgttattgccctgaagaagcagcagtgatttccattgaagcaaattattagatgtatttctctatgagacctgttgctgagattgcttttctaaacatatatgtcctgttatacaaaaatttttaaatgactgttatgtattttaaataataaaataatggctaacaacagaaggttataatccatttttccattgtcaaagcatacattaataaaagaagaacctgtcataataatataa

SEQ ID NO: 3978 - protein, 73 aa, Homosapiens
MNYYEKYKPRMNELEAFNMLKVVLAPCIETLILLDRLCYLKEQEDIAWSALVKLFDPVKSPRCYAVIALKKQQ

SEQ ID NO: 3979 - DNA, 758 bp, Homosapiens
tctttttttttttttttcagaattactttcacaatgagaattagcctcagggtaacactttcgctcgtaatggaaaaattattaagtcatcctctgtgtttagcaacaaaggtttctgacagtcacgtgtggttccaacattctggtatttattttatttctgttttttttgtttcttgtgcttatatatgtctacatttttttcagctgcctactgaatcactcttctatcgtgctgttcttcaggatattattaaagattgttatggcatcaccaaatgtgatcggcatgttggtaaaatttattccaaatgttcttcttttctggattatgtcagacggtctctaaagaagcttggattagatgagtccaagctgccagaaaaaattataatgaactactacgagaagtataagcctcgaatgaatgagctggaagcttttaatatgttgaaagttgtactggctccctgtatagagactttgattcttctggatcgactttgttacctgaaagagcaggaagatattgcatggtctgctcttgtgaagttgtttgatcccgtgaaatctcccagatgttatgctgttattgccctgaagaagcagcagtgatttccattgaagcaaattattagatgtatttctctatgagacctgttgctgagattgcttttctaaacatatatgtcctgttatacaaaaatttttaaatgactgttatgtattttaaataataaaataatggctaacaacag

SEQ ID NO: 3980 - protein, 193 aa, Homosapiens
MRISLRVTLSLVMEKLLSHPLCLATKVSDSHVWFQHSGIYFISVFFVSCAYICLHFFQLPTESLFYRAVLQDIIKDCYGITKCDRHVGKIYSKCSSFLDYVRRSLKKLGLDESKLPEKIIMNYYEKYKPRMNELEAFNMLKVVLAPCIETLILLDRLCYLKEQEDIAWSALVKLFDPVKSPRCYAVIALKKQQ

SEQ ID NO: 3981 - DNA, 828 bp, Homosapiens
tctttttttttttttttcagaattactttcacaatgagaattagcctcagggtaacactttcgctcgtaatggaaaaattattaagtcatcctctgtgtttagcaacaaaggtttctgacagtcacgtgtggttccaacattctggtatttattttatttctgttttttttgtttcttgtgcttatatatgtctacatttttttcagctgcctactgaatcactcttctatcgtgctgttcttcaggatattattaaagattgttatggcatcaccaaatgtgatcggcatgttggtaaaatttattccaaatgttcttcttttctggattatgtcagacggtctctaaagaagcttggattagatgagtccaagctgccagaaaaaattataatgaactactacgagaagtataagcctcgaatgaatgagctggaagcttttaatatgttgaaagttgtactggctccctgtatagagactttgattcttctggatcgactttgttacctgaaagagcaggaagatattgcatggtctgctcttgtgaagttgtttgatcccgtgaaatctcccagatgttatgctgttattgccctgaagaagcagcagtgatttccattgaagcaaattattagatgtatttctctatgagacctgttgctgagattgcttttctaaacatatatgtcctgttatacaaaaatttttaaatgactgttatgtattttaaataataaaataatggctaacaacagaaggttataatccatttttccattgtcaaagcatacattaataaaagaagaacctgtcataataatataa

SEQ ID NO: 3982 - protein, 193 aa, Homosapiens; identical to SEQ ID NO: 3980

SEQ ID NO: 3983 - DNA, 443 bp, Homosapiens
actcttctatcgtgctgttcttcaggatattattaaagattgttatggcatcaccaaatgctgccagaaaaaattataatgaactactacgagaagtataagcctcgaatgaatgagctggaagcttttaatatgttgaaagttgtactggctccctgtatagagactttgattcttctggatcgactttgttacctgaaagagcaggaagatattgcatggtctgctcttgtgaagttgtttgatcccgtgaaatctcccagatgttatgctgttattgccctgaagaagcagcagtgatttccattgaagcaaattattagatgtatttctctatgagacctgttgctgagattgcttttctaaacatatatgtcctgttatacaaaaatttttaaatgactgttatgtattttaaataataaaataatggctaacaacag

SEQ ID NO: 3984 - protein, 80 aa, Homosapiens
MLPEKIIMNYYEKYKPRMNELEAFNMLKVVLAPCIETLILLDRLCYLKEQEDIAWSALVKLFDPVKSPRCYAVIALKKQQ

SEQ ID NO: 3985 - DNA, 1159 bp, Homosapiens
catccctaatctgaaaaatccaaaatctgaaatgctccaatgagcatttcctttgaatgtcatgttggcactcaaaaagtttcagattttggagcatttcagattttggattagggatactcaacctgtatattatgacaataatgtaactggcatagcaagtttagaaataaatacaattgactcagtaacaaagctcatctagcaggagcaaaagcacaattgaactagagagtggcctgctaaatacaagagttcaacatactataggtatttgttttagaaaaagaagaaaaagaaataaaagtaattctctctgatggatttgtgaagtgcatgttagaagaaactaccttaagtatgaacatatgccattgtgttcctcttgcctttgaattttgctcaaaatgtcttgttttagatacagtgttgtaaagtttaattttagtcaaaaaatgtttgatctcctcctgtgtgtccaaagcataataacaaatgaaagtaaatatttccttcttagttgttgaaattaaacaatattaatgggatgttgctggtggttttatttatgatgtgctgcataacctatatcagtgtaaaaattttaagtaatttagagttatcttgacttgcttcatgaatatccttagagcgagttcttcagacacctaaggttgtattaaattgatgtcatgtttattttactttaggatatgtttgacaaggaaaaatatttttaaactatcgttaaatttattgttgttttttatcttgaagctgccagaaaaaattataatgaactactacgagaagtataagcctcgaatgaatgagctggaagcttttaatatgttgaaagttgtactggctccctgtatagagactttgattcttctggatcgactttgttacctgaaagagcaggaagatattgcatggtctgctcttgtgaagttgtttgatcccgtgaaatctcccagatgttatgctgttattgccctgaagaagcagcagtgatttccattgaagcaaattattagatgtatttctctatgagacctgttgctgagattgcttttctaaacatatatgtcctgttatacaaaaatttttaaatgactgttatgtattttaaataataaaataatggctaacaaca

SEQ ID NO: 3986 - protein, 109 aa, Homosapiens
MSCLFYFRICLTRKNIFKLSLNLLLFFILKLPEKIIMNYYEKYKPRMNELEAFNMLKVVLAPCIETLILLDRLCYLKEQEDIAWSALVKLFDPVKSPRCYAVIALKKQQ

SEQ ID NO: 3987 - DNA, 452 bp, Homosapiens
cattttgacatctattaactaatataggctctttgaagacagtggaatactgtttgtctccatactgtcaatgcccagcgtaatctctgacaaatgaatttcgctcttgtcgcccaggctggagtgcaatgatgcgatctcggctcactgcaaccttcgcctcctcggttcaagtgattctcctgcctcagactcccgagtacctgggattacaggcatgtgccagcacgcctgtatttttgtatttttagtagagacggggtttcaccatgttggctaggctggtctggaactcctgacctcaggtgatccgcccgccttggcctcccaaagtgctgggattacaggcatgagccatcgtgcccggcctgttgtaatttccttctctatactaaaaggtgttttatacatataaagtatttttctttattataatgagaaataaatcttat

SEQ ID NO: 3988 - protein, 40 aa, Homosapiens
MMRSRLTATFASSVQVILLPQTPEYLGLQACASTPVFLYF

SEQ ID NO: 3989 - DNA, 658 bp, Homosapiens
aggtggtggtagaggtgtgggcagaatatcaggaaatgcttccctcaggaattgatgtgcatgaggaatcctggagaataagaaggcatgaagtagagatgaaagagaattttcctgtgctctttctcaacccaaactcagtgtgcctccttggccttagcagtttccttcactcctggactgatgggtggcacatgattgtgcacttaaataccacagtacaaacgggaggaacacctggctaataactcacagccccaatttctcattcagtaccttagcccatgtaacccagactagctagagcagtgaaggtcctctctcatccttgattacatgcatcatttattacatcctaaacagagatgattacattccaatttcaactgtccttaaaacatttctttaggctcacagaaacatcagcagcagcttttcctcagctaattagagactaattgactctttagcactgttatcagctgtgacagagcccttcctgcctcctgtctgccagcgtacttgggaccatgcctctgtgaaggacttcaatttctctttacaagaatcaacgtggagcaaactccagttgcctactgcctagcattcttgctaagatacgtatgtaaataaaatgtctttatatacctgagaattt

SEQ ID NO: 3990 - protein, 69 aa, Homosapiens
MLPSGIDVHEESWRIRRHEVEMKENFPVLFLNPNSVCLLGLSSFLHSWTDGWHMIVHLNTTVQTGGTPG

SEQ ID NO: 3991 - DNA, 276 bp, Homosapiens
cttaggtggtggtagaggtgtgggcagaatatcaggaaatgcttccctcaggaattgatgtgcatgaggaatcctggagaataagaagcactgttatcagctgtgacagagcccttcctgcctcctgtctgccagcgtacttgggaccatgcctctgtgaaggacttcaatttctctttacaagaatcaacgtggagcaaactccagttgcctactgcctagcattcttgctaagatacgtatgtaaataaaatgtctttatatacctgagaattt

SEQ ID NO: 3992 - protein, 70 aa, Homosapiens
MLPSGIDVHEESWRIRSTVISCDRALPASCLPAYLGPCLCEGLQFLFTRINVEQTPVAYCLAFLLRYVCK

SEQ ID NO: 3993 - DNA, 5695 bp, Homosapiens
tcacgcaggcgcggggggccgcgtcgagaaccccacgcgggagcttctggagtctccagccaccgcttctcacttcactggagaagggagctggggctggggctggggctggggctgggagggagctaataaacattgaatgtgcagcagctgccttggcggccggagtccgcccgagcgacaccggagcagtgcgcccgggaggcggcgaggggaggcggttcgccttgtccctcccacccgcgcctctttctctctcttcctccagctggtcccagagcccggcttggtccggtccctctgcccccatcccgcacccttccacctcctccgagtcccactcctcacctaggacgccccaaactgccatgggttagggtggggatcgcgacccgcgcgaaagaccagccctgcgcttccgccgggggacgcggagcccaaacgccgctcaccgcttgcgggcgccgggcatggggagtgtggtgtgagcccgcacccggggaggacgcaggagctgcggagacgggcgcgaggaggaggagaggagtcgtggattggaaggacccgagggagggagggtggggaagcgagggaaaagtgaagctgggaggagaaggcggcggaaggtggagattgatgcttctgttttttgttgccgctgctgccctcgcgctgggagccgagccggagggaaggcggtggagagatgattgcagagttggtgagcagcgctctggggctcgccttgtatctcaacaccctgagtgcggatttctgctatgatgacagccgtgctatcaagactaatcaggaccttctcccagaaactccatggacgcacattttctacaatgatttttgggggactcttctaacccacagtggcagccacaagtcctaccggccactctgcactctttcttttcgcctgaaccatgccattggagggttgaatccctggagctaccatcttgtcaatgtcctgttgcatgcagcagtcactggtctcttcacaagcttctccaagatcctccttggtgatggatactggacattcatggctggcttgatgtttgcttctcaccccattcacacggaggcagtggcaggaatcgtgggacgagccgatgtcggggccagtctcttctttctcctctccttgctctgctacattaaacactgttctacaagaggctactcagccagaacctggggctggttcctggggtcaggactgtgcgcaggatgcagcatgttgtggaaggaacaaggagtgactgttctcgcagtttcagcagtttatgatgtctttgtctttcacaggctgaaaataaaacagatattacctaccatttacaaaaggaagaacttgtcgcttttcctaagcattagtttgttaattttctggggttcctcccttttgggtgcccggttatactggatgggaaacaaaccaccaagcttttccaactcggacaaccccgctgctgattcggacagcctcctcacccgcactctcaccttcttctacttgccaaccaagaacctctggctgttgctatgtccagataccctcagttttgattggtcaatggatgctgtgcctctgctcaaaacagtttgtgactggagaaacctacacactgtggccttctatactggactccttctccttgcctactatggtttgaagagcccgagcgtagacagagaatgcaatgggaaaactgtaacaaatggcaagcagaatgcaaatggacatagctgcctttcagatgtggagtaccagaactcagagactaagtccagctttgcatccaaagtagaaaatggcattaaaaacgatgtatcacagagaacccagcttccttctacggagaacattgttgttctgtctttatctttgttaatcataccctttgttcctgccacgaacctgtttttctatgtcggctttgtaattgcagagcgagtattatatattcctagtatgggcttctgcctactgattacagtgggtgctagagccctttatgtcaaagtccaaaagcggttcctcaagagcttgattttttatgctacagctacactaattgttttttatggactcaagactgcgatcaggaatggagactggcagaatgaggaaatgctttatagatcagggataaaagtaaacccagctaaagcatggggtaaccttggaaatgttctgaagagtcagagcaaaatttctgaagctgaaagcgcctatagaaatgctttgtactaccgcagcaacatggctgacatgctttataatttagggctacttctccaggagaacagcaggtttgcagaagcactacattattataaattggccattgggagcaggcctaccctggcttctgcatatttaaataccggtattattctaatgaaccaaggaaggacggaagaagcccgacggacattcttaaagtgttcggagatcccagatgaaaacctaaaggaccctcatgcacacaagagctctgttaccagttgtttgtacaacctaggaaagctgtatcatgagcagggacactatgaggaagcccttagtgtatacaaggaagcaattcagaaaatgccaaggcagtttgccccacagagcttgtacaacatgatgggtgaagcatatatgcgtttaagcaaactccccgaagcagagcattggtatatggaatcactgagatccaagactgaccacatccctgctcatctcacctatgggaagctgctagctctaacaggtcgtaagagtgaggctgaaaagctcttcttgaaggctattgagctggatcccaccaaaggaaactgttacatgcattatggtcagtttcttctggaagaagctcgtctcatagaagcagctgagatggcaaaaaaagcagctgaactagacagcacagagtttgatgttgtcttcaatgctgcccacatgctcagacaggctagcctcaatgaagcagctgagaagtattatgatctggcagccaggctgaggcctaattatccggctgctttgatgaacctgggagccattctgcacctcaatggcagactccagaaggccgaggccaactacctgcgggccctgcagctcaagccagacgatgtcatcacacagtccaatctccgcaaactgtggaacatcatggaaaaacaaggcttaaagacttctaagacctgacacaggaggcagaagcccatcctcctccatttttaaaagctggcttccttagcagacagaacttcccagcagtgctatgacaagagctggtgttagacttcaagaccagggcagaggtcattgaggtcactaccgcttctggaagaatccactttgctgtaggcacagctgttaacaccaaaaaggggaaagccggaaacctcctggaggatgtcattgttacccatagactgtaaaccagagcacttaaaacagaaccttttggcattcttaaaaagggaggggtgggtgtgtaagtcacagattttgttcattttctgaaagctaatttcaaaattatgttgttccttaaacactgtgagaggaagtcagagtgtccattcaggcatggcaaacaattagggttaagtgttacgagggagtgataaacacgtagtgtgagtcccagtgagccgccggttgtcctaacgctgctgtcttccctgtttgggacagcctgcttatcaatttctgaagcttagaacactttttttaatactgtgtcaagatctgtcagaatctgctatgtttcttgaccagtgcacataatgttttatgatttggatgtcagaggcttcattcttttggacatcatttgctttttatgttctgaaaaggatatggagagtagagctaaccatacttcacactcgagttgtatgagggactggggaggccttatatgtgtcaggcaggcattttttaaattttaatatcgtcaatattttcccccaaactgcccagtagaattcattgtattaattcttttgaaattacctttgaaaatagctattcctggagaatgtgcaagcttacataaggataaaggacaggggaggagtttgtaagccttgcagttccaataactaaccaacaggttattagacaaaagggaaggtgttttgtgcttctcagatgttgctggtttaggagtgtgtgatgatgcttgccagtgattttgtgttttggaaagggtaggtatcgaatgttaatcactttctaatgggtacctaaacagcaatgctgataaatgttcaaggaattattttcatcttagtttgttcttctcaaaaggcatcaaaaacaacttatttgaagctgcaatagagtgtagcattagcctgcatgtttctaggtcttctgccaagtgcttttctcagttgaaaactatttttcactagcaaaattggtattttatttcattacctgttagtaactacttcaatgatcatttcacaagaaaaagactataaattaagtagagaacaacatttttattgaacatttttggcttgcaatcaaactttgccactaaaaattaacttcataaaacactagtccgttatcaacttcttcacagagaaagtagctatactataccctacatatttatttatttattattctactatagcagaataacaaaacttgatgcattaagccagttctttgcaactgaaaattacctgtttctccttccctttcacactccatgtatatatgatcagcctctccattaaaaagaagctggacatgcaaatacatcatattatgttttctccatattttatgtttttctatgtatctgaatacagtgggataaataattgaaagtagtgttcctatggcattagtgtttttgtgagaagggtaaatgtagtgagaaaggttttttcatggcattaataagaaagcccttctgtaatatatatattattttgtaaacatttcactgaagggccaaaagttaaattataactaaatcactgtgttttcagaatgatatttaacaacaaacccgtggtcaaaccaaaatagtgggttgaagtgtattattcatcttttagtgcattggcaattgcaaaaaaaaaaaaggaatttaatataaggctatagagattaattcagtgtctaacatttgtatttatttaaatagttattgacctatgatgactttctagtcttaacattttatctttttattgttgttgttcttcctttcaaagatgtggttcttaataggttcactgaatgcacagttgaggcacttcttgtgacaccagttcccaagtagcgttaataattgggcctgtgtcataaaatgcacggatcattaataactaaatgtccctgacacttttcactacagggctggacttagtaactgaccaacttcggggggagggttggggcaagggggggtgggcgttagaacatgatcaaaaaatgtctccgctcagggatttatggtggattattgcagacagtgctaaaaatatagagcacaagacaagtttactaaattaaaattttattttttgagaaactgttatttgtataaattatcaagatttgtaggctttccttttgtagaaataattgttttatgtgccagagaatttcaattttgttttcaacaataaagcattgataagaaat

SEQ ID NO: 3994 - protein, 836 aa, Homosapiens; identical to SEQ ID NO: 554

SEQ ID NO: 3995 - DNA, 687 bp, Homosapiens
tgcgatcaggaatggagactggcagaatgaggaaatgctttatagatcagggataaaagtaaacccagctaaagcatggggtaaccttggaaatgttctgaagagtcagagcaaaatttctgaagctgaaagcgcctatagaaatgctttgtactaccgcagcaacatggctgacatgctttataatttagggctacttctccaggagaacagcaggtttgcagaagcactacattattataaattggccattgggagcaggcctaccctggcttctgcatatttaaataccggtattattctaatgaaccaaggaaggacggaagaagcccgacggacattcttaaagtgttcggagatcccagatgaaaacctaaaggaccctcatgcacacaagagctctgttaccagttgtttgtacaacctaggaaagctgtatcatgagcagggacactatgaggtctggccaatgcctctctgtccttttccctcccccttgttctgatccagtctcagtggtttgtaacctacagcctcctttgagcctatgtcctttgaacaactaatatgtatacacgttaaactattgtcctttgagaaactaatacatgatgacattggaatggttttttgatcaaatttgtttagaaaaagcttctgctaaataaaaatttaatagatttcttt

SEQ ID NO: 3996 - protein, 156 aa, Homosapiens
MLYRSGIKVNPAKAWGNLGNVLKSQSKISEAESAYRNALYYRSNMADMLYNLGLLLQENSRFAEALHYYKLAIGSRPTLASAYLNTGIILMNQGRTEEARRTFLKCSEIPDENLKDPHAHKSSVTSCLYNLGKLYHEQGHYEVWPMPLCPFPSPLF

SEQ ID NO: 3997 - DNA, 462 bp, Homosapiens
ccacagagcttgtacaacatgatgggtgaagcatatatgcgtttaagcaaactccccgaagcagagcattggtatatggaatcactgagatccaagactgaccacatccctgctcatctcacctatgggaagctgctagctctaacagtgagtaaccgccttccttggtctttaaaacttggttttctccatgcagaccgggatagatgggtttgaggtactgttttacagccagttatctaagctattagggatgcaatggtggtgatactaactttgaaccctgtacagaaaatatagaaaaatgtgttactttgcctatgaggtttggtctagataagatgtgagatgtctgtatcttacatcttgatctagataatatgtgagatgtctgtatcttacatcttggtctagataagatgtgagatgtccgtatcatccctgtatcaaaacatctcctgt

SEQ ID NO: 3998 - protein, 65 aa, Homosapiens [sequence omitted]

SEQ ID NO: 3999 - DNA, 325 bp, Homosapiens
ccaatctccgcaaactgtggaacatcatggaaaaacaaggcttaaagacttctaagacctgacacaggagggttggggcaagggggggtgggcgttagaacatgatcaaaaaatgtctccgctcagggatttatggtggattattgcagacagtgctaaaaatatagagcacaagacaagtttactaaattaaaattttattttttgagaaactgttatttgtataaattatcaagatttgtaggctttccttttgtagaaataattgttttatgtgccagagaatttcaattttgttttcaacaataaagcattgataagaaat

SEQ ID NO: 4000 - protein, 49 aa, Homosapiens
KYRAQDKFTKLKFYFLRNCYLYKLSRFVGFPFVEIIVLCAREFQFCFQQ

SEQ ID NO: 4001 - DNA, 558 bp, Homosapiens
atggcgggtgaaaaggttgagaagccagatactaaagagaaaaaactcagagccaagaaggctgatgctggtggcaaggtgaaaaaggataacctcaaggctaaaaaacctcagaaaagaaagccccattgcagccgcaatcctgtccttgtcagaggaattggcagtacccgggtggttaaacttcacaaaatgcctagatattatcctattgaagatgtgtctggaaagctgttgagccacggcaaaaaaccctcctgtcagcacaaatttgtcattgccacctcaaccaaaattgatatcagcaatgtaaaaatcccaaaacatcttactaatgcttacttcaagaagaagctgcagaagcccagacaccaggaaggtgagatctttgacacagaaaaagagaaatatgagattatagagcatcacaagattgatcagaaagctgtggactcacaaattttaccaaaaatcaaagctattcctcagctccggggctgtctgcgatctgtgcttgccctgacgaatggaatttatcctcataaattggtgttctaa

SEQ ID NO: 4002 - protein, 185 aa, Homosapiens
MAGEKVEKPDTKEKKLRAKKADAGGKVKKDNLKAKKPQKRKPHCSRNPVLVRGIGSTRVVKLHKMPRYYPIEDVSGKLLSHGKKPSCQHKFVIATSTKIDISNVKIPKHLTNAYFKKKLQKPRHQEGEIFDTEKEKYEIIEHHKIDQKAVDSQILPKIKAIPQLRGCLRSVLALTNGIYPHKLVF

SEQ ID NO: 4003 - DNA, 747 bp, Homosapiens
aattcttctcttaataaatacttactgaaaaccaagcatgcgttaggcacactagtacattaaaaagtggtgaatgagaaagtaaaggcatttattttaacactagaagagttcaagaataatggcaggaaaatatatgatatctctggaggaaaccatccattgaagctcacataaaaaaagacgagaaggacagagttagctggttcacatcactttaatcatagaaccatccttaggtgatttttgggaaatattatctcgcagtgctagctctttgtggaatcacaaatgaaaaacatgaaggggagaaatttctttccttttggggaagaaagtgcagctaaggcagagaataagaaacagagatgagaaaggaaataacagacatgacgtgagacaagaaatgagactgaaagggaaagaataatttagaaagtatatacagtgtctcctgtgggtactccagacatcaaaaagaagaatataatatatttcagggcttgatattactgaatagtcagaacagccacaaactgctgtcagcaatttagcagagacgctatatcaaggacaaaatccacacccacaaccttatactcaaccaaattgcatgcaattgcctatgacaagtctttgttggaatcctcttatcatggcaaacatcctcagtactctaaatagtgtcaaaaaggaaaaaaaaaaagaaaaaactgctgagcctagagcacaaattttctgtagaaa

SEQ ID NO: 4004 - protein, 43 aa, Homosapiens
MQLPMTSLCWNPLIMANILSTLNSVKKEKKKEKTAEPRAQIFC

SEQ ID NO: 4005 - DNA, 534 bp, Homosapiens
aagatcaaggtgcctgcatctggcgtctagtgtggaccctattcctggtttgcagcattgttggtgctctgagggtgtcagccaggccactcatgcagaccattgcggcagcactgaaaatggaagaaagatgggattctgctgtcttttgttttggctgatgaacagcaccgagatggagtggctccagcagccagaacaagccaccatctcccctgggctttcacagtagcctcctgactggtcttgttgcttccacacttacacttcctgttctctgcaaggcagccagagtgacctttcactaatttcaacacaagtcattggttgggagtagagggcactctgcatggtcgtctggaaccagggtttgcctacatgatgggtctccatttgccaccggccttggacgtctccactggatgctctgatttcacctgataagtaaagggagagagacagagcatggagaattacacagatctgcatggaacaatgctgcttctctgcatgactagagtttgttttctcttt

SEQ ID NO: 4006 - protein, 33 aa, Homosapiens
MGFCCLLFWLMNSTEMEWLQQPEQATISPGLSQ

SEQ ID NO: 4007 - DNA, 975 bp, Homosapiens; identical to SEQ ID NO: 555

SEQ ID NO: 4008 - protein, 324 aa, Homosapiens; identical to SEQ ID NO: 556

SEQ ID NO: 4009 - DNA, 2116 bp, Homosapiens
tggaagctgattgcatttaagccttgtaactactatgtaaatcaagtgtccaacttggtaaactctgaggttggctttgttttttaaagagcagattataatagttttgtctgggaaagtgatttaaacggcctcttcgttaagccaaacgtgtgatttagggtagagggaggctgccaagcgcgtcgggtaagcaggggccccacgctcggccccgcccaggtaacgctgccttccgggctttgttaactcgcgcgcgctgcgtcgccaactcagcggcgggcagggggcggagccgcagggcggggcggtgcgcgttgatgtgacgtccctgcgcgcgccgctttctgttgccgggcgcaatggcggatacgctggagtcctcgctggaggacccactgcggagctttgtgcgagttttggagaagcgggatggtacagtgctacgactacagcagtatagctccggtggcgtgggttgcgttgtgtgggacgctgccattgtcctttctaaatacctggaaacgcccgagttttctggcgacggggcccacgcgctgagccggcggtcggtgctggagctgggttcgggcaccggggccgtggggctcatggctgctaccctcggggctgatgttgtagtcaccgatcttgaggaattgcaagacttgctgaagatgaatattaatatgaacaagcatcttgtcactggttctgttcaagccaaggggggaagaaatagaaggctttccttctccacccgacttcatactgatggccgactgcatatactatgaagagtctttggagccattgctgaaaactctaaaagatatcagcggatttgaaacttgtattatatgttgttatgaacaacgaacaatggggaaaaatccagaaattgagaaaaaatattttgagctccttcagctagattttgactttgaaaaaattcctttggaaaaacatgatgaagagtatcgaagtgaagatattcatattatatacatcagaaagaaaaaatcgaaatttccatcgtgaagcctttaatcatcttacccaaggctctaacaacctgggtaaactaaagatgtgaatagagcatgtgaatacagcatgggaagattgtgttcacagatttttttttccggcacgtccttagagatccgatgtatagatgatgaccaccaggggctgtctgcaatacgaaaaattcctgcttgcctgcctgcctgccaatggccctgaatccagcttaggttacttagttcagcatcaagttcttcttaaatgttgggaatcagttattcaaataaaaattggtattgaggcgaggctgaaatctgccaaaaacagccaacatgatttgactggaccttttacaggaagctagagataaatttctgaagagaactatctgctattatataataatgttttaaattcaaactagtaaattttagtttgtcttcagagtttaaaaggttttcattttgtacataattatacaatatttatcatttgtattttccacttcatttcttttaaaatatctttaatactgaaatgttcttttaattttaaaaagaactgagatattgtcttgtatacttatattagccaaagttttcttttcctccaccatacatatctatgtgatttaatcagtaaattgtactgtaatgagttgctaagaagacaaatcagaagattggaggaacaaaagatatctttacagatttttcatttgagcatggagtgagaatagaaagaccagtttcaggcttatgcacttacgtggctcatgcactttatgtatatgttccaggaaaatctggcttaaaaatactggtattgtttacatgaagcagtgaaaggtttttgaataactacaaatgtagttctatatgtatataccaaatgaatttctgttctgtgtctctctgttttatgttatgaagccattcgctcatatacaataatctgtcaaggactttaatcatacttgttccaaagagtagtaaccggatggaattctggtatttataggcattggtgctagatggtacattttatgtgttaaaataaacattgtttttgagaccttgtgactgtg

SEQ ID NO: 4010 - protein, 144 aa, Homosapiens; identical to SEQ ID NO: 558

SEQ ID NO: 4011 - DNA, 1354 bp, Homosapiens
cccagggaggtggaggttgcagtgagccaagatcgcaccactgcactccagcctgggtgacagagtgagactctcaaaaaaaaagtaaccagcattctgacttctgtcacccacaggtcagttcatattattgaatttgaagtatgtctcttttaaatttatagctccttcagctagattttgactttgaaaaaattcctttggaaaaacatgatgaagagtatcgaagtgaagatattcatattatatacatcagaaagaaaaaatcgaaatttccatcgtgaagcctttaatcatcttacccaaggctctaacaacctgggtaaactaaagatgtgaatagagcatgtgaatacagcatgggaagattgtgttcacagatttttttttccggcacgtccttagagatccgatgtatagatgatgaccaccaggggctgtctgcaatacgaaaaattcctgcttgcctgcctgcctgccaatggccctgaatccagcttaggttacttagttcagcatcaagttcttcttaaatgttgggaatcagttattcaaataaaaattggtattgaggcgaggctgaaatctgccaaaaacagccaacatgatttgactggaccttttacaggaagctagagataaatttctgaagagaactatctgctattatataataatgttttaaattcaaactagtaaattttagtttgtcttcagagtttaaaaggttttcattttgtacataattatacaatatttatcatttgtattttccacttcatttcttttaaaatatctttaatactgaaatgttcttttaattttaaaaagaactgagatattgtcttgtatacttatattagccaaagttttcttttcctccaccatacatatctatgtgatttaatcagtaaattgtactgtaatgagttgctaagaagacaaatcagaagattggaggaacaaaagatatctttacagatttttcatttgagcatggagtgagaatagaaagaccagtttcaggcttatgcacttacgtggctcatgcactttatgtatatgttccaggaaaatctggcttaaaaatactggtattgtttacatgaagcagtgaaaggtttttgaataactacaaatgtagttctatatgtatataccaaatgaatttctgttctgtgtctctctgttttatgttatgaagccattcgctcatatacaataatctgtcaaggactttaatcatacttgttccaaagagtagtaaccggatggaattctggtatttataggcattggtgctagatggtacattttatgtgttaaaataaacattgtttttgagaccttgtga

SEQ ID NO: 4012 - protein, 42 aa, Homosapiens
MMKSIEVKIFILYTSERKNRNFHREAFNHLTQGSNNLGKLKM

SEQ ID NO: 4013 - DNA, 2218 bp, Homosapiens
tggaagctgattgcatttaagccttgtaactactatgtaaatcaagtgtccaacttggtaaactctgaggttggctttgttttttaaagagcagattataatagttttgtctgggaaagtgatttaaacggcctcttcgttaagccaaacgtgtgatttagggtagagggaggctgccaagcgcgtcgggtaagcaggggccccacgctcggccccgcccaggtaacgctgccttccgggctttgttaactcgcgcgcgctgcgtcgccaactcagcggcgggcagggggcggagccgcagggcggggcggtgcgcgttgatgtgacgtccctgcgcgcgccgctttctgttgccgggcgcaatggcggatacgctggagtcctcgctggaggacccactgcggagctttgtgcgagttttggagaagcgggatggtacagtgctacgactacagcagtatagctccggtggcgtgggttgcgttgtgtgggacgctgccattgtcctttctaaatacctggaaacgcccgagttttctggcgacggggcccacgcgctgagccggcggtcggtgctggagctgggttcgggcaccggggccgtggggctcatggctgctaccctcgggtaagagctggcgggcgggcgggatgtgggggcgccttcttgctggggaaatccggattacaggctttcccccctgtgcctacacctcagtcgacgttattttatagggctgatgttgtagtcaccgatcttgaggaattgcaagacttgctgaagatgaatattaatatgaacaagcatcttgtcactggttctgttcaagccaaggggggaagaaatagaaggctttccttctccacccgacttcatactgatggccgactgcatatactatgaagagtctttggagccattgctgaaaactctaaaagatatcagcggatttgaaacttgtattatatgttgttatgaacaacgaacaatggggaaaaatccagaaattgagaaaaaatattttgagctccttcagctagattttgactttgaaaaaattcctttggaaaaacatgatgaagagtatcgaagtgaagatattcatattatatacatcagaaagaaaaaatcgaaatttccatcgtgaagcctttaatcatcttacccaaggctctaacaacctgggtaaactaaagatgtgaatagagcatgtgaatacagcatgggaagattgtgttcacagatttttttttccggcacgtccttagagatccgatgtatagatgatgaccaccaggggctgtctgcaatacgaaaaattcctgcttgcctgcctgcctgccaatggccctgaatccagcttaggttacttagttcagcatcaagttcttcttaaatgttgggaatcagttattcaaataaaaattggtattgaggcgaggctgaaatctgccaaaaacagccaacatgatttgactggaccttttacaggaagctagagataaatttctgaagagaactatctgctattatataataatgttttaaattcaaactagtaaattttagtttgtcttcagagtttaaaaggttttcattttgtacataattatacaatatttatcatttgtattttccacttcatttcttttaaaatatctttaatactgaaatgttcttttaattttaaaaagaactgagatattgtcttgtatacttatattagccaaagttttcttttcctccaccatacatatctatgtgatttaatcagtaaattgtactgtaatgagttgctaagaagacaaatcagaagattggaggaacaaaagatatctttacagatttttcatttgagcatggagtgagaatagaaagaccagtttcaggcttatgcacttacgtggctcatgcactttatgtatatgttccaggaaaatctggcttaaaaatactggtattgtttacatgaagcagtgaaaggtttttgaataactacaaatgtagttctatatgtatataccaaatgaatttctgttctgtgtctctctgttttatgttatgaagccattcgctcatatacaataatctgtcaaggactttaatcatacttgttccaaagagtagtaaccggatggaattctggtatttataggcattggtgctagatggtacattttatgtgttaaaataaacattgtttttgagaccttgtga

SEQ ID NO: 4014 - protein, 88 aa, Homosapiens [sequence omitted]

SEQ ID NO: 4015 - DNA, 2256 bp, Homosapiens
tggaagctgattgcatttaagccttgtaactactatgtaaatcaagtgtccaacttggtaaactctgaggttggctttgttttttaaagagcagattataatagttttgtctgggaaagtgatttaaacggcctcttcgttaagccaaacgtgtgatttagggtagagggaggctgccaagcgcgtcgggtaagcaggggccccacgctcggccccgcccaggtaacgctgccttccgggctttgttaactcgcgcgcgctgcgtcgccaactcagcggcgggcagggggcggagccgcagggcggggcggtgcgcgttgatgtgacgtccctgcgcgcgccgctttctgttgccgggcgcaatggcggatacgctggagtcctcgctggaggacccactgcggagctttgtgcgagttttggagaagcgggatggtacagtgctacgactacagcagtatagctccggtggcgtgggttgcgttgtgtgggacgctgccattgtcctttctaaatacctggaaacgcccgagttttctggcgacggggcccacgcgctgagccggcggtcggtgctggagctgggttcgggcaccggggccgtggggctcatggctgctaccctcgggtaagagctggcgggcgggcgggatgtgggggcgccttcttgctggggaaatccggattacaggctttcccccctgtgcctacacctcagtcgacgttattttatagggctgatgttgtagtcaccgatcttgaggaattgcaagacttgctgaagatgaatattaatatgaacaagcatcttgtcactggttctgttcaagccaaggggggaagaaatagaaggctttccttctccacccgacttcatactgatggccgactgcatatactatgaagagtctttggagccattgctgaaaactctaaaagatatcagcggatttgaaacttgtattatatgttgttatgaacaacgaacaatggggaaaaatccagaaattgagaaaaaatattttgagtgatcacccaaacccttatatgggcacaaatctatcacattgtgagtgactccttttgagggtacatctatataggcctgcagttttgtctgctggaaggactactttggtttaatgagaaagcaggtatatgactgcctcagaaatttccatcgtgaagcctttaatcatcttacccaaggctctaacaacctgggtaaactaaagatgtgaatagagcatgtgaatacagcatgggaagattgtgttcacagatttttttttccggcacgtccttagagatccgatgtatagatgatgaccaccaggggctgtctgcaatacgaaaaattcctgcttgcctgcctgcctgccaatggccctgaatccagcttaggttacttagttcagcatcaagttcttcttaaatgttgggaatcagttattcaaataaaaattggtattgaggcgaggctgaaatctgccaaaaacagccaacatgatttgactggaccttttacaggaagctagagataaatttctgaagagaactatctgctattatataataatgttttaaattcaaactagtaaattttagtttgtcttcagagtttaaaaggttttcattttgtacataattatacaatatttatcatttgtattttccacttcatttcttttaaaatatctttaatactgaaatgttcttttaattttaaaaagaactgagatattgtcttgtatacttatattagccaaagttttcttttcctccaccatacatatctatgtgatttaatcagtaaattgtactgtaatgagttgctaagaagacaaatcagaagattggaggaacaaaagatatctttacagatttttcatttgagcatggagtgagaatagaaagaccagtttcaggcttatgcacttacgtggctcatgcactttatgtatatgttccaggaaaatctggcttaaaaatactggtattgtttacatgaagcagtgaaaggtttttgaataactacaaatgtagttctatatgtatataccaaatgaatttctgttctgtgtctctctgttttatgttatgaagccattcgctcatatacaataatctgtcaaggactttaatcatacttgttccaaagagtagtaaccggatggaattctggtatttataggcattggtgctagatggtacattttatgtgttaaaataaacattgtttttgagaccttgtga

SEQ ID NO: 4016 - protein, 49 aa, Homosapiens
MADCIYYEESLEPLLKTLKDISGFETCIICCYEQRTMGKNPEIEKKYFE

SEQ ID NO: 4017 - DNA, 2006 bp, Homosapiens
tggaagctgattgcatttaagccttgtaactactatgtaaatcaagtgtccaacttggtaaactctgaggttggctttgttttttaaagagcagattataatagttttgtctgggaaagtgatttaaacggcctcttcgttaagccaaacgtgtgatttagggtagagggaggctgccaagcgcgtcgggtaagcaggggccccacgctcggccccgcccaggtaacgctgccttccgggctttgttaactcgcgcgcgctgcgtcgccaactcagcggcgggcagggggcggagccgcagggcggggcggtgcgcgttgatgtgacgtccctgcgcgcgccgctttctgttgccgggcgcaatggcggatacgctggagtcctcgctggaggacccactgcggagctttgtgcgagttttggagaagcgggatggtacagtgctacgactacagcagtatagctccggtggcgtgggttgcgttgtgtgggacgctgccattgtcctttctaaatacctggaaacgcccgagttttctggcgacggggcccacgcgctgagccggcggtcggtgctggagctgggttcgggcaccggggccgtggggctcatggctgctaccctcggggctgatgttgtagtcaccgatcttgaggaattgcaagacttgctgaagatgaatattaatatgaacaagcatcttgtcactggttctgttcaagccaaggggggaagaaatagaaggctttccttctccacccgacttcatactgatggccgactgcatatactatgaagagtctttggagccattgctgaaaactctaaaagatatcagcggatttgaaacttgtattatatgttgttatgaacaacgaacaatggggaaaaatccagaaattgagaaaaaatattttgagaaatttccatcgtgaagcctttaatcatcttacccaaggctctaacaacctgggtaaactaaagatgtgaatagagcatgtgaatacagcatgggaagattgtgttcacagatttttttttccggcacgtccttagagatccgatgtatagatgatgaccaccaggggctgtctgcaatacgaaaaattcctgcttgcctgcctgcctgccaatggccctgaatccagcttaggttacttagttcagcatcaagttcttcttaaatgttgggaatcagttattcaaataaaaattggtattgaggcgaggctgaaatctgccaaaaacagccaacatgatttgactggaccttttacaggaagctagagataaatttctgaagagaactatctgctattatataataatgttttaaattcaaactagtaaattttagtttgtcttcagagtttaaaaggttttcattttgtacataattatacaatatttatcatttgtattttccacttcatttcttttaaaatatctttaatactgaaatgttcttttaattttaaaaagaactgagatattgtcttgtatacttatattagccaaagttttcttttcctccaccatacatatctatgtgatttaatcagtaaattgtactgtaatgagttgctaagaagacaaatcagaagattggaggaacaaaagatatctttacagatttttcatttgagcatggagtgagaatagaaagaccagtttcaggcttatgcacttacgtggctcatgcactttatgtatatgttccaggaaaatctggcttaaaaatactggtattgtttacatgaagcagtgaaaggtttttgaataactacaaatgtagttctatatgtatataccaaatgaatttctgttctgtgtctctctgttttatgttatgaagccattcgctcatatacaataatctgtcaaggactttaatcatacttgttccaaagagtagtaaccggatggaattctggtatttataggcattggtgctagatggtacattttatgtgttaaaataaacattgtttttgagaccttgtga

SEQ ID NO: 4018 - protein, 144 aa, Homosapiens; identical to SEQ ID NO: 558

SEQ ID NO: 4019 - DNA, 801 bp, Homosapiens
ctgcatatactatgaagaggtaagtatccagtgagcgaagtctcttcacttagaagatgaaccttattccatgaattctaaagcacacgtttcttcacattttaacatctttgaatccgggatttgccttatagttgatgcagtaaagagaagataaaagtcaccagggaccatatgtatatacgctcatcattatcataccgacctggtgaagcatgttgagaaaagtgttatatgcattttactagaggcttctgtaaaaattttaaaggattttgccaattggatgttatgaaaagccaaaatcctctctttttcccttggttgttcccacggaacatgttaaccatgacattgagaattaagttataaataattcattgttcttttctttaaataccagtttggccactgcacctagcctagagctttaattacatgtgctttgttggattgattcaaagatggataaattgtaggggagctataaatacccctgtacctcctcaacctacttttagagtagaaaaatttttaaatcaaaaacaaaaaatatattcttttttaaatagtctttggagccattgctgaaaactctaaaagatatcagcggatttgaaacttgtattatatgttgttatgaacaacgaacaatggggaaaaatccagaaattgagaaaaaatattttgaggtaagtattaagtactctattatctttgtagtgatttcccttcaggggggctgtatgtgactcttcaagtatattatggtaattttgggtggggaaaacatgctgtttg

SEQ ID NO: 4020 - protein, 50 aa, Homosapiens
MCFVGLIQRWINCRGAINTPVPPQPTFRVEKFLNQKQKIYSFLNSLWSHC

SEQ ID NO: 4021 - DNA, 6976 bp, Homosapiens
cactctgcgctgctgctaaaggggcagcaacggcggccagcgctgtgcgcgccatagcgaggctcgctcgcccgacgcgcactccgggtcggtccccagagctctgtggaggtgactcgagtgggcagggccgggcggcgctgtcggctgggagggcggggaggaggcgatgaggagacgagcagccgccgccgccgccgccgctgctcaccgcccgccgcggccgtagcgggagtcggggcggggctgggccagctgtacccctgacgggccgcgaacccagacaaaggaggaggagccgccccagaagcgggccagcgccgccgggaaaggaggtcgccgcccggggtcgcccgggcttgcgggtcgccgcgcttcctctgcgggcgctgcgggaggcgagggccgcctcggcggaggaagccgaccccggggtctccgccagcccgccggcgccgcctccgagccgcctcggccgtagcctcggcccgggcgggaggcggcggccgccggcgaggcgaggcggcccgcgccctgcctgtcaggccaccggcccggcccgcgggctgcccccgatgcggaggcgctgtcgccggggccatgcagcaggcgccgcagccttacgagttcttcagcgaggagaacagtccgaaatggcggggactgttggtctcggccctgcggaaggttcaggaacaagtgcatcccactctctcagctaatgaagagtctctctattatattgaagagctgatttttcagctgcttaataaattatgcatggcccagccaaggactgttcaagatgtagaggagcgagttcagaagacctttcctcacccaattgataaatgggccattgctgatgcacaatctgctatagaaaaacgaaaacgaagaaatcctcttttactgcctgtggacaaaatccatccttcgttgaaggaagtattagggtacaaagtggactaccatgtatccctatatattgtggctgtactagagtatatctcagctgatattttaaaattggctggtaattatgtttttaatatccggcattatgaaatatctcagcaggacattaaagtgtcaatgtgtgcggataaggttttgatggacatgtttgatcaggatgacataggtttggtttctctctgtgaagatgaacctagttcttctggtgaattaaactactatgatcttgtcagaactgaaatcgcagaagaaagacagtatctacgggaattaaatatgatcataaaagtgtttcgagaagcctttctttctgatagaaagctgtttaaaccttctgatatcgaaaagatttttagtaacatttcagatatacatgaattgactgtgaaacttttaggtttgattgaagacacagttgaaatgactgatgaaagcagtcctcatcccttagctggcagctgttttgaagatttggcagaagagcaagcatttgatccttatgaaacattatcacaggacattctttcaccagagtttcatgaacatttcaataaattgatggccagacctgcagttgctctacactttcagtccattgctgatggttttaaagaggcagttcgttatgtccttccacgtcttatgctggtgccagtgtatcactgttggcactactttgagttactaaagcaattgaaagcatgtagtgaagaacaagaagacagagaatgtttgaaccaagctattactgctctcatgaatctccaaggtagcatggaccgaatttacaagcagtattcacctagacgtcgacctggagatcctgtttgccctttttatagtcaccaattaagaagcaaacacctggctatcaaaaaaatgaatgaaattcagaaaaatatcgatggatgggaaggcaaagatattggacagtgttgtaatgaattcattatggagggaccattgacaagaatcggtgccaaacatgaacggcatatttttctgtttgatggcttaatgatcagttgtaaacctaatcatggccagactcggcttccaggttacagtagtgcagaatacaggttaaaagaaaaatttgtcatgaggaaaatacaaatttgtgataaagaagatacttgtgagcacaagcatgcatttgaattagtatccaaagatgagaacagcataatatttgctgctaagtctgctgaagaaaaaaacaactggatggcagcccttatttctcttcattatcgtagtactctagatcgaatgttagattcagtattattgaaagaagaaaatgagcaaccactgagattaccaagtcctgaagtatatcgttttgtagtaaaagactctgaggaaaacattgtttttgaagacaacttgcaaagtagaagtggcatccccattattaaaggaggaactgtagtgaaattaattgaaaggttaacatatcatatgtatgcagatcccaattttgttcgtacttttcttaccacatatcgttcattttgtaaaccacaggaattgctgagcttactgattgaacggtttgaaattccagagccagaacctactgacgcagacaaattggcaatagagaaaggcgagcagccaatcagtgcagaccttaaaagatttcgcaaggaatatgtccaaccagtacaacttaggatcttaaatgtatttcggcattgggttgaacatcatttttatgactttgaaagagacttggaattgcttgaaagactagaatccttcatttcaagtgtaagagggaaagctatgaaaaaatgggtagagtcaattgctaagatcatcaggaggaagaagcaagctcaggcaaacggagtaagccataatattacctttgaaagtccacctccaccaattgaatggcatatcagcaaaccaggacagtttgaaacatttgatctcatgacacttcatccaatagaaattgcacgtcagctgacacttttggagtctgatctttacaggaaagttcaaccgtctgaacttgtagggagtgtgtggaccaaagaagataaagaaataaattctccaaatttattaaaaatgattcgccataccacaaatctcaccctctggtttgaaaaatgcattgtggaagcagaaaattttgaagaacgggtggcagtactaagtagaattatagaaattctgcaagtttttcaagatttgaataatttcaatggcgtattggagatagtcagtgcagtaaattcagtgtcagtatacagactagaccatacctttgaggcactgcaggaaaggaaaaggaaaattttggacgaagctgtggaattaagtcaagatcactttaaaaaatacctagtaaaacttaagtcaatcaatccaccttgtgtgcctttttttggaatatatttaacaaatattctgaagaccgaagaagggaataatgattttttaaaaaagaaagggaaagatttaatcaatttcagtaagaggaggaaagtagctgaaattactggagaaattcagcagtatcagaatcagccttactgtttacggatagaaccagatatgaggagattctttgaaaaccttaaccccatgggaagtgcatctgaaaaagagtttacagattatttgttcaacaagtcactagaaattgaacctcgaaactgcaaacagccacctcgatttcctaggaaatcaactttttccttaaaatctcctggaataaggcctaacacaggccgacatggctctacctcaggtactttacgaggtcacccaacaccattagaaagagaaccatgtaaaataagctttagtcggattgctgaaactgagctggaatcaacagtgtcagcaccaacctctccaaatacaccatctactccaccagtatctgcttcttcagaccttagtgtatttttagatgtggatctcaacagctcctgtggcagcaatagcatctttgctccagtgcttttgccacattcaaagtctttctttagttcatgtggtagtttacataaactaagtgaagagcccctgattcctcctcctcttcctcctcgaaaaaagtttgatcatgatgcttcaaattccaagggaaatatgaaatctgatgatgatcctcctgctattccaccgagacagcctcctcctccaaaggtaaaacccagagttcctgttcctactggtgcatttgatgggcctctgcatagtccacctccgccaccaccaagagatcctcttcctgatacccctccaccagttccccttcggcctccagaacactttataaactgtccatttaatcttcagccacctccactggggcatcttcacagagattcagactggctcagagacattagtacgtgtccaaattcgccaagcactcctcctagcacaccctctccaagggtaccgcgtcgatgctatgtgctcagttctagtcagaataatcttgctcatcctccagctccccctgttccaccaaggcagaattcaagccctcatctgccaaaactgccaccaaagacttacaaacgggagctttcgcaccccccattgtacagactgcctttgctagaaaatgcagaaactccccaatgaccttagccatatgtagtcattgacactggaatggtatttgtaaagttttttttttaatttattcaaaaaaagacatagtattttagtactttttacaaataatgctcttacaaaaatgctactgatcaaataagcttttaagaattggaaaaataaaaatacaaaagtccttcaccattatcctcaggtgatcagtagcattgccttgtcttggatcctcagtgctgccaaaaggccagtataaagaatttatatttgcactgtaaactctgcaaaaatatggtttaaagtgacatgattgcactgaaaagggatagtgcttttgtgaaatttttcaaatttgagtaatagatgcctttttaaggcagtgaatttacacaaatatgggaggggtatatggtgttactgatttttaaacctctttgaccatcttctagtttttacttctagtttttacatctaggagaattgtgaataacaccaactgttcttaaactctttaatgccatgtcttaaatgccggtatttgctgctgaagacaaaaatgaaaagtaggatgaaaataatagaatggcactgtaagtgtttattattttgtcaaaatgtaaacaaagactacataacccaatgatggagggaaaaagggcatgtatctcattcagatgtgccttttgtttttgcagactatgacgtctttagctaatgaattgcctattgttatggaaaacagttaatatgccatgtatgtacagttttgtttatattgtatatttaaagatactgctaataacctatataaatttaagtgacttgaggcctataatacaatctgctactttactaattcataaattcaaaaaaaattctatggcataggaaccaactgccttgccttcaagacctagtaactttctctataaatctcgtgttaactgaaattttttttaaatatattttttagattggtaatatttaaaccagcaaatacttaaagctttattaaacattttaatcagataagtgagtaaagcttttatttgccatttggatgccttcgttcaaagtgatagagtgttttgctgatagtgctgtagcagcagttgtaaagtagccaaaagccacgttgtttatttactggtttgtggccttttactgtgctttgtatcagagttcttaacaagattaataaatcaccccagtcttaatttttaaaagacttttaaaatatgtgttttcattataaggaacaaagggggagattgttgagtcctatagacacacacacacacacacacaattttttcttcactgttaaatgtgagctgcaggcttctagcaaccacttttatgaattcatacaaaaaactaggagcatactaggaacttgaaaaggaagattgtaagattatagccatctttggtaggatcttggaagctgattgcatttaagccttgtaactactatgtaaatcaagtgtccaacttggtaaactctgaggttggctttgttttttaaagagcagattataatagttttgtctgggaaagtgatttaaacggcctcttcgttaagccaaacgtgtgatttagggtagagggaggctgccaagcgcgtcgggtaagcaggggccccacgctcggccccgcccaggtaacgctgccttccgggctttgttaactcgcgcgcgctgcgtcgccaactcagcggcgggcagggggcggagccgcagggcggggcggtgcgcgttgatgtgacgtccctgcgcgcgccgctttctgttgccgggcgcaatggcggatacgctggagtcctcgctggaggacccactgcggagctttgtgcgagttttggagaagcgggatggtacagtgctacgactacagcagtatagctccggtggcgtgggttgcgttgtgtgggacgctgccattgtcctttctaaatacctggaaacgcccgagttttctggcgacggggcccacgcgctgagccggcggtcggtgctggagctgggttcgggcaccggggccgtggggctcatggctgctaccctcgggtaagagctggcgggcgggcgggatgtgggggcgccttcttgctggggaaatccggattacaggctttcccccctgtgcctacacctcagtcgacgttattttatagggctgatgttgtagtcaccgatcttgaggaattgcaagacttgctgaagatgaatattaatatgaacaagcatcttgtcactggttctgttcaagccaaggtactgaaatggtttgtatggcctttcagcttgttttaagatattgatttgtagtttgttttgaattgcgtttcattaaaaggatggaaggggactttccggttctttataaa

SEQ ID NO: 4022 - protein, 1332 aa, Homosapiens [sequence omitted]

SEQ ID NO: 4023 - DNA, 5820 bp, Homosapiens
cactctgcgctgctgctaaaggggcagcaacggcggccagcgctgtgcgcgccatagcgaggctcgctcgcccgacgcgcactccgggtcggtccccagagctctgtggaggtgactcgagtgggcagggccgggcggcgctgtcggctgggagggcggggaggaggcgatgaggagacgagcagccgccgccgccgccgccgctgctcaccgcccgccgcggccgtagcgggagtcggggcggggctgggccagctgtacccctgacgggccgcgaacccagacaaaggaggaggagccgccccagaagcgggccagcgccgccgggaaaggaggtcgccgcccggggtcgcccgggcttgcgggtcgccgcgcttcctctgcgggcgctgcgggaggcgagggccgcctcggcggaggaagccgaccccggggtctccgccagcccgccggcgccgcctccgagccgcctcggccgtagcctcggcccgggcgggaggcggcggccgccggcgaggcgaggcggcccgcgccctgcctgtcaggccaccggcccggcccgcgggctgcccccgatgcggaggcgctgtcgccggggccatgcagcaggcgccgcagccttacgagttcttcagcgaggagaacagtccgaaatggcggggactgttggtctcggccctgcggaaggttcaggaacaagtgcatcccactctctcagctaatgaagagtctctctattatattgaagagctgatttttcagctgcttaataaattatgcatggcccagccaaggactgttcaagatgtagaggagcgagttcagaagacctttcctcacccaattgataaatgggccattgctgatgcacaatctgctatagaaaaacgaaaacgaagaaatcctcttttactgcctgtggacaaaatccatccttcgttgaaggaagtattagggtacaaagtggactaccatgtatccctatatattgtggctgtactagagtatatctcagctgatattttaaaattggctggtaattatgtttttaatatccggcattatgaaatatctcagcaggacattaaagtgtcaatgtgtgcggataaggttttgatggacatgtttgatcaggatgacataggtttggtttctctctgtgaagatgaacctagttcttctggtgaattaaactactatgatcttgtcagaactgaaatcgcagaagaaagacagtatctacgggaattaaatatgatcataaaagtgtttcgagaagcctttctttctgatagaaagctgtttaaaccttctgatatcgaaaagatttttagtaacatttcagatatacatgaattgactgtgaaacttttaggtttgattgaagacacagttgaaatgactgatgaaagcagtcctcatcccttagctggcagctgttttgaagatttggcagaagagcaagcatttgatccttatgaaacattatcacaggacattctttcaccagagtttcatgaacatttcaataaattgatggccagacctgcagttgctctacactttcagtccattgctgatggttttaaagaggcagttcgttatgtccttccacgtcttatgctggtgccagtgtatcactgttggcactactttgagttactaaagcaattgaaagcatgtagtgaagaacaagaagacagagaatgtttgaaccaagctattactgctctcatgaatctccaaggtagcatggaccgaatttacaagcagtattcacctagacgtcgacctggagatcctgtttgccctttttatagtcaccaattaagaagcaaacacctggctatcaaaaaaatgaatgaaattcagaaaaatatcgatggatgggaaggcaaagatattggacagtgttgtaatgaattcattatggagggaccattgacaagaatcggtgccaaacatgaacggcatatttttctgtttgatggcttaatgatcagttgtaaacctaatcatggccagactcggcttccaggttacagtagtgcagaatacaggttaaaagaaaaatttgtcatgaggaaaatacaaatttgtgataaagaagatacttgtgagcacaagcatgcatttgaattagtatccaaagatgagaacagcataatatttgctgctaagtctgctgaagaaaaaaacaactggatggcagcccttatttctcttcattatcgtagtactctagatcgaatgttagattcagtattattgaaagaagaaaatgagcaaccactgagattaccaagtcctgaagtatatcgttttgtagtaaaagactctgaggaaaacattgtttttgaagacaacttgcaaagtagaagtggcatccccattattaaaggaggaactgtagtgaaattaattgaaaggttaacatatcatatgtatgcagatcccaattttgttcgtacttttcttaccacatatcgttcattttgtaaaccacaggaattgctgagcttactgattgaacggtttgaaattccagagccagaacctactgacgcagacaaattggcaatagagaaaggcgagcagccaatcagtgcagaccttaaaagatttcgcaaggaatatgtccaaccagtacaacttaggatcttaaatgtatttcggcattgggttgaacatcatttttatgactttgaaagagacttggaattgcttgaaagactagaatccttcatttcaagtgtaagagggaaagctatgaaaaaatgggtagagtcaattgctaagatcatcaggaggaagaagcaagctcaggcaaacggagtaagccataatattacctttgaaagtccacctccaccaattgaatggcatatcagcaaaccaggacagtttgaaacatttgatctcatgacacttcatccaatagaaattgcacgtcagctgacacttttggagtctgatctttacaggaaagttcaaccgtctgaacttgtagggagtgtgtggaccaaagaagataaagaaataaattctccaaatttattaaaaatgattcgccataccacaaatctcaccctctggtttgaaaaatgcattgtggaagcagaaaattttgaagaacgggtggcagtactaagtagaattatagaaattctgcaagtttttcaagatttgaataatttcaatggcgtattggagatagtcagtgcagtaaattcagtgtcagtatacagactagaccatacctttgaggcactgcaggaaaggaaaaggaaaattttggacgaagctgtggaattaagtcaagatcactttaaaaaatacctagtaaaacttaagtcaatcaatccaccttgtgtgcctttttttggaatatatttaacaaatattctgaagaccgaagaagggaataatgattttttaaaaaagaaagggaaagatttaatcaatttcagtaagaggaggaaagtagctgaaattactggagaaattcagcagtatcagaatcagccttactgtttacggatagaaccagatatgaggagattctttgaaaaccttaaccccatgggaagtgcatctgaaaaagagtttacagattatttgttcaacaagtcactagaaattgaacctcgaaactgcaaacagccacctcgatttcctaggaaatcaactttttccttaaaatctcctggaataaggcctaacacaggccgacatggctctacctcaggtactttacgaggtcacccaacaccattagaaagagaaccatgtaaaataagctttagtcggattgctgaaactgagctggaatcaacagtgtcagcaccaacctctccaaatacaccatctactccaccagtatctgcttcttcagaccttagtgtatttttagatgtggatctcaacagctcctgtggcagcaatagcatctttgctccagtgcttttgccacattcaaagtctttctttagttcatgtggtagtttacataaactaagtgaagagcccctgattcctcctcctcttcctcctcgaaaaaagtttgatcatgatgcttcaaattccaagggaaatatgaaatctgatgatgatcctcctgctattccaccgagacagcctcctcctccaaaggtaaaacccagagttcctgttcctactggtgcatttgatgggcctctgcatagtccacctccgccaccaccaagagatcctcttcctgatacccctccaccagttccccttcggcctccagaacactttataaactgtccatttaatcttcagccacctccactggggcatcttcacagagattcagactggctcagagacattagtacgtgtccaaattcgccaagcactcctcctagcacaccctctccaagggtaccgcgtcgatgctatgtgctcagttctagtcagaataatcttgctcatcctccagctccccctgttccaccaaggcagaattcaagccctcatctgccaaaactgccaccaaagacttacaaacgggagctttcgcaccccccattgtacagactgcctttgctagaaaatgcagaaactccccaatgaccttagccatatgtagtcattgacactggaatggtatttgtaaagttttttttttaatttattcaaaaaaagacatagtattttagtactttttacaaataatgctcttacaaaaatgctactgatcaaataagcttttaagaattggaaaaataaaaatacaaaagtccttcaccattatcctcaggtgatcagtagcattgccttgtcttggatcctcagtgctgccaaaaggccagtataaagaatttatatttgcactgtaaactctgcaaaaatatggtttaaagtgacatgattgcactgaaaagggatagtgcttttgtgaaatttttcaaatttgagtaatagatgcctttttaaggcagtgaatttacacaaatatgggaggggtatatggtgttactgatttttaaacctctttgaccatcttctagtttttacttctagtttttacatctaggagaattgtgaataacaccaactgttcttaaactctttaatgccatgtcttaaatgccggtatttgctgctgaagacaaaaatgaaaagtaggatgaaaataatagaatggcactgtaagtgtttattattttgtcaaaatgtaaacaaagactacataacccaatgatggagggaaaaagggcatgtatctcattcagatgtgccttttgtttttgcagactatgacgtctttagctaatgaattgcctattgttatggaaaacagttaatatgccatgtatgtacagttttgtttatattgtatatttaaagatactgctaataacctatataaatttaagtgacttgaggcctataatacaatctgctactttactaattcataaattcaaaaaaaattctatggcataggaaccaactgccttgccttcaagacctagtaactttctctataaatctcgtgttaactgaaattttttttaaatatattttttagattggtaatatttaaaccagcaaatacttaaagctttattaaacattttaatcagataagtgagtaaagcttttatttgccatttggatgccttcgttcaaagtgatagagtgttttgctgatagtgctgtagcagcagttgtaaagtagccaaaagccacgttgtttatttactggtttgtggccttttactgtgctttgtatcagagttcttaacaagattaataaatcaccccagtcttaatttttaaaagactttt

SEQ ID NO: 4024 - protein, 1332 aa, Homosapiens [sequence omitted]

SEQ ID NO: 4025 - DNA, 1386 bp, Homosapiens
aagtggcatccccattattaaaggaggaactgtagtgaaattaattgaaaggttaacatatcatatgtatgcagatcccaattttgttcgtacttttcttaccacatatcgttcattttgtaaaccacaggaattgctgagcttactgattgaacggtttgaaattccagagccagaacctactgacgcagacaaattggcaatagagaaaggcgagcagccaatcagtgcagaccttaaaagatttcgcaaggaatatgtccaaccagtacaacttaggtttggcttgaatattttttatatatatatatatacacatatatatacacacacacacacattttatgtgtcagttttcaatatatagttaacacaaaagctctcagcttttaattcaaatatagggaatatttttaacttcacagcagttaagttaaactaaaagagttctttctcagtgaagctattcttaaataccctgaagaaattcaaatatttaaatatcctatgtttgcatcacatatctctggcatgtgatatgttatgcttacgtatcaggatacctattttttattgtaagtaaaaattataaaatttcatgtgagctttcctgctgtcaaccttttttcacacttttttccttcatttccctttgcgatcatacagtaatcctggctttttttacaatttataatatttgtggaagttctagcccttttcccacttatctctcacaaaatatatagacatttgttagtttaattgcaataatttctaaaaatgtgtttgattgtagaagcttccagttaataaatactactgtgtgccggggattaccctaaatgctttatcttttttatctcattcttacaacatgattactattcctactttatatataaggaaattgaaacctagcaaggtgaagtaatttgagctaagttatgtaaagggagtggcaggacaagattcagactcatgtctgactttctttgcgtgtgtgtgtgtgtgtgtgtgtgtacgtaccactaagcattgaaaattggaagcgccttctcttagccctctttactgtccaagtaaccaaagtattatcttcctccttccattggaaaccaagttatcttattaattatatgtaatttaaattttttttctctctaaatttcaagtttccttgattactgttgaccaataaattgtaattttggaactgagtatattagttatttatttcccaggataattgccacaaacaaatgcagttttagaagaatgatagtgctcccagctatatgtctttcactaaaacttttaacgtcattctttgtataagaagatgagattatttatgtatcagcaataaataagtaattcttttctact

SEQ ID NO: 4026 - protein, 100 aa, Homosapiens
MYADPNFVRTFLTTYRSFCKPQELLSLLIERFEIPEPEPTDADKLAIEKGEQPISADLKRFRKEYVQPVQLRFGLNIFYIYIYTHIYTHTHTFYVSVFNI

SEQ ID NO: 4027 - DNA, 398 bp, Homosapiens
ggcggcccgcgccctgcctgtcaggccaccggcccggcccgcgggctgcccccgatgcggaggcgctgtcgccggggccatgcagcaggcgccgcagccttacgagttcttcagcgaggagaacagtccgaaatggcggggactgttggtctcggccctgcggaagaagtgtaaagcatggttctcttccattgtcctcttgatgtcctgttacagcatttatgggttcaggaacaagtgcatcccactctctcagctaatgaagagtctctctattatattgaagagctgatttttcagctgcttaataaattatgcatggcccagccaaggactgttcaagatgtagaggagcgagttcagaagacctttcctcacccaattgataaatgggccat

SEQ ID NO: 4028 - protein, 72 aa, Homosapiens
MVLFHCPLDVLLQHLWVQEQVHPTLSANEESLYYIEELIFQLLNKLCMAQPRTVQDVEERVQKTFPHPIDKW

SEQ ID NO: 4029 - DNA, 313 bp, Homosapiens
caatggggggctcacaattgcctgttgcattctgaaggacgtttctcaagttttttttttttgcctggtcccggaaggaaggttttgttatgatcataaaactggatttcatgttgcagtcatttcgtcaggcaacttccgccgttgaccaatttgttgtcctcaggctggaatcgggcaagagaaagtcccgctggtatttagacagtttctaaaacaaaagcacattttcaggccgggttcaggaacaagtgcatcccactctctcagctaatgaagagtctctctattatattgaagagctgatttttca

SEQ ID NO: 4030 - protein, 41 aa, Homosapiens [sequence omitted]

SEQ ID NO: 4031 - DNA, 449 bp, Homosapiens
atgactgttttcatatttgaaattaagaagtttggcataagaaactttgatgcttgatgttcaaattgctttgtagcttatttaacaaaatcataatcacagaaaaagaatccatcccagttagacattatcttaattctcatgttcaatcattttcactgagtggggcccttggctttttatggaaagatgttataagaaacaaccgcgcctggcctgttttgattttcttaatagtttttccatctcagcgtgtatcccttaacaccattgtttaatttgttctgaatttgtttattttttatttttgtatttaattttgtctgactttgtgaatggaatcccattgtatgtattctttttatctggcttctttctgccaacattttttcagggtgcatccacattttatgtagctgtcattattactgcatttttttgactgtgtg

SEQ ID NO: 4032 - protein, 73 aa, Homosapiens
MFKLLCSLFNKIIITEKESIPVRHYLNSHVQSFSLSGALGFLWKDVIRNNRAWPVLIFLIVFPSQRVSLNTIV

SEQ ID NO: 4033 - DNA, 623 bp, Homosapiens
gggaggctgaggcaggaggaccccttgagcctaggagttcaaggctgcagggagctagtatgatcacgctaccgcactccagcctgggtgacagagcgagaccctgtctcttaaaaaaaattaatttaaaaagggaagcaaaattacaatctgcccgcctcagcctcccaaatgctgggattacaggcatgagccaccacgcccagcctaattttttattttttaacacttgaagcaaaagtttatagttagactggaaatttttcattaaaaataactcttaattagtgttttgaataagtgccatttttatgtggttgcaaattcaaaagtcacaataaggggtctagacaaagttggctgacacctataatcttactactttggtaggccaaggagggaggctctcttgagcccaggtgtttttagaccagtctgggcaacatagcaagacccccatctcaacaacaacaaaagtcacaaaaaggtacacggtgaaaaatctccctttcatctccagccacccagttttcatccctgtggcaacaaaaatctttgtagccttgctgatatggtttggctgtgtccccaccgaaatctcatcttgaattgtagttcctata

SEQ ID NO: 4034 - protein, 57 aa, Homosapiens
MITLPHSSLGDRARPCLLKKINLKREAKLQSARLSLPNAGITGMSHHAQPNFLFFNT

SEQ ID NO: 4035 - DNA, 1432 bp, Homosapiens
gctaaagagcgcgggtcctcggccgtggagggtcaagtggcttcttctgagcgctgagggaggggagcgtgcgtaggggatggtgccagcgctgcgttatttggttggtgcctgcggacgggcccgcgggcttttcgccggtggctcccctggggcgtgcgggttcgcgtctgggaggccaagaccgctgtgtggaggtagccgcagcgccagcaccagctcatttgatatagtcatcgttggtggcggaattgtggggcttgcctctgccagagcactcatcctgcgacatccatcactttctattggtgttctggaaaaggagaaagatttagctgttcaccagactggacataacagtggtgtcatacatagtggaatttattataaacctgagtctctgaaagccaaattatgtgtacaaggtgcagccctcctctatgagtactgtcagcaaaagggaatttcctacaagcagtgtggcaagcttatagtagctgttgaacaagaagaaattcccagacttcaggccctatatgagaaaggcctccagaatggtgtcccgggcctgaggctgatccagcaggaggatataaaaaagaaggagccatattgtaggggtctaatggctattgattgtccacatactggcattgtggactatcggcaggtggctttgtcatttgcccaggatttccaagaagcaggtggctctgtcttgaccaattttgaagtaaaaggtattgaaatggctaaagaaagtccttcaagaagtatagatggaatgcaatatccaattgttataaagaatacaaagggagaggaaattcgatgtcagtatgttgtgacatgtgcaggactttactcagaccgtatttcagagttgagtggctgcactcctgatcctcgaattgtaccattccggggagattacctgcttttgaagccagaaaaatgttatcttgtaaaaggaaatatttatccggtcccagatagccggtttcctttcctaggagttcacttcacaccaaggatggatggcagtatttggctagggcctaatgcagttcttgcctttaaacgagagggttacagaccctttgacttcagtgccacagatgttatggatataattatcaatagtggcttgattaaactggcatcccagaatttttcctatggagttactgaaatgtataaagcatgttttcttggtgcaacagtgaagtatcttcaaaaattcatccctgaaattactatcagtgatatacttaggcaggtggctgtgagaggaccgagctggctatggcagcaacccatgaaagtgagtgataacaacatttattgtttcctgtggcgttgctttgctttgctattgactggtagcgcttgtagctttaaataaattgaggaagtatgagagagtaaatgg

SEQ ID NO: 4036 - protein, 441 aa, Homosapiens
MVPALRYLVGACGRARGLFAGGSPGACGFASGRPRPLCGGSRSASTSSFDIVIVGGGIVGLASARALILRHPSLSIGVLEKEKDLAVHQTGHNSGVIHSGIYYKPESLKAKLCVQGAALLYEYCQQKGISYKQCGKLIVAVEQEEIPRLQALYEKGLQNGVPGLRLIQQEDIKKKEPYCRGLMAIDCPHTGIVDYRQVALSFAQDFQEAGGSVLTNFEVKGIEMAKESPSRSIDGMQYPIVIKNTKGEEIRCQYVVTCAGLYSDRISELSGCTPDPRIVPFRGDYLLLKPEKCYLVKGNIYPVPDSRFPFLGVHFTPRMDGSIWLGPNAVLAFKREGYRPFDFSATDVMDIIINSGLIKLASQNFSYGVTEMYKACFLGATVKYLQKFIPEITISDILRQVAVRGPSWLWQQPMKVSDNNIYCFLWRCFALLLTGSACSFK

SEQ ID NO: 4037 - DNA, 844 bp, Homosapiens
aacaaagatttgaattataaataatgaaaggagctagacggagtttcactcttgttgcccaggcttgagtgcaatggtacgatcttggctcactgcaacctctgcctcccgggttccagcgattctcttgcctcaacctcctgagtagctgggattacaggtgcgagccatcatgctcagccctgaatccctgactttgttaatgacctgtccttaccaaccatgacctagagaagatttggctttttaagagttttggagaaagatggcataaaaatagattatttccttaaatcaattttttagcattacgctacctaagctcgtttggtctctcatagacaagaaaatacattatattgtaggttacattcttttaattttgaagagtcacaaaactcacattatttagagcaacaatatttgtatttggaaattaaaaattcatgatttcaagaaaatacataaaatttacatttttgagtagtttgaataagtttctatcttaattataatatttgtaggaaataacaaaacaaactcaaagcctttattatttccagtctctttgtaactgatgtggtatggtatcatcatgaaatctaaacagtggtacactgagtggttgtcctgttcttcaatctctgtggctgagaactgaaataacttagaagagacagatttttatgagagcagttttagaatcctgacactgatgtatagaactccaatttaaaaaagttatttatctattatatctctgatctttagtcacactaaggctctcaaaatgttggccaagattggtaatgattcatacgtacttgatttttcagggctccta

SEQ ID NO: 4038 - protein, 41 aa, Homosapiens
VQWYDLGSLQPLPPGFQRFSCLNLLSSWDYRCEPSCSALNP

SEQ ID NO: 4039 - DNA, 1085 bp, Homosapiens
caggagttggggatattggaaatcgcattcttcatgtgagaaatgcaccttctcctgctgctacttcttccattgcaatttctggaatgattgcagatgaagtacaacaaagatttgaattataaataatgaaaggagctagacggagtttcactcttgttgcccaggcttgagtgcaatggtacgatcttggctcactgcaacctctgcctcccgggttccagcgattctcttgcctcaacctcctgagtagctgggattacaggcgcccaccaccatgcctggctaattttttgtatttttagtagagacggggttttgccatgttggccaggctggtctcgaattcctgacctcaggtgatccacctgcctcagcctcccaaaatgctgggattacaggtgcgagccatcatgctcagccctgaatccctgactttgttaatgacctgtccttaccaaccatgacctagagaagatttggctttttaagagttttggagaaagatggcataaaaatagattatttccttaaatcaattttttagcattacgctacctaagctcgtttggtctctcatagacaagaaaatacattatattgtaggttacattcttttaattttgaagagtcacaaaactcacattatttagagcaacaatatttgtatttggaaattaaaaattcatgatttcaagaaaatacataaaatttacatttttgagtagtttgaataagtttctatcttaattataatatttgtaggaaataacaaaacaaactcaaagcctttattatttccagtctctttgtaactgatgtggtatggtatcatcatgaaatctaaacagtggtacactgagtggttgtcctgttcttcaatctctgtggctgagaactgaaataacttagaagagacagatttttatgagagcagttttagaatcctgacactgatgtatagaactccaatttaaaaaagttatttatctattatatctctgatctttagtcacactaaggctctcaaaatgttggccaagattggtaatgattcatacgtacttgatttttcagggctccta

SEQ ID NO: 4040 - protein, 38 aa, Homosapiens
KELDGVSLLLPRLECNGTILAHCNLCLPGSSDSLASTS

SEQ ID NO: 4041 - DNA, 738 bp, Homosapiens
tataaatgtttgaggtgattgatatactaattaccctgatttgatcattacaaggtgcgagccatcatgctcagccctgaatccctgactttgttaatgacctgtccttaccaaccatgacctagagaagatttggctttttaagagttttggagaaagatggcataaaaatagattatttccttaaatcaattttttagcattacgctacctaagctcgtttggtctctcatagacaagaaaatacattatattgtaggttacattcttttaattttgaagagtcacaaaactcacattatttagagcaacaatatttgtatttggaaattaaaaattcatgatttcaagaaaatacataaaatttacatttttgagtagtttgaataagtttctatcttaattataatatttgtaggaaataacaaaacaaactcaaagcctttattatttccagtctctttgtaactgatgtggtatggtatcatcatgaaatctaaacagtggtacactgagtggttgtcctgttcttcaatctctgtggctgagaactgaaataacttagaagagacagatttttatgagagcagttttagaatcctgacactgatgtatagaactccaatttaaaaaagttatttatctattatatctctgatctttagtcacactaaggctctcaaaatgttggccaagattggtaatgattcatacgtacttgatttttcagggctccta

SEQ ID NO: 4042 - protein, 43 aa, Homosapiens
IISLNQFFSITLPKLVWSLIDKKIHYIVGYILLILKSHKTHII
